United States Patent Application Publication US 2025/0074962 A1 - sequence listing, part 13

SEQ ID NO: 21965 - DNA, 1671 bp, synthetic construct
  misc_feature 1..1671: note = Description of Artificial Sequence: Synthetic coding sequence
  source 1..1671: mol_type = other DNA
atgcccagctttgatgaggccctgcagagggtgggggagtttggccgcttccagaggagggtcttcctgctgctgtgcctgactggagtgacctttgccttcctgtttgtgggcgtggtgttcctgggcacccagcctgaccactactggtgccggggccccagcgctgctgccctggccgagcgctgtggctggagccctgaggaggagtggaacagaacagccccagccagccggggccctgagcccccagagcggcggggccgctgccagcgctacctgctggaggccgccaatgattctgccagcgccaccagcgccctgagctgtgccgaccccctggccgccttccccaacagaagtgcccccctggtgccctgccggggcggctggaggtatgcccaggcccacagcaccatcgtgtctgaatttgacctggtgtgtgtgaatgcctggatgctggacctgacccaggccatcctgaacctgggcttcctgactggagccttcaccctgggctatgctgctgacagatatggccgcatcgtcatctacctgctgagctgcctgggcgtgggcgtgactggagtggtggtggcctttgcccccaacttccctgtgtttgtgatcttccgcttcctgcagggcgtgtttgggaagggcacctggatgacctgctacgtgattgtgacagaaattgtgggcagcaagcagaggagaattgtgggcatcgtcatccagatgttcttcaccctgggcatcatcatcctgcccggcatcgcctacttcatccccaactggcagggcatccagctggccatcaccctgcccagcttcctgttcctgctgtactactgggtggtgcctgagagcccccgctggctgatcaccaggaagaagggggacaaggccctgcagatcctgcggagaattgccaagtgcaatggcaagtacctgagcagcaactacagcgagatcaccgtgacagatgaggaggtgagcaaccccagcttcctggacctggtgaggaccccccagatgaggaagtgcaccctcatcctgatgtttgcctggttcaccagcgctgtggtgtaccagggcctggtgatgaggctgggcatcattggaggcaacctgtacatcgacttcttcatcagcggcgtggtggagctgcccggggccctgctgatcctgctgaccatcgagcggctgggccggcggctgccctttgctgccagcaacatcgtggccggcgtggcctgcctggtgacagccttcctgcctgagggcatcgcctggctgcggaccaccgtggccaccctgggccgcctgggcatcaccatggcctttgagatcgtgtacctggtgaacagcgagctgtaccccaccaccctgaggaactttggagtgtccctgtgcagcggcctgtgtgactttggaggcatcatcgcccccttcctgctcttccggctggccgctgtgtggctggagctgcccctcatcatcttcggcatcctggccagcatctgtggcggcctggtgatgctgctgcctgagaccaagggcatcgccctgcctgagaccgtggatgatgtggagaagctgggcagcccccacagctgcaagtgtggcaggaacaagaagacccctgtgagccgcagccacctgtag

SEQ ID NO: 21966 - DNA, 1674 bp, synthetic construct
  misc_feature 1..1674: note = Description of Artificial Sequence: Synthetic coding sequence
  source 1..1674: mol_type = other DNA
atgcccagctttgatgaggccctgcagagggtgggggagtttggccgcttccagaggagggtcttcctgctgctgtgcctgactggagtgacctttgccttcctgtttgtgggcgtggtgttcctgggcacccagcctgaccactactggtgccggggccccagcgctgctgccctggccgagcgctgtggctggagccctgaggaggagtggaacagaacagccccagccagccggggccctgagcccccagagcggcggggccgctgccagcgctacctgctggaggccgccaatgattctgccagcgccaccagcgccctgagctgtgccgaccccctggccgccttccccaacagaagtgcccccctggtgccctgccggggcggctggaggtatgcccaggcccacagcaccatcgtgtctgaatttgacctggtgtgtgtgaatgcctggatgctggacctgacccaggccatcctgaacctgggcttcctgactggagccttcaccctgggctatgctgctgacagatatggccgcatcgtcatctacctgctgagctgcctgggcgtgggcgtgactggagtggtggtggcctttgcccccaacttccctgtgtttgtgatcttccgcttcctgcagggcgtgtttgggaagggcacctggatgacctgctacgtgattgtgacagaaattgtgggcagcaagcagaggagaattgtgggcatcgtcatccagatgttcttcaccctgggcatcatcatcctgcccggcatcgcctacttcatccccaactggcagggcatccagctggccatcaccctgcccagcttcctgttcctgctgtactactgggtggtgcctgagagcccccgctggctgatcaccaggaagaagggggacaaggccctgcagatcctgcggagaattgccaagtgcaatggcaagtacctgagcagcaactacagcgagatcaccgtgacagatgaggaggtgagcaaccccagcttcctggacctggtgaggaccccccagatgaggaagtgcaccctcatcctgatgtttgcctggttcaccagcgctgtggtgtaccagggcctggtgatgaggctgggcatcattggaggcaacctgtacatcgacttcttcatcagcggcgtggtggagctgcccggggccctgctgatcctgctgaccatcgagcggctgggccggcggctgccctttgctgccagcaacatcgtggccggcgtggcctgcctggtgacagccttcctgcctgaggccggcatcgcctggctgcggaccaccgtggccaccctgggccgcctgggcatcaccatggcctttgaaattgtgtacctggtgaacagcgagctgtaccccaccaccctgaggaactttggagtgtccctgtgcagcggcctgtgtgactttggaggcatcatcgcccccttcctgctcttccggctggccgctgtgtggctggagctgcccctcatcatcttcggcatcctggccagcatctgtggcggcctggtgatgctgctgcctgagaccaagggcatcgccctgcctgagaccgtggatgatgtggagaagctgggcagcccccacagctgcaagtgtggcaggaacaagaagacccctgtgagccgcagccacctgtag

SEQ ID NO: 21967 - DNA, 1017 bp, synthetic construct
  misc_feature 1..1017: note = Description of Artificial Sequence: Synthetic coding sequence
  source 1..1017: mol_type = other DNA
atggagctgcggagcggctctgtgggcagccaggccgtggcccggaggatggatggagacagcagagatggcggcggcggcaaggatgccactggaagtgaggactatgagaacctgcccaccagcgcctctgtgtccacccacatgacagctggggccatggccggcatcctggagcacagcgtgatgtaccctgtggacagcgtgaagaccaggatgcagagcctgagcccagaccccaaggcccagtacaccagcatctacggggccctgaagaagatcatgaggacagagggcttctggaggcccctgcggggcgtgaatgtgatgatcatgggcgccggccctgcccacgccatgtactttgcctgctatgagaacatgaagaggaccctgaatgatgtgttccaccaccagggcaacagccacctggccaacggcattgctggctccatggccaccctgctgcatgatgctgtgatgaacccagctgaggtggtgaagcagaggctgcagatgtacaacagccagcacaggtctgccatcagctgcatcagaacagtgtggaggacagagggcctgggcgccttctaccgcagctacaccacccagctgaccatgaacatccccttccagagcatccacttcatcacctatgagttcctgcaggagcaggtgaacccccacaggacctacaacccccagagccacatcatcagcggcggcctggccggggccctggccgccgccgccaccacccccctggatgtgtgcaagaccctgctgaacacccaggagaatgtggccctgagcctggccaacatcagcggccgcctgagcggcatggccaatgccttcagaacagtgtaccagctgaatggcctggccggctacttcaagggcatccaggcccgggtcatctaccagatgcccagcacagccatctcctggagcgtgtatgagttcttcaagtacttcctgaccaagaggcagctggagaacagagccccctactag

SEQ ID NO: 21968 - DNA, 2268 bp, synthetic construct
  misc_feature 1..2268: note = Description of Artificial Sequence: Synthetic coding sequence
  source 1..2268: mol_type = other DNA
atggccaggaagctgagcgtcatcctgatcctgacctttgccctgtctgtgaccaaccccctgcacgagctgaaggctgctgccttcccccagaccacagagaagatcagccccaactgggagagcggcatcaacgtggacctggccatcagcacccggcagtaccacctgcagcagctgttctaccgctacggggagaacaacagcctgtctgtggagggcttcaggaagctgctgcagaacatcggcatcgacaagatcaagaggatccacatccaccacgaccatgaccaccacagcgaccacgagcaccacagcgaccacgagcggcacagcgaccacgagcaccacagcgagcacgagcaccacagcgaccatgaccaccacagccaccacaaccacgccgccagcggcaagaacaagaggaaggccctgtgcccagaccatgacagcgacagcagcggcaaggaccccaggaacagccagggcaagggggcccacaggcctgagcacgccagcggcagaagaaatgtgaaggacagcgtgtctgccagcgaggtgaccagcacagtgtacaacacagtgtctgagggcacccacttcctggagaccatcgagacccccaggcctgggaagctgttccccaaggatgtgagcagcagcaccccaccttctgtgaccagcaagagccgggtgtcccggctggccggcaggaagaccaatgaatctgtgtctgagcccaggaagggcttcatgtacagcaggaacaccaatgaaaacccccaggagtgcttcaatgccagcaagctgctgaccagccacggcatgggcatccaggtgcccctgaatgccacagagttcaactacctgtgcccagccatcatcaaccagattgatgcccggagctgcctgatccacaccagcgagaagaaggccgagatcccccccaagacctacagcctgcagatcgcctgggtgggcggcttcatcgccatcagcatcatctccttcctgagcctgctgggcgtcatcctggtgcccctgatgaacagagtcttcttcaagttcctgctgtccttcctggtggccctggccgtgggcaccctgtctggagatgccttcctgcacctgctgccccacagccacgccagccaccaccacagccacagccatgaggagcccgccatggagatgaagaggggccccctcttcagccacctgagcagccagaacatcgaggagagcgcctactttgacagcacctggaagggcctgacagccctgggcggcctgtacttcatgttcctggtggagcacgtgctgaccctcatcaagcagttcaaggacaagaagaagaagaaccagaagaagccagaaaatgatgatgatgtggagatcaagaagcagctgagcaaatatgagagccagctgagcaccaatgaggagaaggtggacacagatgacagaacagagggctacctgcgggctgacagccaggagcccagccactttgacagccagcagcctgctgtgctggaggaggaggaggtgatgattgcccacgcccacccccaggaggtgtacaatgaatatgtgccccggggctgcaagaacaagtgccacagccacttccatgacaccctgggccagagtgatgacctgatccaccaccaccacgactaccaccacatcctgcaccaccaccaccaccagaaccaccacccccacagccacagccagcgctacagccgggaggagctgaaggatgctggggtggccaccctggcctggatggtgatcatgggagatggcctgcacaacttcagtgatggcctggccatcggggccgccttcacagagggcctgagcagcggcctgagcacctctgtggccgtgttctgccacgagctgccccatgagctgggggactttgctgtgctgctgaaggccggcatgacagtgaagcaggccgtgctgtacaatgccctgagcgccatgctggcctacctgggcatggccaccggcatcttcatcggccactatgcagaaaatgtgtccatgtggatctttgccctgacagctggcctcttcatgtatgtggccctggtggacatggtgcctgagatgctgcacaatgatgccagtgaccacggctgcagccgctggggctacttcttcctgcagaatgccggcatgctgctgggcttcggcatcatgctgctgatcagcatctttgagcacaagatcgtgttccgcatcaacttctag

SEQ ID NO: 21969 - DNA, 1302 bp, synthetic construct
  misc_feature 1..1302: note = Description of Artificial Sequence: Synthetic coding sequence
  source 1..1302: mol_type = other DNA
atgggcatccaggtgcccctgaatgccacagagttcaactacctgtgcccagccatcatcaaccagattgatgcccggagctgcctgatccacaccagcgagaagaaggccgagatcccccccaagacctacagcctgcagatcgcctgggtgggcggcttcatcgccatcagcatcatctccttcctgagcctgctgggcgtcatcctggtgcccctgatgaacagagtcttcttcaagttcctgctgtccttcctggtggccctggccgtgggcaccctgtctggagatgccttcctgcacctgctgccccacagccacgccagccaccaccacagccacagccatgaggagcccgccatggagatgaagaggggccccctcttcagccacctgagcagccagaacatcgaggagagcgcctactttgacagcacctggaagggcctgacagccctgggcggcctgtacttcatgttcctggtggagcacgtgctgaccctcatcaagcagttcaaggacaagaagaagaagaaccagaagaagccagaaaatgatgatgatgtggagatcaagaagcagctgagcaaatatgagagccagctgagcaccaatgaggagaaggtggacacagatgacagaacagagggctacctgcgggctgacagccaggagcccagccactttgacagccagcagcctgctgtgctggaggaggaggaggtgatgattgcccacgcccacccccaggaggtgtacaatgaatatgtgccccggggctgcaagaacaagtgccacagccacttccatgacaccctgggccagagtgatgacctgatccaccaccaccacgactaccaccacatcctgcaccaccaccaccaccagaaccaccacccccacagccacagccagcgctacagccgggaggagctgaaggatgctggggtggccaccctggcctggatggtgatcatgggagatggcctgcacaacttcagtgatggcctggccatcggggccgccttcacagagggcctgagcagcggcctgagcacctctgtggccgtgttctgccacgagctgccccatgagctgggggactttgctgtgctgctgaaggccggcatgacagtgaagcaggccgtgctgtacaatgccctgagcgccatgctggcctacctgggcatggccaccggcatcttcatcggccactatgcagaaaatgtgtccatgtggatctttgccctgacagctggcctcttcatgtatgtggccctggtggacatggtgtccttctag

SEQ ID NO: 21970 - DNA, 1233 bp, synthetic construct
  misc_feature 1..1233: note = Description of Artificial Sequence: Synthetic coding sequence
  source 1..1233: mol_type = other DNA
atgggcatccaggtgcccctgaatgccacagagttcaactacctgtgcccagccatcatcaaccagattgatgcccggagctgcctgatccacaccagcgagaagaaggccgagatcccccccaagacctacagcctgcagatcgcctgggtgggcggcttcatcgccatcagcatcatctccttcctgagcctgctgggcgtcatcctggtgcccctgatgaacagagtcttcttcaagttcctgctgtccttcctggtggccctggccgtgggcaccctgtctggagatgccttcctgcacctgctgccccacagccacgccagccaccaccacagccacagccatgaggagcccgccatggagatgaagaggggccccctcttcagccacctgagcagccagaacatcgaggagagcgcctactttgacagcacctggaagggcctgacagccctgggcggcctgtacttcatgttcctggtggagcacgtgctgaccctcatcaagcagttcaaggacaagaagaagaagaaccagaagaagccagaaaatgatgatgatgtggagatcaagaagcagctgagcaaatatgagagccagctgagcaccaatgaggagaaggtggacacagatgacagaacagagggctacctgcgggctgacagccaggagcccagccactttgacagccagcagcctgctgtgctggaggaggaggaggtgatgattgcccacgcccacccccaggaggtgtacaatgaatatgtgccccggggctgcaagaacaagtgccacagccacttccatgacaccctgggccagagtgatgacctgatccaccaccaccacgactaccaccacatcctgcaccaccaccaccaccagaaccaccacccccacagccacagccagcgctacagccgggaggagctgaaggatgctggggtggccaccctggcctggatggtgatcatgggagatggcctgcacaacttcagtgatggcctggccatcggggccgccttcacagagggcctgagcagcggcctgagcacctctgtggccctggtggacatggtgcctgagatgctgcacaatgatgccagtgaccacggctgcagccgctggggctacttcttcctgcagaatgccggcatgctgctgggcttcggcatcatgctgctgatcagcatctttgagcacaagatcgtgttccgcatcaacttctag

SEQ ID NO: 21971 - DNA, 1833 bp, synthetic construct
  misc_feature 1..1833: note = Description of Artificial Sequence: Synthetic coding sequence
  source 1..1833: mol_type = other DNA
atggacaccccccggggcatcggcacctttgtggtgtgggactatgtggtgtttgctggcatgctggtgatctctgctgccatcggcatctactatgcctttgctgggggcggccagcagaccagcaaggacttcctgatgggcggccgcaggatgacagctgtgcctgtggccctgagcctgacagccagcttcatgtctgctgtgacagtgctgggcacccccagcgaggtgtacagatttggagccatcttcagcatctttgccttcacctacttctttgtggtggtgatctctgctgaggtgttcctgcctgtgttctacaagctgggcatcaccagcacctatgagtacctggagctgcgcttcaacaagtgtgtgcggctgtgtggcaccgtgctcttcatcgtgcagaccatcctgtacacaggaattgtcatctatgccccagccctggccctgaaccaggtgacaggctttgacctgtggggcgctgtggtggccactggagtggtgtgcaccttctactgcaccctgggcggcctgaaggccgtcatctggacagatgtgttccaggtgggcatcatggtggccggctttgccagcgtcatcatccaggccgtggtgatgcagggcggcatcagcaccatcctgaatgatgcctatgatggcggccgcctgaacttctggaacttcaaccccaaccccctgcagaggcacaccttctggaccatcatcattggaggcaccttcacctggaccagcatctatggagtgaaccagagccaggtgcagcgctacatcagctgcaagagccgcttccaggccaagctgagcctgtacatcaacctggtgggcctgtgggccatcctgacctgcagcgtcttctgtggcctggccctgtacagccgctaccatgactgtgacccctggacagccaagaaggtgtctgccccagaccagctgatgccctacctggtgctggacatcctgcaggactacccaggcctgcccggcctgtttgtggcctgtgcctacagcggcaccctgagcacagtgagcagcagcatcaatgccctggccgctgtgacagtggaggacctgatcaagccctacttccgcagcctgtctgagaggagcctgtcctggatcagccagggcatgtctgtggtgtatggagccctgtgcatcggcatggccgccctggccagcctgatgggcgccctgctgcaggccgccctgtctgtgtttggcatggtgggcggccccctgatgggcctgtttgccctgggcatcctggtgccctttgccaacagcatcggggccctggtgggcctgatggccggctttgccatcagcctgtgggtgggcatcggggcccagatctacccacccctgcctgagaggaccctgcccctgcacctggacatccagggctgcaacagcacctacaatgagaccaacctgatgaccaccacagagatgcccttcaccaccagcgtcttccagatctacaacgtgcagaggacccccctgatggacaactggtacagcctgagctacctgtacttcagcacagtgggcaccctggtgaccctgctggtgggcatcctggtgtccctgagcactggaggcaggaagcagaacctggacccccgctacatcctgaccaaggaggacttcctgagcaactttgacatcttcaagaagaagaagcacgtgctgagctacaagagccaccctgtggaggatggcggcacagacaacccagccttcaaccacatcgagctgaacagcgaccagagcggcaagagcaatggcacccggctgtag

SEQ ID NO: 21972 - DNA, 1071 bp, synthetic construct
  misc_feature 1..1071: note = Description of Artificial Sequence: Synthetic coding sequence
  source 1..1071: mol_type = other DNA
atggacatggctgatgagcccctgaatggcagccacacctggctgagcatcccctttgacctgaatggatctgtggtgtccaccaacaccagcaaccagacagagccctactatgacctgaccagcaatgctgtgctgaccttcatctactttgtggtgtgcatcatcggcctgtgtggcaacaccctggtgatctacgtgatcctgcgctatgccaagatgaagaccatcaccaacatctacatcctgaacctggccatcgcagatgagctgttcatgctgggcctgcccttcctggccatgcaggtggccctggtgcactggccctttgggaaggccatctgccgggtggtgatgacagtggatggcatcaaccagttcaccagcatcttctgcctgactgtgatgagcattgaccgctacctggccgtggtgcaccccatcaagagcgccaagtggaggcggcccaggacagccaagatgatcaccatggctgtgtggggcgtgtccctgctggtgatcctgcccatcatgatctatgccggcctgcggagcaaccagtggggccgcagcagctgcaccatcaactggccaggagagagcggggcctggtacacaggcttcatcatctacaccttcatcctgggcttcctggtgcccctgaccatcatctgcctgtgctacctgttcatcatcatcaaggtgaagagcagcggcatccgggtgggcagcagcaagaggaagaagtctgagaagaaggtgaccaggatggtgtccatcgtggtggccgtgttcatcttctgctggctgcccttctacatcttcaacgtgtcctctgtgtccatggccatcagccccaccccagccctgaagggcatgtttgattttgtggtggtgctgacctacgccaacagctgtgccaaccccatcctgtatgccttcctgagtgacaacttcaagaagagcttccagaatgtgctgtgcctggtgaaggtggacaacagcaagtctggagaggagggcagctgcctggacatgatcttcaggaacaacaagaacaggaagaagtag

SEQ ID NO: 21973 - DNA, 1110 bp, synthetic construct
  misc_feature 1..1110: note = Description of Artificial Sequence: Synthetic coding sequence
  source 1..1110: mol_type = other DNA
atggacatggctgatgagcccctgaatggcagccacacctggctgagcatcccctttgacctgaatggatctgtggtgtccaccaacaccagcaaccagacagagccctactatgacctgaccagcaatgctgtgctgaccttcatctactttgtggtgtgcatcatcggcctgtgtggcaacaccctggtgatctacgtgatcctgcgctatgccaagatgaagaccatcaccaacatctacatcctgaacctggccatcgcagatgagctgttcatgctgggcctgcccttcctggccatgcaggtggccctggtgcactggccctttgggaaggccatctgccgggtggtgatgacagtggatggcatcaaccagttcaccagcatcttctgcctgactgtgatgagcattgaccgctacctggccgtggtgcaccccatcaagagcgccaagtggaggcggcccaggacagccaagatgatcaccatggctgtgtggggcgtgtccctgctggtgatcctgcccatcatgatctatgccggcctgcggagcaaccagtggggccgcagcagctgcaccatcaactggccaggagagagcggggcctggtacacaggcttcatcatctacaccttcatcctgggcttcctggtgcccctgaccatcatctgcctgtgctacctgttcatcatcatcaaggtgaagagcagcggcatccgggtgggcagcagcaagaggaagaagtctgagaagaaggtgaccaggatggtgtccatcgtggtggccgtgttcatcttctgctggctgcccttctacatcttcaacgtgtcctctgtgtccatggccatcagccccaccccagccctgaagggcatgtttgattttgtggtggtgctgacctacgccaacagctgtgccaaccccatcctgtatgccttcctgagtgacaacttcaagaagagcttccagaatgtgctgtgcctggtgaaggtgtctggaacagatgatggagagaggagtgacagcaagcaggacaagagccggctgaatgagaccacagagacccagaggaccctgctgaatggagacctgcagaccagcatctag

SEQ ID NO: 21974 - DNA, 3315 bp, synthetic construct
  misc_feature 1..3315: note = Description of Artificial Sequence: Synthetic coding sequence
  source 1..3315: mol_type = other DNA
atgcaggcccagcagctgccctatgagttcttcagcgaggagaatgcccccaagtggaggggcctgctggtgcctgccctgaagaaggtgcagggccaggtgcaccccaccctggagagcaatgatgatgccctgcagtatgtggaggagctgatcctgcagctgctgaacatgctgtgccaggcccagcccaggtctgccagtgatgtggaggagcgggtgcagaagagcttcccccaccccatcgacaagtgggccatcgcagatgcccagagcgccatcgagaagaggaagagaagaaaccccctgagcctgcctgtggagaagatccaccccctgctgaaggaggtgctgggctacaagattgaccaccaggtgtctgtgtacatcgtggccgtgctggagtacatctctgctgacatcctgaagctggtgggcaactacgtgaggaacatccgccactatgagatcaccaagcaggacatcaaggtggccatgtgtgccgacaaggtgctgatggacatgttccaccaggatgtggaggacatcaacatcctgagcctgacagatgaggagcccagcaccagcggggagcagacctactatgacctggtgaaggccttcatggccgagatccggcagtacatccgggagctgaacctgatcatcaaggtgttccgggagccctttgtgagcaacagcaagctgttcagcgccaatgatgtggagaacatcttcagcagaattgtggacatccacgagctgtctgtgaagctgctgggccacatcgaggacacagtggagatgacagatgagggcagcccccaccccctggtgggcagctgctttgaggacctggccgaggagctggcctttgacccctatgagagctatgcccgggacatcctgcggcccggcttccatgaccgcttcctgagccagctgagcaagccaggggccgccctgtacctgcagagcattggagagggcttcaaggaggccgtgcagtatgtgctgccccggctgctgctggcccctgtgtaccactgcctgcactactttgagctgctgaagcagctggaggagaagtctgaggaccaggaggacaaggaatgtctgaagcaggccatcacagccctgctgaatgtgcagagcggcatggagaagatctgcagcaagagcctggccaagaggcggctgtctgagagcgcctgccgcttctacagccagcagatgaagggcaagcagctggccatcaagaagatgaatgagatccagaagaacattgatggctgggagggcaaggacatcggccagtgctgcaatgagttcatcatggagggcaccctgaccagggtgggcgccaagcatgagcggcacatcttcctgtttgatggcctgatgatctgctgcaagagcaaccacggccagccccggctgcccggggccagcaatgctgagtaccgcctgaaggagaagttcttcatgaggaaggtgcagatcaatgacaaggatgacaccaatgagtacaagcacgcctttgagatcatcctgaaggatgaaaattctgtcatcttcagcgccaagtctgctgaggagaagaacaactggatggccgccctgatcagcctgcagtaccgcagcaccctggagaggatgctggatgtgaccatgctgcaggaggagaaggaggagcagatgaggctgcccagcgcagatgtgtacagatttgctgagccagacagcgaggagaacatcatctttgaggagaacatgcagcccaaggccggcatccccatcatcaaggccggcaccgtcatcaagctgattgaaaggctgacctaccacatgtatgctgaccccaactttgtgaggaccttcctgaccacctaccgctccttctgcaagccccaggagctgctgagcctcatcatcgagagatttgagatccctgagcctgagcccacagaggccgacagaattgccattgaaaatggagaccagcccctgtctgctgagctgaagcgcttcaggaaggagtacatccagcctgtgcagctgcgggtgctgaatgtgtgccgccactgggtggagcaccacttctatgactttgaaagagatgcctacctgctgcagaggatggaggagttcatcggcaccgtgcggggcaaggccatgaagaagtgggtggagagcatcaccaagatcatccagaggaagaagatcgcccgggacaatggacctggccacaacatcaccttccagagcagcccccccaccgtggagtggcacatcagccggcccggccacatcgagacctttgacctgctgaccctgcaccccatcgagatcgcccggcagctgaccctgctggagagtgacctgtacagagctgtgcagcccagcgagctggtgggctctgtgtggaccaaggaggacaaggagatcaacagccccaacctgctgaagatgatccgccacaccaccaacctgaccctgtggtttgagaagtgcatcgtggagacagagaacctggaggagcgggtggccgtggtgagccgcatcatcgagatcctgcaggtgttccaggagctgaacaacttcaatggagtgctggaggtggtgtctgccatgaacagcagccctgtgtaccgcctggaccacacctttgagcagatccccagccggcagaagaagatcctggaggaggcccacgagctgtctgaggaccactacaagaagtacctggccaagctgcggagcatcaaccccccctgtgtgcccttcttcggcatctacctgaccaacatcctgaagacagaggagggcaaccctgaggtgctgaagagacatggcaaggagctgatcaacttcagcaagaggaggaaggtggccgagatcaccggggagatccagcagtaccagaaccagccctactgcctgcgggtggagagtgacatcaagcgcttctttgagaacctgaaccccatgggcaacagcatggagaaggagttcacagactacctgttcaacaagagcctggagattgagcccaggaaccccaagcccctgccccgcttccccaagaagtacagctaccccctgaagagccctggggtgcggcccagcaaccccaggcctggcaccatgaggcaccccacccccctgcagcaggagcccaggaagatctcctacagccgcatccctgagagcgagacagagagcacagccagcgcccccaacagccccaacacagtgaacaccagcgcctgcttctggtgcttccagtaccaccgctgcctgcagtgcatctag

SEQ ID NO: 21975 - DNA, 3957 bp, synthetic construct
  misc_feature 1..3957: note = Description of Artificial Sequence: Synthetic coding sequence
  source 1..3957: mol_type = other DNA
atgcaggcccagcagctgccctatgagttcttcagcgaggagaatgcccccaagtggaggggcctgctggtgcctgccctgaagaaggtgcagggccaggtgcaccccaccctggagagcaatgatgatgccctgcagtatgtggaggagctgatcctgcagctgctgaacatgctgtgccaggcccagcccaggtctgccagtgatgtggaggagcgggtgcagaagagcttcccccaccccatcgacaagtgggccatcgcagatgcccagagcgccatcgagaagaggaagagaagaaaccccctgagcctgcctgtggagaagatccaccccctgctgaaggaggtgctgggctacaagattgaccaccaggtgtctgtgtacatcgtggccgtgctggagtacatctctgctgacatcctgaagctggtgggcaactacgtgaggaacatccgccactatgagatcaccaagcaggacatcaaggtggccatgtgtgccgacaaggtgctgatggacatgttccaccaggatgtggaggacatcaacatcctgagcctgacagatgaggagcccagcaccagcggggagcagacctactatgacctggtgaaggccttcatggccgagatccggcagtacatccgggagctgaacctgatcatcaaggtgttccgggagccctttgtgagcaacagcaagctgttcagcgccaatgatgtggagaacatcttcagcagaattgtggacatccacgagctgtctgtgaagctgctgggccacatcgaggacacagtggagatgacagatgagggcagcccccaccccctggtgggcagctgctttgaggacctggccgaggagctggcctttgacccctatgagagctatgcccgggacatcctgcggcccggcttccatgaccgcttcctgagccagctgagcaagccaggggccgccctgtacctgcagagcattggagagggcttcaaggaggccgtgcagtatgtgctgccccggctgctgctggcccctgtgtaccactgcctgcactactttgagctgctgaagcagctggaggagaagtctgaggaccaggaggacaaggaatgtctgaagcaggccatcacagccctgctgaatgtgcagagcggcatggagaagatctgcagcaagagcctggccaagaggcggctgtctgagagcgcctgccgcttctacagccagcagatgaagggcaagcagctggccatcaagaagatgaatgagatccagaagaacattgatggctgggagggcaaggacatcggccagtgctgcaatgagttcatcatggagggcaccctgaccagggtgggcgccaagcatgagcggcacatcttcctgtttgatggcctgatgatctgctgcaagagcaaccacggccagccccggctgcccggggccagcaatgctgagtaccgcctgaaggagaagttcttcatgaggaaggtgcagatcaatgacaaggatgacaccaatgagtacaagcacgcctttgagatcatcctgaaggatgaaaattctgtcatcttcagcgccaagtctgctgaggagaagaacaactggatggccgccctgatcagcctgcagtaccgcagcaccctggagaggatgctggatgtgaccatgctgcaggaggagaaggaggagcagatgaggctgcccagcgcagatgtgtacagatttgctgagccagacagcgaggagaacatcatctttgaggagaacatgcagcccaaggccggcatccccatcatcaaggccggcaccgtcatcaagctgattgaaaggctgacctaccacatgtatgctgaccccaactttgtgaggaccttcctgaccacctaccgctccttctgcaagccccaggagctgctgagcctcatcatcgagagatttgagatccctgagcctgagcccacagaggccgacagaattgccattgaaaatggagaccagcccctgtctgctgagctgaagcgcttcaggaaggagtacatccagcctgtgcagctgcgggtgctgaatgtgtgccgccactgggtggagcaccacttctatgactttgaaagagatgcctacctgctgcagaggatggaggagttcatcggcaccgtgcggggcaaggccatgaagaagtgggtggagagcatcaccaagatcatccagaggaagaagatcgcccgggacaatggacctggccacaacatcaccttccagagcagcccccccaccgtggagtggcacatcagccggcccggccacatcgagacctttgacctgctgaccctgcaccccatcgagatcgcccggcagctgaccctgctggagagtgacctgtacagagctgtgcagcccagcgagctggtgggctctgtgtggaccaaggaggacaaggagatcaacagccccaacctgctgaagatgatccgccacaccaccaacctgaccctgtggtttgagaagtgcatcgtggagacagagaacctggaggagcgggtggccgtggtgagccgcatcatcgagatcctgcaggtgttccaggagctgaacaacttcaatggagtgctggaggtggtgtctgccatgaacagcagccctgtgtaccgcctggaccacacctttgagcagatccccagccggcagaagaagatcctggaggaggcccacgagctgtctgaggaccactacaagaagtacctggccaagctgcggagcatcaaccccccctgtgtgcccttcttcggcatctacctgaccaacatcctgaagacagaggagggcaaccctgaggtgctgaagagacatggcaaggagctgatcaacttcagcaagaggaggaaggtggccgagatcaccggggagatccagcagtaccagaaccagccctactgcctgcgggtggagagtgacatcaagcgcttctttgagaacctgaaccccatgggcaacagcatggagaaggagttcacagactacctgttcaacaagagcctggagattgagcccaggaaccccaagcccctgccccgcttccccaagaagtacagctaccccctgaagagccctggggtgcggcccagcaaccccaggcctggcaccatgaggcaccccacccccctgcagcaggagcccaggaagatctcctacagccgcatccctgagagcgagacagagagcacagccagcgcccccaacagccccaggacccccctgaccccacctccagccagcggggccagcagcaccacagatgtgtgcagcgtgtttgacagcgaccacagcagccccttccacagccgcagcgcctctgtgagcagcatcagcctgaccaagggcacagatgaggtgcctgtgcccccacctgtgcccccaagaagaagacctgagagcgccccagctgagagcagccccagcaagatcatgagcaagcacctggacagccccccagccatccccccccggcagcccaccagcaaggcctacagcccccgctacagcatcagtgacaggaccagcatcagtgaccccccagagagcccccccctgctgcccccccgggagcctgtgaggaccccagatgtgttcagcagcagccccctgcacctgcagcccccacccctgggcaagaagagtgaccatggaaatgccttcttccccaacagccccagccccttcaccccacctccaccccagacccccagcccccacggcaccaggaggcacctgcccagcccccccctgacccaggaggtggacctgcacagcattgctggcccccctgtgcccccccggcagagcaccagccagcacatccccaagctgccccccaagacctacaagcgggagcacacccaccccagcatgcacagagatggcccccccctgctggagaatgcccacagcagctag

SEQ ID NO: 21976 - DNA, 4002 bp, synthetic construct
  misc_feature 1..4002: note = Description of Artificial Sequence: Synthetic coding sequence
  source 1..4002: mol_type = other DNA
atgcaggcccagcagctgccctatgagttcttcagcgaggagaatgcccccaagtggaggggcctgctggtgcctgccctgaagaaggtgcagggccaggtgcaccccaccctggagagcaatgatgatgccctgcagtatgtggaggagctgatcctgcagctgctgaacatgctgtgccaggcccagcccaggtctgccagtgatgtggaggagcgggtgcagaagagcttcccccaccccatcgacaagtgggccatcgcagatgcccagagcgccatcgagaagaggaagagaagaaaccccctgagcctgcctgtggagaagatccaccccctgctgaaggaggtgctgggctacaagattgaccaccaggtgtctgtgtacatcgtggccgtgctggagtacatctctgctgacatcctgaagctggtgggcaactacgtgaggaacatccgccactatgagatcaccaagcaggacatcaaggtggccatgtgtgccgacaaggtgctgatggacatgttccaccaggatgtggaggacatcaacatcctgagcctgacagatgaggagcccagcaccagcggggagcagacctactatgacctggtgaaggccttcatggccgagatccggcagtacatccgggagctgaacctgatcatcaaggtgttccgggagccctttgtgagcaacagcaagctgttcagcgccaatgatgtggagaacatcttcagcagaattgtggacatccacgagctgtctgtgaagctgctgggccacatcgaggacacagtggagatgacagatgagggcagcccccaccccctggtgggcagctgctttgaggacctggccgaggagctggcctttgacccctatgagagctatgcccgggacatcctgcggcccggcttccatgaccgcttcctgagccagctgagcaagccaggggccgccctgtacctgcagagcattggagagggcttcaaggaggccgtgcagtatgtgctgccccggctgctgctggcccctgtgtaccactgcctgcactactttgagctgctgaagcagctggaggagaagtctgaggaccaggaggacaaggaatgtctgaagcaggccatcacagccctgctgaatgtgcagagcggcatggagaagatctgcagcaagagcctggccaagaggcggctgtctgagagcgcctgccgcttctacagccagcagatgaagggcaagcagctggccatcaagaagatgaatgagatccagaagaacattgatggctgggagggcaaggacatcggccagtgctgcaatgagttcatcatggagggcaccctgaccagggtgggcgccaagcatgagcggcacatcttcctgtttgatggcctgatgatctgctgcaagagcaaccacggccagccccggctgcccggggccagcaatgctgagtaccgcctgaaggagaagttcttcatgaggaaggtgcagatcaatgacaaggatgacaccaatgagtacaagcacgcctttgagatcatcctgaaggatgaaaattctgtcatcttcagcgccaagtctgctgaggagaagaacaactggatggccgccctgatcagcctgcagtaccgcagcaccctggagaggatgctggatgtgaccatgctgcaggaggagaaggaggagcagatgaggctgcccagcgcagatgtgtacagatttgctgagccagacagcgaggagaacatcatctttgaggagaacatgcagcccaaggccggcatccccatcatcaaggccggcaccgtcatcaagctgattgaaaggctgacctaccacatgtatgctgaccccaactttgtgaggaccttcctgaccacctaccgctccttctgcaagccccaggagctgctgagcctcatcatcgagagatttgagatccctgagcctgagcccacagaggccgacagaattgccattgaaaatggagaccagcccctgtctgctgagctgaagcgcttcaggaaggagtacatccagcctgtgcagctgcgggtgctgaatgtgtgccgccactgggtggagcaccacttctatgactttgaaagagatgcctacctgctgcagaggatggaggagttcatcggcaccgtgcggggcaaggccatgaagaagtgggtggagagcatcaccaagatcatccagaggaagaagatcgcccgggacaatggacctggccacaacatcaccttccagagcagcccccccaccgtggagtggcacatcagccggcccggccacatcgagacctttgacctgctgaccctgcaccccatcgagatcgcccggcagctgaccctgctggagagtgacctgtacagagctgtgcagcccagcgagctggtgggctctgtgtggaccaaggaggacaaggagatcaacagccccaacctgctgaagatgatccgccacaccaccaacctgaccctgtggtttgagaagtgcatcgtggagacagagaacctggaggagcgggtggccgtggtgagccgcatcatcgagatcctgcaggtgttccaggagctgaacaacttcaatggagtgctggaggtggtgtctgccatgaacagcagccctgtgtaccgcctggaccacacctttgagcagatccccagccggcagaagaagatcctggaggaggcccacgagctgtctgaggaccactacaagaagtacctggccaagctgcggagcatcaaccccccctgtgtgcccttcttcggcatctacctgaccaacatcctgaagacagaggagggcaaccctgaggtgctgaagagacatggcaaggagctgatcaacttcagcaagaggaggaaggtggccgagatcaccggggagatccagcagtaccagaaccagccctactgcctgcgggtggagagtgacatcaagcgcttctttgagaacctgaaccccatgggcaacagcatggagaaggagttcacagactacctgttcaacaagagcctggagattgagcccaggaaccccaagcccctgccccgcttccccaagaagtacagctaccccctgaagagccctggggtgcggcccagcaaccccaggcctggcaccatgaggcaccccacccccctgcagcaggagcccaggaagatctcctacagccgcatccctgagagcgagacagagagcacagccagcgcccccaacagccccaggacccccctgaccccacctccagccagcggggccagcagcaccacagatgtgtgcagcgtgtttgacagcgaccacagcagccccttccacagcagcaatgacacagtgttcatccaggtgaccctgccccacggccccaggtctgcctctgtgagcagcatcagcctgaccaagggcacagatgaggtgcctgtgcccccacctgtgccccccaggagaagacctgagagcgccccagctgagagcagccccagcaagatcatgagcaagcacctggacagccccccagccatccccccccggcagcccaccagcaaggcctacagcccccgctacagcatcagtgacaggaccagcatcagtgaccccccagagagcccccccctgctgcccccccgggagcctgtgaggaccccagatgtgttcagcagcagccccctgcacctgcagcccccacccctgggcaagaagagtgaccacggcaatgccttcttccccaacagccccagccccttcaccccacctccaccccagacccccagcccccacggcacccggcggcacctgcccagcccccccctgacccaggaggtggacctgcacagcattgctggcccccctgtgcccccccggcagagcaccagccagcacatccccaagctgccccccaagacctacaagcgggagcacacccaccccagcatgcacagagatggcccccccctgctggagaatgcccacagcagctag

SEQ ID NO: 21977 - DNA, 4002 bp, synthetic construct; identical to SEQ ID NO: 21976
  misc_feature 1..4002: note = Description of Artificial Sequence: Synthetic coding sequence
  source 1..4002: mol_type = other DNA

SEQ ID NO: 21978 - DNA, 945 bp, synthetic construct
  misc_feature 1..945: note = Description of Artificial Sequence: Synthetic coding sequence
  source 1..945: mol_type = other DNA
atgctgtgccaggcccagcccaggtctgccagtgatgtggaggagcgggtgcagaagagcttcccccaccccatcgacaagtgggccatcgcagatgcccagagcgccatcgagaagaggaagagaagaaaccccctgagcctgcctgtggagaagatccaccccctgctgaaggaggtgctgggctacaagattgaccaccaggtgtctgtgtacatcgtggccgtgctggagtacatctctgctgacatcctgaagctggtgggcaactacgtgaggaacatccgccactatgagatcaccaagcaggacatcaaggtggccatgtgtgccgacaaggtgctgatggacatgttccaccaggatgtggaggacatcaacatcctgagcctgacagatgaggagcccagcaccagcggggagcagacctactatgacctggtgaaggccttcatggccgagatccggcagtacatccgggagctgaacctgatcatcaaggtgttccgggagccctttgtgagcaacagcaagctgttcagcgccaatgatgtggagaacatcttcagccgcatcgtggacatccacgagctgtctgtgaagctgctgggccacattgaagatactgtggagatgacagatgagggcagcccccaccccctggtgggcagctgctttgaggacctggccgaggagctggcctttgacccctatgagagctatgcccgggacatcctgcggcccggcttccatgaccgcttcctgagccagctgagcaagccaggagctgccctgtacctgcagagcatcggggagggcttcaaggaggccgtgcagtatgtgctgccccggctgctgctggcccctgtgtaccactgcctgcactactttgagctgctgaagttcccctttggagacctgagccggctgcgggacagcgtgtag

SEQ ID NO: 21979 - DNA, 3153 bp, synthetic construct
  misc_feature 1..3153: note = Description of Artificial Sequence: Synthetic coding sequence
  source 1..3153: mol_type = other DNA
atgacagatgagggcagcccccaccccctggtgggcagctgctttgaggacctggccgaggagctggcctttgacccctatgagagctatgcccgggacatcctgcggcccggcttccatgaccgcttcctgagccagctgagcaagccaggggccgccctgtacctgcagagcattggagagggcttcaaggaggccgtgcagtatgtgctgccccggctgctgctggcccctgtgtaccactgcctgcactactttgagctgctgaagcagctggaggagaagtctgaggaccaggaggacaaggaatgtctgaagcaggccatcacagccctgctgaatgtgcagagcggcatggagaagatctgcagcaagagcctggccaagaggcggctgtctgagagcgcctgccgcttctacagccagcagatgaagggcaagcagctggccatcaagaagatgaatgagatccagaagaacattgatggctgggagggcaaggacatcggccagtgctgcaatgagttcatcatggagggcaccctgaccagggtgggcgccaagcatgagcggcacatcttcctgtttgatggcctgatgatctgctgcaagagcaaccacggccagccccggctgcccggggccagcaatgctgagtaccgcctgaaggagaagttcttcatgaggaaggtgcagatcaatgacaaggatgacaccaatgagtacaagcacgcctttgagatcatcctgaaggatgaaaattctgtcatcttcagcgccaagtctgctgaggagaagaacaactggatggccgccctgatcagcctgcagtaccgcagcaccctggagaggatgctggatgtgaccatgctgcaggaggagaaggaggagcagatgaggctgcccagcgcagatgtgtacagatttgctgagccagacagcgaggagaacatcatctttgaggagaacatgcagcccaaggccggcatccccatcatcaaggccggcaccgtcatcaagctgattgaaaggctgacctaccacatgtatgctgaccccaactttgtgaggaccttcctgaccacctaccgctccttctgcaagccccaggagctgctgagcctcatcatcgagagatttgagatccctgagcctgagcccacagaggccgacagaattgccattgaaaatggagaccagcccctgtctgctgagctgaagcgcttcaggaaggagtacatccagcctgtgcagctgcgggtgctgaatgtgtgccgccactgggtggagcaccacttctatgactttgaaagagatgcctacctgctgcagaggatggaggagttcatcggcaccgtgcggggcaaggccatgaagaagtgggtggagagcatcaccaagatcatccagaggaagaagatcgcccgggacaatggacctggccacaacatcaccttccagagcagcccccccaccgtggagtggcacatcagccggcccggccacatcgagacctttgacctgctgaccctgcaccccatcgagatcgcccggcagctgaccctgctggagagtgacctgtacagagctgtgcagcccagcgagctggtgggctctgtgtggaccaaggaggacaaggagatcaacagccccaacctgctgaagatgatccgccacaccaccaacctgaccctgtggtttgagaagtgcatcgtggagacagagaacctggaggagcgggtggccgtggtgagccgcatcatcgagatcctgcaggtgttccaggagctgaacaacttcaatggagtgctggaggtggtgtctgccatgaacagcagccctgtgtaccgcctggaccacacctttgagcagatccccagccggcagaagaagatcctggaggaggcccacgagctgtctgaggaccactacaagaagtacctggccaagctgcggagcatcaaccccccctgtgtgcccttcttcggcatctacctgaccaacatcctgaagacagaggagggcaaccctgaggtgctgaagagacatggcaaggagctgatcaacttcagcaagaggaggaaggtggccgagatcaccggggagatccagcagtaccagaaccagccctactgcctgcgggtggagagtgacatcaagcgcttctttgagaacctgaaccccatgggcaacagcatggagaaggagttcacagactacctgttcaacaagagcctggagattgagcccaggaaccccaagcccctgccccgcttccccaagaagtacagctaccccctgaagagccctggggtgcggcccagcaaccccaggcctggcaccatgaggcaccccacccccctgcagcaggagcccaggaagatctcctacagccgcatccctgagagcgagacagagagcacagccagcgcccccaacagccccaggacccccctgaccccacctccagccagcggggccagcagcaccacagatgtgtgcagcgtgtttgacagcgaccacagcagccccttccacagccgcagcgcctctgtgagcagcatcagcctgaccaagggcacagatgaggtgcctgtgcccccacctgtgcccccaagaagaagacctgagagcgccccagctgagagcagccccagcaagatcatgagcaagcacctggacagccccccagccatccccccccggcagcccaccagcaaggcctacagcccccgctacagcatcagtgacaggaccagcatcagtgaccccccagagagcccccccctgctgcccccccgggagcctgtgaggaccccagatgtgttcagcagcagccccctgcacctgcagcccccacccctgggcaagaagagtgaccatggaaatgccttcttccccaacagccccagccccttcaccccacctccaccccagacccccagcccccacggcaccaggaggcacctgcccagcccccccctgacccaggaggtggacctgcacagcattgctggcccccctgtgcccccccggcagagcaccagccagcacatccccaagctgccccccaagacctacaagcgggagcacacccaccccagcatgcacagagatggcccccccctgctggagaatgcccacagcagctag

SEQ ID NO: 21980 - DNA, 2358 bp, synthetic construct
  misc_feature 1..2358: note = Description of Artificial Sequence: Synthetic coding sequence
  source 1..2358: mol_type = other DNA
atgtctgaccaggaccacagcatggatgagatgacagctgtggtgaagattgaaaaaggagtgggcggcaacaatggaggaaatggaaatggaggaggagccttcagccaggcccggagcagcagcacaggcagcagcagcagcactggaggcggcggccaggagagccagcccagccccctggccctgctggccgccacctgcagcagaattgagagccccaatgaaaacagcaacaacagccagggccccagccagagcggcggcaccggggagctggacctgacagccacccagctgagccagggcgccaacggctggcagatcatcagcagcagcagcggggccacccccaccagcaaggagcagagcggcagcagcaccaacggcagcaatggcagcgagagcagcaagaacagaacagtgtctgggggccagtatgtggtggccgccgcccccaacctgcagaaccagcaggtgctgaccggcctgcccggggtgatgcccaacatccagtaccaggtgatcccccagttccagacagtggatggccagcagctgcagtttgctgccaccggggcccaggtgcagcaggacggcagcggccagatccagatcatccctggggccaaccagcagatcatcaccaacagaggcagcggcggcaacatcatcgccgccatgcccaacctgctgcagcaggccgtgcccctgcagggcctggccaacaacgtgctgagcggccagacccagtatgtgaccaacgtgcctgtggccctgaatggaaacatcaccctgctgcctgtgaacagcgtgtctgctgccaccctgacccccagcagccaggccgtgaccatcagcagcagcggcagccaggagagcggcagccagcctgtgaccagcggcaccaccatcagcagcgccagcctggtgagcagccaggccagcagcagcagcttcttcaccaatgccaacagctacagcaccaccaccaccaccagcaacatgggcatcatgaacttcaccaccagcggcagcagcggcaccaacagccagggccagaccccccagagggtgtctggcctgcagggcagtgatgccctgaacatccagcagaaccagaccagcggcggcagcctgcaggccggccagcagaaggagggggagcagaaccagcagacccagcagcagcagatcctgatccagccccagctggtgcagggcggccaggccctgcaggccctgcaggccgcccccctgagcggccagaccttcaccacccaggccatcagccaggagaccctgcagaacctgcagctgcaggccgtgcccaacagcggccccatcatcatccgcacccccaccgtgggccccaacggccaggtgtcctggcagaccctgcagctgcagaacctgcaggtgcagaacccccaggcccagaccatcaccctggcccccatgcagggcgtgtccctgggccagaccagcagcagcaacaccaccctgacccccatcgccagcgctgccagcatcccagctggcaccgtgacagtgaatgctgcccagctgagctccatgcctggcctgcagaccatcaacctgagcgccctgggcaccagcggcatccaggtgcaccccatccagggcctgcccctggccatcgccaatgcccctggggaccatggagcccagctgggcctgcacggggctggaggagatggcatccatgatgacacagctggaggagaggagggggagaacagcccagatgcccagccccaggccggccgccgcacccggcgggaggcctgcacctgcccctactgcaaggacagcgagggccggggcagcggggaccccgggaagaagaagcagcacatctgccacatccagggctgcggcaaggtgtatggcaagaccagccacctgcgggcccacctgcgctggcacactggagagcggcccttcatgtgcacctggagctactgcggcaagcgcttcaccaggagtgatgagctgcagaggcacaagaggacccacactggagagaagaagtttgcctgcccagagtgccccaagcgcttcatgagaagtgaccacctgagcaagcacatcaagacccaccagaacaagaagggcggccctggggtggccctgtctgtgggcaccctgcccctggacagcggggccggcagcgagggcagcggcacagccaccccatctgccctgatcaccaccaacatggtggccatggaggccatctgcccagagggcatcgcccggctggccaacagcggcatcaacgtgatgcaggtggccgacctgcagagcatcaacatctctggaaatggcttctag

SEQ ID NO: 21981 - DNA, 2337 bp, synthetic construct
  misc_feature 1..2337: note = Description of Artificial Sequence: Synthetic coding sequence
  source 1..2337: mol_type = other DNA
atggatgagatgacagctgtggtgaagattgagaagggcgtgggcggcaacaacggcggcaatggaaatggaggaggagccttcagccaggcccggagcagcagcacaggcagcagcagcagcactggaggcggcggccaggagagccagcccagccccctggccctgctggccgccacctgcagccgcatcgagagccccaatgaaaacagcaacaacagccagggccccagccagagcggcggcactggagagctggacctgacagccacccagctgagccagggcgccaacggctggcagatcatcagcagcagcagcggggccacccccaccagcaaggagcagagcggcagcagcaccaacggcagcaatggaagtgagagcagcaagaacagaacagtgtctgggggccagtatgtggtggccgccgcccccaacctgcagaaccagcaggtgctgaccggcctgcccggggtgatgcccaacatccagtaccaggtgatcccccagttccagacagtggatggccagcagctgcagtttgctgccactggagcccaggtgcagcaggacggcagcggccagatccagatcatccctggggccaaccagcagatcatcaccaacagaggcagcggcggcaacatcatcgccgccatgcccaacctgctgcagcaggccgtgcccctgcagggcctggccaacaacgtgctgagcggccagacccagtatgtgaccaacgtgcctgtggccctgaatggaaacatcaccctgctgcctgtgaacagcgtgtctgctgccaccctgacccccagcagccaggccgtgaccatcagcagcagcggcagccaggagagcggcagccagcctgtgaccagcggcaccaccatcagcagcgccagcctggtgagcagccaggccagcagcagcagcttcttcaccaatgccaacagctacagcaccaccaccaccaccagcaacatgggcatcatgaacttcaccaccagcggcagcagcggcaccaacagccagggccagaccccccagagggtgtctggcctgcagggcagtgatgccctgaacatccagcagaaccagaccagcggcggcagcctgcaggccggccagcagaaggagggggagcagaaccagcagacccagcagcagcagatcctgatccagccccagctggtgcagggcggccaggccctgcaggccctgcaggccgcccccctgagcggccagaccttcaccacccaggccatcagccaggagaccctgcagaacctgcagctgcaggccgtgcccaacagcggccccatcatcatccgcacccccaccgtgggccccaacggccaggtgtcctggcagaccctgcagctgcagaacctgcaggtgcagaacccccaggcccagaccatcaccctggcccccatgcagggcgtgtccctgggccagaccagcagcagcaacaccaccctgacccccatcgccagcgctgccagcatcccagctggcaccgtgacagtgaatgctgcccagctgagctccatgcctggcctgcagaccatcaacctgagcgccctgggcaccagcggcatccaggtgcaccccatccagggcctgcccctggccatcgccaatgcccctggggaccacggggcccagctgggcctgcatggagctggaggagatggcatccatgatgacacagctggaggagaggagggggagaacagcccagatgcccagccccaggccggccgccgcacccggcgggaggcctgcacctgcccctactgcaaggacagcgagggccggggcagcggggaccccgggaagaagaagcagcacatctgccacatccagggctgtgggaaggtgtatggcaagaccagccacctgcgggcccacctgcgctggcacactggagagcggcccttcatgtgcacctggagctactgtgggaagcgcttcaccaggagtgatgagctgcagaggcacaagaggacccacactggagagaagaagtttgcctgcccagaatgtcccaagcgcttcatgagaagtgaccacctgagcaagcacatcaagacccaccagaacaagaagggcggccctggggtggccctgtctgtgggcaccctgcccctggacagcggggccggcagcgagggcagcggcacagccacccccagcgccctgatcaccaccaacatggtggccatggaggccatctgcccagagggcatcgcccggctggccaacagcggcatcaacgtgatgcaggtggccgacctgcagagcatcaacatctctggaaatggcttctag

SEQ ID NO: 21982 - DNA, 1413 bp, synthetic construct
  misc_feature 1..1413: note = Description of Artificial Sequence: Synthetic coding sequence
  source 1..1413: mol_type = other DNA
atgtctgcccaggtgctgggcttcctgcgctcctggacccccctgcccctggccgccccccggggccctgctgctgctggaaatgatgctggggccccagctgccacagcccctggaggagagggggagccccacagccggccctgtgatgcccggctgggcagcacagacaaggagctgaaggccggggctgctgccactggaagtgcccccacagcccctggcaccccctggcagcgggagccccgggtggaggtgatggaccctgctgggggcccccggggcgtgctgccccggccctgccgggtgctggtgctgctgaacccccggggcggcaagggcaaggccctgcagctgttccgcagccacgtgcagcccctgctggccgaggccgagatctccttcaccctgatgctgacagagaggagaaatcatgcccgggagctggtgcgctctgaggagctgggccgctgggatgccctggtggtgatgtctggagatggcctgatgcatgaggtggtgaatggcctgatggagaggccagactgggagacagccatccagaagcccctgtgcagcctgcctgctggcagcggaaatgccctggccgccagcctgaaccactacgccggctatgagcaggtgaccaatgaagacctgctgaccaactgcaccctgctgctgtgccggcggctgctgagccccatgaacctgctgagcctgcacacagccagcggcctgcggctcttctctgtgctgagcctggcctggggcttcatcgcagatgtggacctggagagcgagaagtacagaaggctgggggagatgaggttcaccctgggcaccttcctgcggctggccgccctgcggacctaccggggccgcctggcctacctgcctgtgggccgggtgggcagcaagaccccagccagccctgtggtggtgcagcagggccctgtggatgcccacctggtgcccctggaggagcctgtgcccagccactggacagtggtgcctgatgaagattttgtgctggtgctggccctgctgcacagccacctgggcagcgagatgtttgctgcccccatgggccgctgtgccgccggcgtgatgcacctgttctacgtgcgggccggcgtgtcccgggccatgctgctgcggctcttcctggccatggagaagggccgccacatggagtatgaatgtccctacctggtgtatgtgcctgtggtggccttccggctggagcccaaggatggaaaaggagtgtttgctgtggatggagagctgatggtgtctgaggccgtgcagggccaggtgcaccccaactacttctggatggtgtctggctgtgtggagcccccacccagctggaagccccagcagatgcctcctcctgaggagcccctgtag

SEQ ID NO: 21983 - DNA, 1155 bp, synthetic construct
  misc_feature 1..1155: note = Description of Artificial Sequence: Synthetic coding sequence
  source 1..1155: mol_type = other DNA
atggaccctgctgggggcccccggggcgtgctgccccggccctgccgggtgctggtgctgctgaacccccggggcggcaagggcaaggccctgcagctgttccgcagccacgtgcagcccctgctggccgaggccgagatctccttcaccctgatgctgacagagaggagaaatcatgcccgggagctggtgcgctctgaggagctgggccgctgggatgccctggtggtgatgtctggagatggcctgatgcatgaggtggtgaatggcctgatggagaggccagactgggagacagccatccagaagcccctgtgcagcctgcctgctggcagcggaaatgccctggccgccagcctgaaccactacgccggctatgagcaggtgaccaatgaagacctgctgaccaactgcaccctgctgctgtgccggcggctgctgagccccatgaacctgctgagcctgcacacagccagcggcctgcggctcttctctgtgctgagcctggcctggggcttcatcgcagatgtggacctggagagcgagaagtacagaaggctgggggagatgaggttcaccctgggcaccttcctgcggctggccgccctgcggacctaccggggccgcctggcctacctgcctgtgggccgggtgggcagcaagaccccagccagccctgtggtggtgcagcagggccctgtggatgcccacctggtgcccctggaggagcctgtgcccagccactggacagtggtgcctgatgaagattttgtgctggtgctggccctgctgcacagccacctgggcagcgagatgtttgctgcccccatgggccgctgtgccgccggcgtgatgcacctgttctacgtgcgggccggcgtgtcccgggccatgctgctgcggctcttcctggccatggagaagggccgccacatggagtatgaatgtccctacctggtgtatgtgcctgtggtggccttccggctggagcccaaggatggaaaaggagtgtttgctgtggatggagagctgatggtgtctgaggccgtgcagggccaggtgcaccccaactacttctggatggtgtctggctgtgtggagcccccacccagctggaagccccagcagatgcctcctcctgaggagcccctgtag

SEQ ID NO: 21984 - DNA, 1152 bp, synthetic construct
  misc_feature 1..1152: note = Description of Artificial Sequence: Synthetic coding sequence
  source 1..1152: mol_type = other DNA
gagcccactggaggcccccggggcgtgctgccccggccctgccgggtgctggtgctgctgaacccccggggcggcaagggcaaggccctgcagctgttccgcagccacgtgcagcccctgctggccgaggccgagatctccttcaccctgatgctgacagaaagaagaaaccacgcccgggagctggtgcgctctgaggagctgggccgctgggatgccctggtggtgatgtctggagatggcctgatgcatgaggtggtgaatggcctgatggagaggccagactgggagacagccatccagaagcccctgtgcagcctgcctgctggcagcggaaatgccctggccgccagcctgaaccactacgccggctatgagcaggtgaccaatgaagacctgctgaccaactgcaccctgctgctgtgccggcggctgctgagccccatgaacctgctgagcctgcacacagccagcggcctgcggctcttctctgtgctgagcctggcctggggcttcatcgcagatgtggacctggagagcgagaagtaccgccgcctgggggagatgaggttcaccctgggcaccttcctgcggctggccgccctgcggacctaccggggccgcctggcctacctgcctgtgggccgggtgggcagcaagaccccagccagccctgtggtggtgcagcagggccctgtggatgcccacctggtgcccctggaggagcctgtgcccagccactggacagtggtgcctgatgaggactttgtgctggtgctggccctgctgcacagccacctgggcagcgagatgtttgctgcccccatgggccgctgtgccgccggcgtgatgcacctgttctacgtgcgggccggcgtgtcccgggccatgctgctgcggctcttcctggccatggagaagggccgccacatggagtatgagtgcccctacctggtgtatgtgcctgtggtggccttccggctggagcccaaggatggcaagggcgtgtttgctgtggatggagagctgatggtgtctgaggccgtgcagggccaggtgcaccccaactacttctggatggtgtctggctgtgtggagcccccacccagctggaagccccagcagatgcctcctcctgaggagcccctgtag

SEQ ID NO: 21985 - DNA, 1155 bp, synthetic construct; identical to SEQ ID NO: 21983
  misc_feature 1..1155: note = Description of Artificial Sequence: Synthetic coding sequence
  source 1..1155: mol_type = other DNA

SEQ ID NO: 21986 - DNA, 1197 bp, synthetic construct
  misc_feature 1..1197: note = Description of Artificial Sequence: Synthetic coding sequence
  source 1..1197: mol_type = other DNA
atggaccctgtggtgggctgcggccggggcctgtttggatttgtgttttctgctgggggcccccggggcgtgctgccccggccctgccgggtgctggtgctgctgaacccccggggcggcaagggcaaggccctgcagctgttccgcagccacgtgcagcccctgctggccgaggccgagatctccttcaccctgatgctgacagagaggagaaatcatgcccgggagctggtgcgctctgaggagctgggccgctgggatgccctggtggtgatgtctggagatggcctgatgcatgaggtggtgaatggcctgatggagaggccagactgggagacagccatccagaagcccctgtgcagcctgcctgctggcagcggaaatgccctggccgccagcctgaaccactacgccggctatgagcaggtgaccaatgaagacctgctgaccaactgcaccctgctgctgtgccggcggctgctgagccccatgaacctgctgagcctgcacacagccagcggcctgcggctcttctctgtgctgagcctggcctggggcttcatcgcagatgtggacctggagagcgagaagtacagaaggctgggggagatgaggttcaccctgggcaccttcctgcggctggccgccctgcggacctaccggggccgcctggcctacctgcctgtgggccgggtgggcagcaagaccccagccagccctgtggtggtgcagcagggccctgtggatgcccacctggtgcccctggaggagcctgtgcccagccactggacagtggtgcctgatgaagattttgtgctggtgctggccctgctgcacagccacctgggcagcgagatgtttgctgcccccatgggccgctgtgccgccggcgtgatgcacctgttctacgtgcgggccggcgtgtcccgggccatgctgctgcggctcttcctggccatggagaagggccgccacatggagtatgaatgtccctacctggtgtatgtgcctgtggtggccttccggctggagcccaaggatggaaaaggagtgtttgctgtggatggagagctgatggtgtctgaggccgtgcagggccaggtgcaccccaactacttctggatggtgtctggctgtgtggagcccccacccagctggaagccccagcagatgcctcctcctgaggagcccctgtag

SEQ ID NO: 21987 - DNA, 1155 bp, synthetic construct; identical to SEQ ID NO: 21983
  misc_feature 1..1155: note = Description of Artificial Sequence: Synthetic coding sequence
  source 1..1155: mol_type = other DNA

SEQ ID NO: 21988 - DNA, 1965 bp, synthetic construct
  misc_feature 1..1965: note = Description of Artificial Sequence: Synthetic coding sequence
  source 1..1965: mol_type = other DNA
atgaatggccacctggaggccgaggagcagcaggaccagaggccagaccaggagctgaccggctcctggggccacggccccaggagcaccctggtgcgggccaaggccatggcccctcctcctccacccctggccgccagcacccccctgctgcacggggagtttggcagctacccagcccggggccccaggtttgccctgaccctgaccagccaggccctgcacatccagaggctgcggcccaagccagaggcccggccccggggcggcctggtgcccctggccgaggtgtctggctgctgcaccctgcggagccgcagccccagcgacagcgctgcctacttctgcatctacacctacccccggggccggcggggggccaggagaagagccaccaggaccttccgggcagatggagctgccacctatgaagaaaatagagctgaggcccagcgctgggccacagccctgacctgcctgctgcggggcctgcccctgcctggagatggagagatcaccccagacctgctgccccggcccccccggctgctgctgctggtgaacccctttggaggccggggcctggcctggcagtggtgcaagaaccacgtgctgcccatgatcagcgaggccggcctgtccttcaacctgatccagacagagcggcagaaccacgcccgggagctggtgcagggcctgagcctgtctgagtgggatggcatcgtgacagtgtctggagatggcctgctgcacgaggtgctgaatggcctgctggacagaccagactgggaggaggccgtgaagatgcctgtgggcatcctgccctgtggcagcggaaatgccctggccggggctgtgaaccagcacggcggctttgagcccgccctgggcctggacctgctgctgaactgcagcctgctgctgtgccggggcggcggccaccccctggacctgctgtctgtgaccctggccagcggcagccgctgcttctccttcctgtctgtggcctggggctttgtgtctgatgtggacatccagagcgagcgcttccgggccctgggcagcgcccgcttcaccctgggcaccgtgctgggcctggccaccctgcacacctaccggggccgcctgagctacctgcctgccaccgtggagcccgccagccccaccccagcccacagcctgccccgggccaagtctgagctgaccctgaccccagaccctgccccacccatggcccacagccccctgcacaggtctgtgtctgacctgcccctgcccctgccccagcctgccctggccagccctggcagccctgagcccctgcccatcctgagcctgaatggaggcggccctgagctggccggggactggggcggcgctggagatgcccccctgagcccagaccccctgctgagcagccccccaggcagccccaaggccgccctgcacagccctgtgtctgagggcgcccctgtgatcccccccagcagcggcctgcccctgcccaccccagatgcccgggtgggcgccagcacctgtggccccccagaccacctgctgccccccctgggcacccccctgcccccagactgggtgaccctggagggggactttgtgctgatgctggccatcagccccagccacctgggcgctgacctggtggccgccccccacgccaggtttgatgatggcctggtgcacctgtgctgggtgcgcagcggcatcagccgggccgccctgctgcggctcttcctggccatggagcggggcagccacttcagcctgggctgcccccagctgggctatgctgctgcccgggccttccggctggagcccctgaccccccggggcgtgctgactgtggatggagagcaggtggagtatggccccctgcaggcccagatgcaccctggcatcggcaccctgctgaccggccccccaggctgccccggccgggagccctag

SEQ ID NO: 21989 - DNA, 1851 bp, synthetic construct
  misc_feature 1..1851: note = Description of Artificial Sequence: Synthetic coding sequence
  source 1..1851: mol_type = other DNA
atggcccctcctcctccacccctggccgccagcacccccctgctgcacggggagtttggcagctacccagcccggggccccaggtttgccctgaccctgaccagccaggccctgcacatccagaggctgcggcccaagccagaggcccggccccggggcggcctggtgcccctggccgaggtgtctggctgctgcaccctgcggagccgcagccccagcgacagcgctgcctacttctgcatctacacctacccccggggccggcggggggccaggagaagagccaccaggaccttccgggcagatggagctgccacctatgaagaaaatagagctgaggcccagcgctgggccacagccctgacctgcctgctgcggggcctgcccctgcctggagatggagagatcaccccagacctgctgccccggcccccccggctgctgctgctggtgaacccctttggaggccggggcctggcctggcagtggtgcaagaaccacgtgctgcccatgatcagcgaggccggcctgtccttcaacctgatccagacagagcggcagaaccacgcccgggagctggtgcagggcctgagcctgtctgagtgggatggcatcgtgacagtgtctggagatggcctgctgcacgaggtgctgaatggcctgctggacagaccagactgggaggaggccgtgaagatgcctgtgggcatcctgccctgtggcagcggaaatgccctggccggggctgtgaaccagcacggcggccccagctggggagaccgggacccctacatcagccacagcgccaagcccaccgtgtcccaggtgaaccagcctgcctgtggcatgctgacccccagctcctggaccttcctgcctgcctgcttccctgctgtgtcccgggcccccaggaccctgcccggcatgggcggcacccaggccctgggcagcgcccgcttcaccctgggcaccgtgctgggcctggccaccctgcacacctaccggggccgcctgagctacctgcctgccaccgtggagcccgccagccccaccccagcccacagcctgccccgggccaagtctgagctgaccctgaccccagaccctgccccacccatggcccacagccccctgcacaggtctgtgtctgacctgcccctgcccctgccccagcctgccctggccagccctggcagccctgagcccctgcccatcctgagcctgaatggaggcggccctgagctggccggggactggggcggcgctggagatgcccccctgagcccagaccccctgctgagcagccccccaggcagccccaaggccgccctgcacagccctgtgtctgagggcgcccctgtgatcccccccagcagcggcctgcccctgcccaccccagatgcccgggtgggcgccagcacctgtggccccccagaccacctgctgccccccctgggcacccccctgcccccagactgggtgaccctggagggggactttgtgctgatgctggccatcagccccagccacctgggcgctgacctggtggccgccccccacgccaggtttgatgatggcctggtgcacctgtgctgggtgcgcagcggcatcagccgggccgccctgctgcggctcttcctggccatggagcggggcagccacttcagcctgggctgcccccagctgggctatgctgctgcccgggccttccggctggagcccctgaccccccggggcgtgctgactgtggatggagagcaggtggagtatggccccctgcaggcccagatgcaccctggcatcggcaccctgctgaccggccccccaggctgccccggccgggagccctag

SEQ ID NO: 21990 - DNA, 1884 bp, synthetic construct
  misc_feature 1..1884: note = Description of Artificial Sequence: Synthetic coding sequence
  source 1..1884: mol_type = other DNA
atgaatggccacctggaggccgaggagcagcaggaccagaggccagaccaggagctgaccggctcctggggccacggccccaggagcaccctggtgcgggccaaggccatggcccctcctcctccacccctggccgccagcacccccctgctgcacggggagtttggcagctacccagcccggggccccaggtttgccctgaccctgaccagccaggccctgcacatccagaggctgcggcccaagcacagcgctgcctacttctgcatctacacctacccccggggcagaagaggagcccggcggcgggccaccaggaccttccgggcagatggagctgccacctatgaggagaacagagctgaggcccagcgctgggccacagccctgacctgcctgctgcggggcctgcccctgcctggagatggagagatcaccccagacctgctgcccaggcctccccggctgctgctgctggtgaacccctttggaggccggggcctggcctggcagtggtgcaagaaccacgtgctgcccatgatcagcgaggccggcctgtccttcaacctgatccagacagagcggcagaaccacgcccgggagctggtgcagggcctgagcctgtctgagtgggatggcatcgtgacagtgtctggagatggcctgctgcacgaggtgctgaatggcctgctggacagaccagactgggaggaggccgtgaagatgcctgtgggcatcctgccctgtggcagcggaaatgccctggccggggctgtgaaccagcacggcggctttgagcccgccctgggcctggacctgctgctgaactgcagcctgctgctgtgccggggcggcggccaccccctggacctgctgtctgtgaccctggccagcggcagccgctgcttctccttcctgtctgtggcctggggctttgtgtctgatgtggacatccagagcgagcgcttccgggccctgggcagcgcccgcttcaccctgggcaccgtgctgggcctggccaccctgcacacctaccggggccgcctgagctacctgcctgccaccgtggagcccgccagccccaccccagcccacagcctgccccgggccaagtctgagctgaccctgaccccagaccctgccccacccatggcccacagccccctgcacaggtctgtgtctgacctgcccctgcccctgccccagcctgccctggccagccctggcagccctgagcccctgcccatcctgagcctgaatggaggcggccctgagctggccggggactggggcggcgctggagatgcccccctgagcccagaccccctgctgagcagccccccaggcagccccaaggccgccctgcacagccctgtgtctgagggcgcccctgtgattcctcccagcagcggcctgcccctgcccaccccagatgcccgggtgggcgccagcacctgtggccccccagaccacctgctgccccccctgggcacccccctgcccccagactgggtgaccctggagggggactttgtgctgatgctggccatcagccccagccacctgggcgctgacctggtggccgcccctcatgccaggtttgatgatggcctggtgcacctgtgctgggtgcgcagcggcatcagcagagctgccctgctgcggctcttcctggccatggagcggggcagccacttcagcctgggctgcccccagctgggctacgccgccgcccgggccttccggctggagcccctgaccccccggggcgtgctgactgtggatggagagcaggtggagtatggccccctgcaggcccagatgcaccctggcatcggcaccctgctgactggacctcctggctgccccggccgggagccctag

SEQ ID NO: 21991 - DNA, 150 bp, synthetic construct
  misc_feature 1..150: note = Description of Artificial Sequence: Synthetic coding sequence
  source 1..150: mol_type = other DNA
atgaatggccacctggaggccgaggagcagcaggaccagaggagccccctgacctgctacctgggccggcccggctgcttctactggagcatccccctgggcgtgggcgcctggccaggcagcggcgtgaggaccacctgcttcccctag

SEQ ID NO: 21992 - DNA, 2286 bp, synthetic construct
  misc_feature 1..2286: note = Description of Artificial Sequence: Synthetic coding sequence
  source 1..2286: mol_type = other DNA
atgattggctgcctgcacgcccgggtgtctggccccctgtgggatgctggcctgtgcccagccagcagccgcagcgcccacacctgcctgagcctgtctgtgtctgatgcccctgtgtccccagccacagccccccactgcctgctgctgagcacagccccagccccaccctgcccctgccacggcgtgctgaacagccaccccttcagcccccccttcccccagaggccagaccaggagctgaccggctcctggggccacggccccaggagcaccctggtgcgggccaaggccatggcccctcctcctccacccctggccgccagcacccccctgctgcacggggagtttggcagctacccagcccggggccccaggtttgccctgaccctgaccagccaggccctgcacatccagaggctgcggcccaagccagaggcccggccccggggcggcctggtgcccctggccgaggtgtctggctgctgcaccctgcggagccgcagccccagcgacagcgctgcctacttctgcatctacacctacccccggggccggcggggggccaggagaagagccaccaggaccttccgggcagatggagctgccacctatgaagaaaatagagctgaggcccagcgctgggccacagccctgacctgcctgctgcggggcctgcccctgcctggagatggagagatcaccccagacctgctgccccggcccccccggctgctgctgctggtgaacccctttggaggccggggcctggcctggcagtggtgcaagaaccacgtgctgcccatgatcagcgaggccggcctgtccttcaacctgatccagacagagcggcagaaccacgcccgggagctggtgcagggcctgagcctgtctgagtgggatggcatcgtgacagtgtctggagatggcctgctgcacgaggtgctgaatggcctgctggacagaccagactgggaggaggccgtgaagatgcctgtgggcatcctgccctgtggcagcggaaatgccctggccggggctgtgaaccagcacggcggctttgagcccgccctgggcctggacctgctgctgaactgcagcctgctgctgtgccggggcggcggccaccccctggacctgctgtctgtgaccctggccagcggcagccgctgcttctccttcctgtctgtggcctggggctttgtgtctgatgtggacatccagagcgagcgcttccgggccctgggcagcgcccgcttcaccctgggcaccgtgctgggcctggccaccctgcacacctaccggggccgcctgagctacctgcctgccaccgtggagcccgccagccccaccccagcccacagcctgccccgggccaagtctgagctgaccctgaccccagaccctgccccacccatggcccacagccccctgcacaggtctgtgtctgacctgcccctgcccctgccccagcctgccctggccagccctggcagccctgagcccctgcccatcctgagcctgaatggaggcggccctgagctggccggggactggggcggcgctggagatgcccccctgagcccagaccccctgctgagcagccccccaggcagccccaaggccgccctgcacagccctgtgtctgagggcgcccctgtgatcccccccagcagcggcctgcccctgcccaccccagatgcccgggtgggcgccagcacctgtggccccccagaccacctgctgccccccctgggcacccccctgcccccagactgggtgaccctggagggggactttgtgctgatgctggccatcagccccagccacctgggcgctgacctggtggccgccccccacgccaggtttgatgatggcctggtgcacctgtgctgggtgcgcagcggcatcagccgggccgccctgctgcggctcttcctggccatggagcggggcagccacttcagcctgggctgcccccagctgggctatgctgctgcccgggccttccggctggagcccctgaccccccggggcgtgctgactgtggatggagagcaggtggagtatggccccctgcaggcccagatgcaccctggcatcgcccggggccgcacccagaccccagccctgcctgctgccccagccctgtatggccggcagcccggggccgcccacggcctgcagcctgtgtgccagggcgccgccctcttcttccacaacagctggctgtggggcagccaggacctcttcagaattgtgctgacagaggccgtgggcggctag

SEQ ID NO: 21993 - DNA, 1965 bp, synthetic construct; identical to SEQ ID NO: 21988
  misc_feature 1..1965: note = Description of Artificial Sequence: Synthetic coding sequence
  source 1..1965: mol_type = other DNA

SEQ ID NO: 21994 - DNA, 1857 bp, synthetic construct
  misc_feature 1..1857: note = Description of Artificial Sequence: Synthetic coding sequence
  source 1..1857: mol_type = other DNA
atggcccctcctcctccacccctggccgccagcacccccctgctgcacggggagtttggcagctacccagcccggggccccaggtttgccctgaccctgaccagccaggccctgcacatccagaggctgcggcccaagccagaggcccggccccggggcggcctggtgcccctggccgaggtgtctggctgctgcaccctgcggagccgcagccccagcgacagcgctgcctacttctgcatctacacctacccccggggccggcggggggccaggagaagagccaccaggaccttccgggcagatggagctgccacctatgaagaaaatagagctgaggcccagcgctgggccacagccctgacctgcctgctgcggggcctgcccctgcctggagatggagagatcaccccagacctgctgccccggcccccccggctgctgctgctggtgaacccctttggaggccggggcctggcctggcagtggtgcaagaaccacgtgctgcccatgatcagcgaggccggcctgtccttcaacctgatccagacagagcggcagaaccacgcccgggagctggtgcagggcctgagcctgtctgagtgggatggcatcgtgacagtgtctggagatggcctgctgcacgaggtgctgaatggcctgctggacagaccagactgggaggaggccgtgaagatgcctgtgggcatcctgccctgtggcagcggaaatgccctggccggggctgtgaaccagcacggcggctttgagcccgccctgggcctggacctgctgctgaactgcagcctgctgctgtgccggggcggcggccaccccctggacctgctgtctgtgaccctggccagcggcagccgctgcttctccttcctgtctgtggcctggggctttgtgtctgatgtggacatccagagcgagcgcttccgggccctgggcagcgcccgcttcaccctgggcaccgtgctgggcctggccaccctgcacacctaccggggccgcctgagctacctgcctgccaccgtggagcccgccagccccaccccagcccacagcctgccccgggccaagtctgagctgaccctgaccccagaccctgccccacccatggcccacagccccctgcacaggtctgtgtctgacctgcccctgcccctgccccagcctgccctggccagccctggcagccctgagcccctgcccatcctgagcctgaatggaggcggccctgagctggccggggactggggcggcgctggagatgcccccctgagcccagaccccctgctgagcagccccccaggcagccccaaggccgccctgcacagccctgtgtctgagggcgcccctgtgatcccccccagcagcggcctgcccctgcccaccccagatgcccgggtgggcgccagcacctgtggccccccagaccacctgctgccccccctgggcacccccctgcccccagactgggtgaccctggagggggactttgtgctgatgctggccatcagccccagccacctgggcgctgacctggtggccgccccccacgccaggtttgatgatggcctggtgcacctgtgctgggtgcgcagcggcatcagccgggccgccctgctgcggctcttcctggccatggagcggggcagccacttcagcctgggctgcccccagctgggctatgctgctgcccgggccttccggctggagcccctgaccccccggggcgtgctgactgtggatggagagcaggtggagtatggccccctgcaggcccagatgcaccctggcatcggcaccctgctgaccggccccccaggctgccccggccgggagccctag

SEQ ID NO: 21995 - DNA, 1149 bp, synthetic construct
  misc_feature 1..1149: note = Description of Artificial Sequence: Synthetic coding sequence
  source 1..1149: mol_type = other DNA
atgggccccacctctgtgcccctggtgaaggcccacaggagctctgtgtctgactatgtgaactatgacatcatcgtgcgccactacaactacaccgggaagctgaacatctctgctgacaaggagaacagcatcaagctgacctctgtggtgttcatcctgatctgctgcttcatcatcctggagaacatctttgtgctgctgaccatctggaagaccaagaagttccaccggcccatgtactacttcatcggcaacctggccctgagtgacctgctggccggcgtggcctacacagccaacctgctgctgagcggggccaccacctacaagctgaccccagcccagtggttcctgcgggagggctccatgtttgtggccctgagcgcctctgtgttcagcctgctggccatcgccatcgagcgctacatcaccatgctgaagatgaagctgcacaacggcagcaacaacttccgcctcttcctgctgatcagcgcctgctgggtgatcagcctcatcctgggcggcctgcccatcatgggctggaactgcatcagcgccctgagcagctgcagcacagtgctgcccctgtaccacaagcactacatcctcttctgcaccaccgtcttcaccctgctgctgctgagcatcgtcatcctgtactgccgcatctacagcctggtgaggaccaggagccggcggctgaccttcaggaagaacatcagcaaggccagccgcagcagcgagaagagcctggccctgctgaagacagtcatcatcgtgctgtctgtgttcatcgcctgctgggcccccctcttcatcctgctgctgctggatgtgggctgcaaggtgaagacctgtgacatcctcttccgggcagagtacttcctggtgctggccgtgctgaacagcggcaccaaccccatcatctacaccctgaccaacaaggagatgagaagagccttcatccgcatcatgagctgctgcaagtgccccagcggggacagcgctgggaagttcaagaggcccatcatcgccggcatggagttcagccgcagcaagagtgacaacagcagccacccccagaaggatgaaggagacaaccctgagaccatcatgagcagtggaaatgtgaacagcagcagctag

SEQ ID NO: 21996 - DNA, 1353 bp, synthetic construct
  misc_feature 1..1353: note = Description of Artificial Sequence: Synthetic coding sequence
  source 1..1353: mol_type = other DNA
atgggccccacctctgtgcccctggtgaaggcccacaggagctctgtgtctgactatgtgaactatgacatcatcgtgcgccactacaactacaccgggaagctgaacatctctgctgacaaggagaacagcatcaagctgacctctgtggtgttcatcctgatctgctgcttcatcatcctggagaacatctttgtgctgctgaccatctggaagaccaagaagttccaccggcccatgtactacttcatcggcaacctggccctgagtgacctgctggccggcgtggcctacacagccaacctgctgctgagcggggccaccacctacaagctgaccccagcccagtggttcctgcgggagggctccatgtttgtggccctgagcgcctctgtgttcagcctgctggccatcgccatcgagcgctacatcaccatgctgaagatgaagctgcacaacggcagcaacaacttccgcctcttcctgctgatcagcgcctgctgggtgatcagcctcatcctgggcggcctgcccatcatgggctggaactgcatcagcgccctgagcagctgcagcacagtgctgcccctgtaccacaagcactacatcctcttctgcaccaccgtcttcaccctgctgctgctgagcatcgtcatcctgtactgccgcatctacagcctggtgaggaccaggagccggcggctgaccttcaggaagaacatcagcaaggccagccgcagcagcgagaagagcctggccctgctgaagacagtcatcatcgtgctgtctgtgttcatcgcctgctgggcccccctcttcatcctgctgctgctggatgtgggctgcaaggtgaagacctgtgacatcctcttccgggcagagtacttcctggtgctggccgtgctgaacagcggcaccaaccccatcatctacaccctgaccaacaaggagaccctgctggccaacagcagtgaccccagcagccctgcctggaacagcgctgctgccaacagaaccatcccccccacccccaggaagaccaagggcaccacccagaggcccctgtgcctgctggagaccagcaccctgctgcccaggacaggcagctgccccccaactggaagtgccctgtacctggtggccggccaccccagcgtgtggaagaagatcagcggcctgcggctgctgcccggccgcagctgctgcaagccagagggcggccggggccgcatcagaacagcctggtggtgccgggtgctggtgggccgggtgagcagctgtgagcagtgcacaggaaaaggaggagaccaggtgcctgcctggaacatcttcagcacccccctggagctgtag

SEQ ID NO: 21997 - DNA, 726 bp, synthetic construct
  misc_feature 1..726: note = Description of Artificial Sequence: Synthetic coding sequence
  source 1..726: mol_type = other DNA
atggccaccctgaaggaccagctgatctacaacctgctgaaggaggagcagaccccccagaacaagatcaccgtggtgggcgtgggcgctgtgggcatggcctgtgccatcagcatcctgatgaaggacctggctgatgagctggccctggtggatgtgattgaggacaagctgaagggggagatgatggacctgcagcacggcagcctcttcctgcggacccccaagatcgtgtctgggaaggactacaacgtgacagccaacagcaagctggtgatcatcacagctggggcccggcagcaggagggggagagccggctgaacctggtgcagagaaatgtgaacatcttcaagttcatcatccccaacgtggtgaagtacagccccaactgcaagctgctgattgtgagcaaccctgtggacatcctgacctacgtggcctggaagatcagcggcttccccaagaacagagtgattggcagcggctgcaacctggacagcgcccgcttccgctacctgatgggagagcggctgggcgtgcaccccctgagctgccacggctgggtgctgggggagcacggggacagctctgtgcctgtgtggagcggcatgaatgtggccggcgtgtccctgaagaccctgcacccagacctgggcacagacaaggacaaggagcagtggaaggaggtgcacaagcaggtggtggagagggtcttcacagaatag

SEQ ID NO: 21998 - DNA, 813 bp, synthetic construct
  misc_feature 1..813: note = Description of Artificial Sequence: Synthetic coding sequence
  source 1..813: mol_type = other DNA
atgctgcaggcctgcaagatggagggcttccccctggtgcccccaccttctgaggacctggtgccctatgacacagacctgtaccagaggcagacccatgagtactacccctacctgagcagtgatggagagagccacagcgaccactactgggacttccacccccaccacgtgcacagcgagtttgagagctttgctgagaacaacttcacagagctgcagagcgtgcagcccccccagctgcagcagctgtaccgccacatggagctggagcagatgcacgtgctggacacccccatggtgcccccccaccccagcctgggccaccaggtgtcctacctgcccaggatgtgcctgcagtaccccagcctgagccctgcccagcccagcagtgatgaggaggagggggagcggcagagcccccccctggaggtgtctgatggagaggctgatggcctggagcccggccctggcctgctgcctggagagaccggcagcaagaagaagatccggctgtaccagttcctgctggacctgctgcggagcggggacatgaaggacagcatctggtgggtggacaaggacaagggcaccttccagttcagcagcaagcacaaggaggccctggcccaccgctggggcatccagaagggcaacaggaagaagatgacctaccagaagatggcccgggccctgagaaattatggcaagacaggagaggtgaagaaggtgaagaagaagctgacctaccagttctctggagaggtgctgggccggggcggcctggccgagaggaggcaccccccccactag

SEQ ID NO: 21999 - DNA, 2403 bp, synthetic construct
  misc_feature 1..2403: note = Description of Artificial Sequence: Synthetic coding sequence
  source 1..2403: mol_type = other DNA
atgggcagcagcaagaagcacagaggagagaaggaggccgccggcaccacagctgctgctggcaccggcggggccacagagcagcccccaagacaccgggagcacaagaagcacaagcacaggtctgggggcagcggcggcagcggcggggagaggaggaagaggagccgggagcggggcggggagcggggcagcggcagaagaggagctgaggccgaggcccggagcagcacccacggccgggagaggagccaggccgagcccagcgagaggagagtgaagcgggagaagagagatgatggctatgaggccgccgccagcagcaagaccagcagtggagatgccagcagcctgagcattgaggagaccaacaagctgcgggccaagctgggcctgaagcccctggaggtgaatgccatcaagaaggaggccggcaccaaggaggagcctgtgacagcagatgtgatcaaccccatggccctgcggcagcgggaggagctgcgggagaagctggccgccgccaaggagaagaggctgctgaaccagaagctgggcaagatcaagaccctgggggaggatgacccctggctggatgacacagctgcctggattgaaagaagccggcagctgcagaaggagaaggacctggccgagaagagggccaagctgctggaggagatggaccaggagtttggagtgtccaccctggtggaggaggagtttggccagaggcggcaggacctgtacagcgcccgggacctgcagggcctgactgtggagcacgccatcgacagcttccgggagggggagaccatgatcctgaccctgaaggacaagggcgtgctgcaggaggaggaggatgtgctggtgaatgtgaacctggtggacaaggagcgggcagagaagaatgtggagctgaggaagaagaagccagactacctgccctatgcagaagatgaatctgtggatgacctggcccagcagaagcccaggagcatcctgagcaaatatgatgaggagctggagggggagcggccccacagcttccggctggagcagggcggcacagcagatggcctgcgggagcgggagctggaggagatccgggccaagctgcggctgcaggcccagagcctgagcacagtgggcccccggctggccagcgagtacctgaccccagaggagatggtgaccttcaagaagaccaagagaagagtgaagaagatcaggaagaaggagaaggaggtggtggtgcgggcagatgacctgctgcccctgggggaccagacccaggatggagactttggcagccggctgcggggccggggcagaagaagagtgtctgaggtggaggaggagaaggagcctgtgccccagcccctgcccagtgatgacaccagggtggagaacatggacatcagtgatgaggaggagggcggggcccctcctcctggcagcccccaggtgctggaggaggatgaagctgagctggagctgcagaagcagctggagaagggccgccgcctgcggcagctgcagcagctgcagcagctgcgggacagcggggagaaggtggtggagatcgtgaagaagctggagagccggcagaggggctgggaggaggatgaagatcctgagaggaagggggccatcgtgttcaatgccaccagcgagttctgcaggaccctgggggagatccccacctacggcctggccggcaaccgggaggagcaggaggagctgatggactttgaaagagatgaggagaggtctgccaatggaggcagcgagagtgatggagaggagaacatcggctggagcacagtgaacctggatgaggagaagcagcagcaggacttcagcgccagcagcaccaccatcctggatgaggagcccatcgtgaacagaggcctggccgccgccctgctgctgtgccagaacaagggcctgctggagaccaccgtgcagaaggtggcccgggtgaaggcccccaacaagagcctgcccagcgctgtgtactgcatcgaggacaagatggccattgatgacaagtacagcagaagagaggagtaccggggcttcacccaggacttcaaggagaaggatggctacaagccagatgtgaagattgaatatgtggatgagaccggcaggaagctgacccccaaggaggccttccggcagctgagccaccgcttccacggcaagggcagcggcaagatgaagacagaaagaaggatgaagaagctggatgaggaggccctgctgaagaagatgagcagcagtgacacccccctgggcaccgtggccctgctgcaggagaagcagaaggcccagaagaccccctacatcgtgctgagcggcagcggcaagtccatgaatgccaacaccatcaccaagtag

SEQ ID NO: 22000 - DNA, 1929 bp, synthetic construct
  misc_feature 1..1929: note = Description of Artificial Sequence: Synthetic coding sequence
  source 1..1929: mol_type = other DNA
atggccctgcggcagcgggaggagctgcgggagaagctggccgccgccaaggagaagaggctgctgaaccagaagctgggcaagatcaagaccctgggggaggatgacccctggctggatgacacagctgcctggattgaaagaagccggcagctgcagaaggagaaggacctggccgagaagagggccaagctgctggaggagatggaccaggagtttggagtgtccaccctggtggaggaggagtttggccagaggcggcaggacctgtacagcgcccgggacctgcagggcctgactgtggagcacgccatcgacagcttccgggagggggagaccatgatcctgaccctgaaggacaagggcgtgctgcaggaggaggaggatgtgctggtgaatgtgaacctggtggacaaggagcgggcagagaagaatgtggagctgaggaagaagaagccagactacctgccctatgcagaagatgaatctgtggatgacctggcccagcagaagcccaggagcatcctgagcaaatatgatgaggagctggagggggagcggccccacagcttccggctggagcagggcggcacagcagatggcctgcgggagcgggagctggaggagatccgggccaagctgcggctgcaggcccagagcctgagcacagtgggcccccggctggccagcgagtacctgaccccagaggagatggtgaccttcaagaagaccaagagaagagtgaagaagatcaggaagaaggagaaggaggtggtggtgcgggcagatgacctgctgcccctgggggaccagacccaggatggagactttggcagccggctgcggggccggggcagaagaagagtgtctgaggtggaggaggagaaggagcctgtgccccagcccctgcccagtgatgacaccagggtggagaacatggacatcagtgatgaggaggagggcggggcccctcctcctggcagcccccaggtgctggaggaggatgaagctgagctggagctgcagaagcagctggagaagggccgccgcctgcggcagctgcagcagctgcagcagctgcgggacagcggggagaaggtggtggagatcgtgaagaagctggagagccggcagaggggctgggaggaggatgaagatcctgagaggaagggggccatcgtgttcaatgccaccagcgagttctgcaggaccctgggggagatccccacctacggcctggccggcaaccgggaggagcaggaggagctgatggactttgaaagagatgaggagaggtctgccaatggaggcagcgagagtgatggagaggagaacatcggctggagcacagtgaacctggatgaggagaagcagcagcaggacttcagcgccagcagcaccaccatcctggatgaggagcccatcgtgaacagaggcctggccgccgccctgctgctgtgccagaacaagggcctgctggagaccaccgtgcagaaggtggcccgggtgaaggcccccaacaagagcctgcccagcgctgtgtactgcatcgaggacaagatggccattgatgacaagtacagcagaagagaggagtaccggggcttcacccaggacttcaaggagaaggatggctacaagccagatgtgaagattgaatatgtggatgagaccggcaggaagctgacccccaaggaggccttccggcagctgagccaccgcttccacggcaagggcagcggcaagatgaagacagaaagaaggatgaagaagctggatgaggaggccctgctgaagaagatgagcagcagtgacacccccctgggcaccgtggccctgctgcaggagaagcagaaggcccagaagaccccctacatcgtgctgagcggcagcggcaagtccatgaatgccaacaccatcaccaagtag

SEQ ID NO: 22001 - DNA, 4392 bp, synthetic construct
  misc_feature 1..4392: note = Description of Artificial Sequence: Synthetic coding sequence
  source 1..4392: mol_type = other DNA
atgaagaagaagacagtgtgcaccctgaacatgggagacaagaagtatgaggacatggagggggaggagaatggagacaacaccatcagcacaggcctgctgtacagcgaggccgaccgctgccccatctgcctgaactgcctgctggagaaggaggtgggcttccctgagagctgcaaccacgtgttctgcatgacctgcatcctgaagtgggccgagaccctggccagctgccccatcgacaggaagcccttccaggccgtgttcaagttcagcgccctggagggctacgtgaaggtgcaggtgaagaagcagctgcgggagaccaaggacaagaagaatgaaaattcctttgagaagcaggtgtcctgccacgagaacagcaagagctgcatccggaggaaggccatcgtgcgggaggacctgctgagcgccaaggtgtgtgacctgaagtggatccacaggaacagcctgtacagcgagaccggcggcaagaagaatgctgccatcaagatcaacaagccccagaggagcaactggagcaccaaccagtgcttcaggaacttcttcagcaacatgttcagctctgtgagccacagcggggagagcagcttcacctaccgggcctactgcacagagttcatcgaggccagcgagatcagcgccctgatccggcagaagagacatgagctggagctgtcctggttcccagacaccctgcccggcatcggccgcatcggcttcatcccctggaatgtggagacagaggtgctgcccctcatcagctctgtgctgcccaggaccatcttccccaccagcaccatcagctttgagcacttcggcaccagctgcaagggctacgccctggcccacacccaggagggggaggagaagaagcagaccagcggcaccagcaacacccggggcagcaggaggaagccagccatgaccacccccaccaggaggagcaccaggaacaccagggctgagacagccagccagagccagaggagccccatcagtgacaacagcggctgtgatgcccctggcaacagcaaccccagcctgtctgtgcccagcagcgctgagagcgagaagcagacccggcaggcccccaagaggaagtctgtgcggcggggcaggaagccacccctgctgaagaagaagctgcggagctctgtggccgcccctgagaagagcagcagcaatgattctgtggatgaggagacagctgagagtgacaccagccctgtgctggagaaggagcaccagccagatgtggacagcagcaacatctgcaccgtgcagacccacgtggagaaccagagcgccaactgcctgaagagctgcaatgagcagatcgaggagagcgagaagcacacagccaactatgacacagaggagcgggtgggcagcagcagcagcgagagctgtgcccaggacctgcctgtgctggtgggggaggagggggaggtgaagaagctggagaacacaggcatcgaggccaacgtgctgtgcctggagagcgagatcagcgagaacatcctggagaagggcggggaccccctggagaagcaggaccagatcagcggcctgagccagagcgaggtgaagacagatgtgtgcaccgtgcacctgcccaatgacttccccacctgcctgaccagcgagagcaaggtgtaccagcctgtgtcctgccccctgagtgacctgtctgaaaatgtggagagcgtggtgaatgaggagaagatcacagagagcagcctggtggagatcacagagcacaaggacttcaccctgaagacagaggagctgattgagagccccaagctggagagcagcgagggggagatcatccagacagtggaccggcagagcgtgaagagccctgaggtgcagctgctgggccacgtggagacagaagatgtggagatcatcgccacctgtgacacctttggaaatgaagacttcaacaacatccaggacagcgagaacaacctgctgaagaacaacctgctgaacaccaagctggagaagagcctggaggagaagaatgaaagcctgacagagcaccccaggagcacagagctgcccaagacccacatcgagcagatccagaagcacttcagcgaggacaacaatgagatgatccccatggagtgtgacagcttctgcagcgaccagaatgaaagtgaggtggagcccagcgtgaatgctgacctgaagcagatgaatgaaaacagcgtgacccactgcagcgagaacaacatgcccagcagtgacctggctgatgagaaggtggagaccgtgtcccagcccagcgagagccccaaggacaccatcgacaagaccaagaagcccaggacccggcgcagccgcttccacagccccagcaccacctggagccccaacaaggacaccccccaggagaagaagaggccccagagccccagcccccggcgggagaccgggaaggagagcaggaagagccagagccccagccccaagaatgaaagtgcccggggcaggaagaagagccgcagccagagccccaagaaggacatcgcccgggagcggcggcagagccagagccgcagccccaagagggacaccacccgggagagccgccgctctgagagcctgagcccccggcgggagaccagccgggagaacaagaggagccagccccgggtgaaggacagcagccctggagagaagagccgcagccagagccgggagcgggagagtgacagagatggccagaggcgggagcgggagaggaggaccaggaagtggagccgcagccgcagccacagccgcagccccagccgctgcaggaccaagagcaagagcagcagctttggaagaattgaccgggacagctacagcccccgctggaagggccgctgggccaatgatggctggcgctgccccagaggaaatgaccgctacaggaagaatgaccctgagaagcagaatgaaaacaccaggaaggagaagaatgacatccacctggatgctgatgaccccaacagcgctgacaagcacagaaatgactgccccaactggatcacagagaagatcaacagcggccctgaccccaggaccagaaatcctgagaagctgaaggagagccactgggaggagaacagaaatgaaaattctggcaacagctggaacaagaactttggaagtggctgggtgagcaacagaggccggggccggggcaacagaggccggggcacctaccgcagcagctttgcctacaaggaccagaatgaaaatcgctggcagaacaggaagcccctgagcggcaacagcaacagcagcggcagcgagagcttcaagtttgtggagcagcagagctacaagaggaagtctgagcaggagttctcctttgacaccccagctgacaggagcggctggaccagcgccagctcctgggccgtgaggaagaccctgcctgcagatgtgcagaactactacagccggcggggcaggaacagcagcggcccccagagcggctggatgaagcaggaggaggagaccagcggccaggacagcagcctgaaggaccagaccaaccagcaggtggatggcagccagctgcccatcaacatgatgcagccccagatgaatgtgatgcagcagcagatgaatgcccagcaccagcccatgaacatcttcccctaccctgtgggcgtgcacgcccccctgatgaacatccagaggaaccccttcaacatccacccccagctgcccctgcacctgcacactggagtgcccctgatgcaggtggccacccccacctctgtgtcccagggcctgcccccacctcctcctcctcctccacccagccagcaggtgaactacatcgccagccagccagatggcaagcagctgcagggcatccccagcagcagccacgtgagcaacaacatgagcacccctgtgctgcctgcccccacagctgcccctggcaacacaggcatggtgcagggccccagcagcggcaacaccagcagcagcagccacagcaaggccagcaatgctgctgtgaagctggccgagagcaaggtgtctgtggccgtggaggccagcgctgacagcagcaagacagacaagaagctgcagatccaggagaaggccgcccaggaggtgaagctggccatcaagcccttctaccagaacaaggacatcaccaaggaggagtacaaggagatcgtgaggaaggctgtggacaaggtgtgccacagcaagtctggagaggtgaacagcaccaaggtggccaacctggtgaaggcctacgtggacaagtacaagtacagcaggaagggcagccagaagaagaccctggaggagcctgtgtccacagagaagaacatcggctag

SEQ ID NO: 22002 - DNA, 4392 bp, synthetic construct; identical to SEQ ID NO: 22001
  misc_feature 1..4392: note = Description of Artificial Sequence: Synthetic coding sequence
  source 1..4392: mol_type = other DNA

SEQ ID NO: 22003 - DNA, 3447 bp, synthetic construct
  misc_feature 1..3447: note = Description of Artificial Sequence: Synthetic coding sequence
  source 1..3447: mol_type = other DNA
atgaccacccccacccggcgcagcaccaggaacaccagggctgagacagccagccagagccagaggagccccatcagtgacaacagcggctgtgatgcccctggcaacagcaaccccagcctgtctgtgcccagcagcgctgagagcgagaagcagacccggcaggcccccaagaggaagtctgtgagaagaggaaggaagccacccctgctgaagaagaagctgcggagctctgtggccgcccctgagaagagcagcagcaatgacagcgtggatgaggagacagctgagagtgacaccagccctgtgctggagaaggagcaccagccagatgtggacagcagcaacatctgcaccgtgcagacccacgtggagaaccagagcgccaactgcctgaagagctgcaatgagcagatcgaggagagcgagaagcacacagccaactatgacacagaggagcgggtgggcagcagcagcagcgagagctgtgcccaggacctgcctgtgctggtgggggaggagggggaggtgaagaagctggagaacacaggaattgaggccaacgtgctgtgcctggagagcgagatcagcgagaacatcctggagaagggcggggaccccctggagaagcaggaccagatcagcggcctgagccagagcgaggtgaagacagatgtgtgcaccgtgcacctgcccaatgacttccccacctgcctgaccagcgagagcaaggtgtaccagcctgtgtcctgccccctgagtgacctgtctgaaaatgtggagagcgtggtgaatgaggagaagatcacagagagcagcctggtggagatcacagagcacaaggacttcaccctgaagacagaggagctgattgagagccccaagctggagagcagcgagggggagatcatccagacagtggaccggcagagcgtgaagagccctgaggtgcagctgctgggccacgtggagacagaagatgtggagatcatcgccacctgtgacacctttggaaatgaagacttcaacaacatccaggacagcgagaacaacctgctgaagaacaacctgctgaacaccaagctggagaagagcctggaggagaagaatgaaagcctgacagagcaccccaggagcacagagctgcccaagacccacatcgagcagatccagaagcacttcagcgaggacaacaatgagatgatccccatggagtgtgacagcttctgcagcgaccagaatgaaagtgaggtggagcccagcgtgaatgctgacctgaagcagatgaatgaaaattctgtgacccactgcagcgagaacaacatgcccagcagtgacctggctgatgagaaggtggagaccgtgtcccagcccagcgagagccccaaggacaccatcgacaagaccaagaagcccaggaccaggaggagccgcttccacagccccagcaccacctggagccccaacaaggacaccccccaggagaagaagaggccccagagccccagcccccggcgggagaccgggaaggagagcaggaagagccagagccccagccccaagaatgaaagtgcccggggcaggaagaagagccgcagccagagccccaagaaggacatcgcccgggagcggcggcagagccagagccgcagccccaagagggacaccacccgggagagcagaagaagtgagagcctgagcccccggcgggagaccagccgggagaacaagaggagccagccccgggtgaaggacagcagccctggagagaagagccgcagccagagccgggagcgggagagtgacagagatggccagaggcgggagcgggagaggaggaccaggaagtggagccgcagccgcagccacagccgcagccccagccgctgcaggaccaagagcaagagcagcagctttggaagaattgaccgggacagctacagcccccgctggaagggccgctgggccaatgatggctggcgctgccccagaggaaatgaccgctacaggaagaatgaccctgagaagcagaatgaaaacaccaggaaggagaagaatgacatccacctggatgctgatgaccccaacagcgctgacaagcacagaaatgactgccccaactggatcacagagaagatcaacagcggccctgaccccaggaccaggaaccctgagaagctgaaggagagccactgggaggagaacagaaatgaaaacagcggcaacagctggaacaagaactttggcagcggctgggtgagcaacagaggccggggccggggcaacagaggccggggcacctaccgcagcagctttgcctacaaggaccagaatgaaaatcgctggcagaacaggaagcccctgagcggcaacagcaacagcagcggcagcgagagcttcaagtttgtggagcagcagagctacaagaggaagtctgagcaggagttctcctttgacaccccagctgacagaagtggctggaccagcgccagctcctgggccgtgaggaagaccctgcctgcagatgtgcagaactactacagcagaagaggaagaaacagcagcggcccccagagcggctggatgaagcaggaggaggagaccagcggccaggacagcagcctgaaggaccagaccaaccagcaggtggatggcagccagctgcccatcaacatgatgcagccccagatgaatgtgatgcagcagcagatgaatgcccagcaccagcccatgaacatcttcccctaccctgtgggcgtgcacgcccccctgatgaacatccagaggaaccccttcaacatccacccccagctgcccctgcacctgcacactggagtgcccctgatgcaggtggccacccccacctctgtgtcccagggcctgcccccacctcctcctcctcctccacccagccagcaggtgaactacatcgccagccagccagatggcaagcagctgcagggcatccccagcagcagccacgtgagcaacaacatgagcacccctgtgctgcctgcccccacagctgcccctggcaacacaggcatggtgcagggccccagcagcggcaacaccagcagcagcagccacagcaaggccagcaatgctgctgtgaagctggccgagagcaaggtgtctgtggccgtggaggccagcgctgacagcagcaagacagacaagaagctgcagatccaggagaaggccgcccaggaggtgaagctggccatcaagcccttctaccagaacaaggacatcaccaaggaggagtacaaggagatcgtgaggaaggctgtggacaaggtgtgccacagcaagagcggggaggtgaacagcaccaaggtggccaacctggtgaaggcctacgtggacaagtacaagtacagcaggaagggcagccagaagaagaccctggaggagcctgtgtccacagagaagaacattggatag

SEQ ID NO: 22004 - DNA, 1401 bp, synthetic construct
  misc_feature 1..1401: note = Description of Artificial Sequence: Synthetic coding sequence
  source 1..1401: mol_type = other DNA
atggccgaggagcaggacctgtctgaggtggagctgagccctgtgggcagcgaggagccccgctgcctgagccctggcagcgcccccagcctgggcccagatggcggcggcggcggcagcggcctgcgggccagccctggccctggagagctgggcaaggtgaagaaggagcagcaggatggagaggctgatgatgacaagtttcctgtgtgcatccgggaggccgtgtcccaggtgctgagcggctatgactggaccctggtgcccatgcctgtgcgggtgaatggagccagcaagagcaagccccacgtgaagaggcccatgaatgccttcatggtgtgggcccaggccgcccggaggaagctggccgaccagtacccccacctgcacaatgctgagctgagcaagaccctgggcaagctgtggaggctgctgaatgaaagtgacaagaggcccttcatcgaggaggccgagcggctgaggatgcagcacaagaaggaccacccagactacaagtaccagcccaggaggaggaagaatggcaaggccgcccagggcgaggctgaatgtcctggaggagaggccgagcagggcggcacagctgccatccaggcccactacaagagcgcccacctggaccaccgccaccctggagagggcagccccatgtctgatggcaaccctgagcaccccagcggccagagccacggcccccccaccccacccaccacccccaagacagagctgcagagcggcaaggctgaccccaagagagatggccgctccatgggagagggcggcaagccccacatcgactttggaaatgtggacatcggggagatcagccatgaggtgatgagcaacatggagacctttgatgtggccgagctggaccagtacctgccccccaacggccaccctggccacgtgagcagctacagcgctgctggctacggcctgggcagcgccctggccgtggccagcggccacagcgcctggatcagcaagcccccaggagtggccctgcccaccgtgtccccacctggggtggatgccaaggcccaggtgaagacagaaacagctggcccccagggccccccccactacacagaccagcccagcaccagccagatcgcctacaccagcctgagcctgccccactacggcagcgccttccccagcatcagccggccccagtttgactacagcgaccaccagcccagcggcccctactacggccacagcggccaggccagcggcctgtacagcgccttctcctacatgggccccagccagaggcccctgtacacagccatcagtgaccccagccccagcggcccccagagccacagccccacccactgggagcagcctgtgtacaccaccctgagccggccctag

SEQ ID NO: 22005 - DNA, 1401 bp, synthetic construct; identical to SEQ ID NO: 22004
  misc_feature 1..1401: note = Description of Artificial Sequence: Synthetic coding sequence
  source 1..1401: mol_type = other DNA

SEQ ID NO: 22006 - DNA, 861 bp, synthetic construct
  misc_feature 1..861: note = Description of Artificial Sequence: Synthetic coding sequence
  source 1..861: mol_type = other DNA
atggccgaggagcaggacctgtctgaggtggagctgagccctgtgggcagcgaggagccccgctgcctgagccctggcagcgcccccagcctgggcccagatggcggcggcggcggcagcggcctgcgggccagccctggccctggagagctgggcaaggtgaagaaggagcagcaggatggagaggctgatgatgacaagtttcctgtgtgcatccgggaggccgtgtcccaggtgctgagcggctatgactggaccctggtgcccatgcctgtgcgggtgaatggagccagcaagagcaagccccacgtgaagaggcccatgaatgccttcatggtgtgggcccaggccgcccggaggaagctggccgaccagtacccccacctgcacaatgctgagctgagcaagaccctgggcaagctgtggaggctgctgaatgaaagtgacaagaggcccttcatcgaggaggccgagcggctgaggatgcagcacaagaaggaccacccagactacaagtaccagcccaggaggaggaagaatggcaaggccgcccagggcgaggctgaatgtcctggaggagaggccgagcagggcggcacagctgccatccaggcccactacaagagcgcccacctggaccaccgccaccctggagagggcagccccatgtctgatggcaaccctgagcaccccagcggccagagccacggcccccccaccccacccaccacccccaagacagagctgcagagcggcaaggctgaccccaagagagatggccggcccagccccagcggcccccagagccacagccccacccactgggagcagcctgtgtacaccaccctgagccggccctag

SEQ ID NO: 22007 - DNA, 642 bp, synthetic construct
  misc_feature 1..642: note = Description of Artificial Sequence: Synthetic coding sequence
  source 1..642: mol_type = other DNA
atggccgaggagcaggacctgtctgaggtggagctgagccctgtgggcagcgaggagccccgctgcctgagccctggcagcgcccccagcctgggcccagatggcggcggcggcggcagcggcctgcgggccagccctggccctggagagctgggcaaggtgaagaaggagcagcaggatggagaggctgatgatgacaagtttcctgtgtgcatccgggaggccgtgtcccaggtgctgagcggctatgactggaccctggtgcccatgcctgtgcgggtgaatggagccagcaagagcaagccccacgtgaagaggcccatgaatgccttcatggtgtgggcccaggccgcccggaggaagctggccgaccagtacccccacctgcacaatgctgagctgagcaagaccctgggcaagctgtggaggctgctgaatgaaagtgacaagaggcccttcatcgaggaggccgagcggctgaggatgcagcacaagaaggaccacccagactacaagtaccagcccaggaggaggaagaatggcaaggccgcccagggcgaggctgaatgtcctggaggagaggccgagcagggcggcacagctgccatccaggcccactacaagagcgcccacctggactag

SEQ ID NO: 22008 - DNA, 1425 bp, synthetic construct
  misc_feature 1..1425: note = Description of Artificial Sequence: Synthetic coding sequence
  source 1..1425: mol_type = other DNA
atggtgcagcagaccaacaatgcagaaaatacagaggccctgctggccggggagagcagtgacagcggggccggcctggagctgggcatcgccagcagccccaccccaggcagcacagccagcactggaggcaaggcagatgaccccagctggtgcaagacccccagcggccacatcaagaggcccatgaatgccttcatggtgtggagccagatcgagaggaggaagatcatggagcagagcccagacatgcacaatgctgagatcagcaagaggctgggcaagcgctggaagctgctgaaggacagcgacaagatccccttcatccgggaggccgagcggctgcggctgaagcacatggctgactacccagactacaagtaccggcccaggaagaaggtgaagtctggaaatgccaacagcagcagcagcgctgctgccagcagcaagccaggagagaagggggacaaggtgggcggcagcggcggcggcggccacggcggcggcggcggcggcggcagcagcaatgccggcggcggcggcggcggggccagcggcggcggggccaacagcaagccagcccagaagaagagctgtggcagcaaggtggccggcggggccggcggcggcgtgtccaagccccacgccaagctgatcctggccggcggcggcggcggcggcaaggctgctgctgctgctgctgccagctttgctgctgagcaggccggggctgctgccctgctgcccctgggcgctgctgctgaccaccacagcctgtacaaggcccggacccccagcgccagcgccagcgccagcagcgctgccagcgccagcgctgccctggccgcccctgggaagcacctggccgagaagaaggtgaagagggtgtacctgtttggaggcctgggcaccagcagcagccctgtgggcggcgtgggcgctggagctgaccccagcgaccccctgggcctgtatgaggaggagggcgccggctgcagcccagatgcccccagcctgagcggccgcagcagcgctgccagcagccctgctgctggccgcagccctgctgaccaccggggctacgccagcctgcgggccgccagccctgcccccagcagcgcccccagccacgccagcagcagcgccagcagccacagcagcagcagcagcagcagcggcagcagcagcagtgatgatgaatttgaagatgacctgctggacctgaaccccagcagcaactttgagagcatgagcctgggcagcttcagcagcagcagcgccctggaccgggacctggacttcaactttgagcccggcagcggcagccactttgagttcccagactactgcaccccagaggtgtctgagatgatcagcggggactggctggagagcagcatcagcaacctggtgttcacctactag

SEQ ID NO: 22009 - DNA, 1425 bp, synthetic construct; identical to SEQ ID NO: 22008
  misc_feature 1..1425: note = Description of Artificial Sequence: Synthetic coding sequence
  source 1..1425: mol_type = other DNA

SEQ ID NO: 22010 - DNA, 3318 bp, synthetic construct
  misc_feature 1..3318: note = Description of Artificial Sequence: Synthetic coding sequence
  source 1..3318: mol_type = other DNA
atgctggagcccagctctgtgctgcacgccaacgtgaaccaggcccccctgtggtgcctggtgctgcgctggtgccgggagtgcaaggacacagtgtgtggcggcaagcagaagagccgggtgaaccacaccttccagaggcgggagattgaggccaaggaggcctgtgactggctgcgggccgccggcttcccccagtatgcccagctgtatgaggacagccagttccccatcaacatcgtggccgtgaagaatgaccatgacttcctggagaaggacctggtggagcccctgtgccggcggctgaacaccctgaacaagtgtgcctccatgaagctggatgtgaacttccagaggaagaagggagatgacagtgatgaggaggacctgtgcatcagcaacaagtggaccttccagaggaccagccgccgctggagccgggtggatgacctgtacaccctgctgcccaggggggacagaaatggcagccctgggggcaccggcatgaggaacaccaccagcagcgagagcgtgctgacagacctgtctgagcctgaggtgtgcagcatccacagcgagagcagcggcggcagtgacagccgcagccagcccggccagtgctgcacagacaaccctgtgatgctggatgcccccctggtgagcagcagcctgccccagcccccaagagatgtgctgaaccaccccttccaccccaagaatgagaagcccacccgggcccgggccaagagcttcctgaagaggatggagaccctgcggggcaaaggagcccacggccgccacaagggcagcggccgcactggaggcctggtgatcagcggccccatgctgcagcaggagcctgagagcttcaaggccatgcagtgcatccagatccccaacggggacctgcagaacagccccccaccagcctgcaggaagggcctgccctgcagcggcaagagcagcggggagagcagccccagcgagcacagcagcagtggagtgtccaccccctgcctgaaggagaggaagtgccacgaggccaacaagaggggcggcatgtacctggaggacctggatgtgctggccggcacagccctgcctgatgctggggaccagagcaggatgcatgagttccacagccaggagaacctggtggtgcacatccccaaggaccacaagccaggcaccttccccaaggccctgagcattgagagcctgagccccacagacagcagcaatggagtgaactggaggacaggcagcatcagcctgggccgggagcaggtgcctggggcccgggagccccggctgatggccagctgccaccgggccagccgggtgtccatctatgacaacgtgcccggcagccacctgtatgccagcactggagacctgctggacctggagaaggatgacctcttcccccacctggatgacatcctgcagcacgtgaatggcctgcaggaggtggtggatgactggagcaaggatgtgctgcctgagctgcagacccatgacaccctggtgggggagcccggcctgagcaccttccccagccccaaccagatcaccctggactttgagggcaacagcgtgtctgagggccgcaccacccccagtgatgtggagagagatgtgaccagcctgaatgaaagtgagcccccaggagtgcgggacagaagagacagcggcgtgggcgccagcctgacccggcccaacagaaggctgcgctggaacagcttccagctgagccaccagcccaggcctgccccagccagcccccacatcagcagccagacagccagccagctgagcctgctgcagcgcttcagcctgctgcggctgacagccatcatggagaagcacagcatgagcaacaagcacggctggacctggagcgtgcccaagttcatgaagaggatgaaggtgcctgactacaaggacaaggctgtgtttggagtgcccctcatcgtgcacgtgcagaggacaggccagcccctgccccagagcatccagcaggccctgcgctacctgcggagcaactgcctggaccaggtgggcctcttcaggaagtctggagtgaagagccgcatccacgccctgcggcagatgaatgaaaacttcccagaaaatgtgaactatgaggaccagagcgcctatgatgtggccgacatggtgaagcagttcttccgggacctgcctgagcccctcttcaccaacaagctgtctgagaccttcctgcacatctaccagtatgtgtccaaggagcagaggctgcaggccgtgcaggccgccatcctgctgctggctgatgaaaatcgggaggtgctgcagaccctgctgtgcttcctgaatgatgtggtgaacctggtggaggagaaccagatgacccccatgaacctggccgtgtgcctggcccccagcctcttccacctgaacctgctgaagaaggagagcagccccagggtcatccagaagaagtatgccaccgggaagccagaccagaaggacctgaatgaaaacctggccgccgcccagggcctggcccacatgatcatggagtgtgaccggctgtttgaggtgccccatgagctggtggcccagagcagaaattcctatgtggaggccgagatccacgtgcccaccctggaggagctgggcacccagctggaggagagcggggccaccttccacacctacctgaaccacctgatccagggcctgcagaaggaggccaaggagaagttcaagggctgggtgacctgcagcagcacagacaacacagacctggccttcaagaaggtgggagatggcaaccccctgaagctgtggaaggcctctgtggaggtggaggccccacccagcgtggtgctgaacagagtgctgcgggagcggcacctgtgggatgaagattttgtgcagtggaaggtggtggagaccctggaccggcagacagagatctaccagtatgtgctgaacagcatggccccccaccccagccgggactttgtggtgctgcggacctggaagacagacctgcccaagggcatgtgcaccctggtgtccctgtctgtggagcacgaggaggcccagctgctgggcggcgtgcgggctgtggtgatggacagccagtacctgattgagccctgtggcagcggcaagagccggctgacccacatctgcagaattgacctgaagggccacagccctgagtggtacagcaagggcttcggccacctgtgtgccgctgaggtggcccgcatccggaacagcttccagcccctgattgctgagggccctgagaccaagatctag

SEQ ID NO: 22011 - DNA, 3342 bp, synthetic construct
  misc_feature 1..3342: note = Description of Artificial Sequence: Synthetic coding sequence
  source 1..3342: mol_type = other DNA
atgttcagccaggtgcccaggaccccagccagcggctgctactacctgaacagcatgaccccagagggccaggagatgtacctgcgctttgaccagaccaccaggaggagcccctacaggatgagccgcatcctggcccggcaccagctggtgaccaagatccagcaggagattgaggccaaggaggcctgtgactggctgcgggccgccggcttcccccagtatgcccagctgtatgaggacagccagttccccatcaacatcgtggccgtgaagaatgaccatgacttcctggagaaggacctggtggagcccctgtgccggcggctgaacaccctgaacaagtgtgcctccatgaagctggatgtgaacttccagaggaagaagggagatgacagtgatgaggaggacctgtgcatcagcaacaagtggaccttccagaggaccagccgccgctggagccgggtggatgacctgtacaccctgctgcccaggggggacagaaatggcagccctgggggcaccggcatgaggaacaccaccagcagcgagagcgtgctgacagacctgtctgagcctgaggtgtgcagcatccacagcgagagcagcggcggcagtgacagccgcagccagcccggccagtgctgcacagacaaccctgtgatgctggatgcccccctggtgagcagcagcctgccccagcccccaagagatgtgctgaaccaccccttccaccccaagaatgagaagcccacccgggcccgggccaagagcttcctgaagaggatggagaccctgcggggcaaaggagcccacggccgccacaagggcagcggccgcactggaggcctggtgatcagcggccccatgctgcagcaggagcctgagagcttcaaggccatgcagtgcatccagatccccaacggggacctgcagaacagccccccaccagcctgcaggaagggcctgccctgcagcggcaagagcagcggggagagcagccccagcgagcacagcagcagtggagtgtccaccccctgcctgaaggagaggaagtgccacgaggccaacaagaggggcggcatgtacctggaggacctggatgtgctggccggcacagccctgcctgatgctggggaccagagcaggatgcatgagttccacagccaggagaacctggtggtgcacatccccaaggaccacaagccaggcaccttccccaaggccctgagcattgagagcctgagccccacagacagcagcaatggagtgaactggaggacaggcagcatcagcctgggccgggagcaggtgcctggggcccgggagccccggctgatggccagctgccaccgggccagccgggtgtccatctatgacaacgtgcccggcagccacctgtatgccagcactggagacctgctggacctggagaaggatgacctcttcccccacctggatgacatcctgcagcacgtgaatggcctgcaggaggtggtggatgactggagcaaggatgtgctgcctgagctgcagacccatgacaccctggtgggggagcccggcctgagcaccttccccagccccaaccagatcaccctggactttgagggcaacagcgtgtctgagggccgcaccacccccagtgatgtggagagagatgtgaccagcctgaatgaaagtgagcccccaggagtgcgggacagaagagacagcggcgtgggcgccagcctgacccggcccaacagaaggctgcgctggaacagcttccagctgagccaccagcccaggcctgccccagccagcccccacatcagcagccagacagccagccagctgagcctgctgcagcgcttcagcctgctgcggctgacagccatcatggagaagcacagcatgagcaacaagcacggctggacctggagcgtgcccaagttcatgaagaggatgaaggtgcctgactacaaggacaaggctgtgtttggagtgcccctcatcgtgcacgtgcagaggacaggccagcccctgccccagagcatccagcaggccctgcgctacctgcggagcaactgcctggaccaggtgggcctcttcaggaagtctggagtgaagagccgcatccacgccctgcggcagatgaatgaaaacttcccagaaaatgtgaactatgaggaccagagcgcctatgatgtggccgacatggtgaagcagttcttccgggacctgcctgagcccctcttcaccaacaagctgtctgagaccttcctgcacatctaccagtatgtgtccaaggagcagaggctgcaggccgtgcaggccgccatcctgctgctggctgatgaaaatcgggaggtgctgcagaccctgctgtgcttcctgaatgatgtggtgaacctggtggaggagaaccagatgacccccatgaacctggccgtgtgcctggcccccagcctcttccacctgaacctgctgaagaaggagagcagccccagggtcatccagaagaagtatgccaccgggaagccagaccagaaggacctgaatgaaaacctggccgccgcccagggcctggcccacatgatcatggagtgtgaccggctgtttgaggtgccccatgagctggtggcccagagcagaaattcctatgtggaggccgagatccacgtgcccaccctggaggagctgggcacccagctggaggagagcggggccaccttccacacctacctgaaccacctgatccagggcctgcagaaggaggccaaggagaagttcaagggctgggtgacctgcagcagcacagacaacacagacctggccttcaagaaggtgggagatggcaaccccctgaagctgtggaaggcctctgtggaggtggaggccccacccagcgtggtgctgaacagagtgctgcgggagcggcacctgtgggatgaagattttgtgcagtggaaggtggtggagaccctggaccggcagacagagatctaccagtatgtgctgaacagcatggccccccaccccagccgggactttgtggtgctgcggacctggaagacagacctgcccaagggcatgtgcaccctggtgtccctgtctgtggagcacgaggaggcccagctgctgggcggcgtgcgggctgtggtgatggacagccagtacctgattgagccctgtggcagcggcaagagccggctgacccacatctgcagaattgacctgaagggccacagccctgagtggtacagcaagggcttcggccacctgtgtgccgctgaggtggcccgcatccggaacagcttccagcccctgattgctgagggccctgagaccaagatctag

SEQ ID NO: 22012 - DNA, 2064 bp, synthetic construct
  misc_feature 1..2064: note = Description of Artificial Sequence: Synthetic coding sequence
  source 1..2064: mol_type = other DNA
atgctggagcccagctctgtgctgcacgccaacgtgaaccaggcccccctgtggtgcctggtgctgcgctggtgccgggagtgcaaggacacagtgtgtggcggcaagcagaagagccgggtgaaccacaccttccagaggcgggagattgaggccaaggaggcctgtgactggctgcgggccgccggcttcccccagtatgcccagctgtatgaggacagccagttccccatcaacatcgtggccgtgaagaatgaccatgacttcctggagaaggacctggtggagcccctgtgccggcggctgaacaccctgaacaagtgtgcctccatgaagctggatgtgaacttccagaggaagaagggagatgacagtgatgaggaggacctgtgcatcagcaacaagtggaccttccagaggaccagccgccgctggagccgggtggatgacctgtacaccctgctgcccaggggggacagaaatggcagccctgggggcaccggcatgaggaacaccaccagcagcgagagcgtgctgacagacctgtctgagcctgaggtgtgcagcatccacagcgagagcagcggcggcagtgacagccgcagccagcccggccagtgctgcacagacaaccctgtgatgctggatgcccccctggtgagcagcagcctgccccagcccccaagagatgtgctgaaccaccccttccaccccaagaatgagaagcccacccgggcccgggccaagagcttcctgaagaggatggagaccctgcggggcaaaggagcccacggccgccacaagggcagcggccgcactggaggcctggtgatcagcggccccatgctgcagcaggagcctgagagcttcaaggccatgcagtgcatccagatccccaacggggacctgcagaacagccccccaccagcctgcaggaagggcctgccctgcagcggcaagagcagcggggagagcagccccagcgagcacagcagcagtggagtgtccaccccctgcctgaaggagaggaagtgccacgaggccaacaagaggggcggcatgtacctggaggacctggatgtgctggccggcacagccctgcctgatgctggggaccagagcaggatgcatgagttccacagccaggagaacctggtggtgcacatccccaaggaccacaagccaggcaccttccccaaggccctgagcattgagagcctgagccccacagacagcagcaatggagtgaactggaggacaggcagcatcagcctgggccgggagcaggtgcctggggcccgggagccccggctgatggccagctgccaccgggccagccgggtgtccatctatgacaacgtgcccggcagccacctgtatgccagcactggagacctgctggacctggagaaggatgacctcttcccccacctggatgacatcctgcagcacgtgaatggcctgcaggaggtggtggatgactggagcaaggatgtgctgcctgagctgcagacccatgacaccctggtgggggagcccggcctgagcaccttccccagccccaaccagatcaccctggactttgagggcaacagcgtgtctgagggccgcaccacccccagtgatgtggagagagatgtgaccagcctgaatgaaagtgagcccccaggagtgcgggacagaagagacagcggcgtgggcgccagcctgacccggcccaacagaaggctgcgctggaacagcttccagctgagccaccagcccaggcctgccccagccagcccccacatcagcagccagacagccagccagctgagcctgctgcagcgcttcagcctgctgcggctgacagccatcatggagaagcacagcatgagcaacaagcacggctggacctggagcgtgcccaagttcatgaagaggatgaaggtgcctgactacaaggacaaggctgtgtttggagtgcccctcatcgtgcacgtgcagaggacaggccagcccctgccccagagcatccagcaggccctgcgctacctgcggagcaactgcctggaccaggagtag

SEQ ID NO: 22013 - DNA, 2988 bp, synthetic construct
  misc_feature 1..2988: note = Description of Artificial Sequence: Synthetic coding sequence
  source 1..2988: mol_type = other DNA
atgaagctggatgtgaacttccagaggaagaagggagatgacagtgatgaggaggacctgtgcatcagcaacaagtggaccttccagaggaccagccgccgctggagccgggtggatgacctgtacaccctgctgcccaggggggacagaaatggcagccctgggggcaccggcatgaggaacaccaccagcagcgagagcgtgctgacagacctgtctgagcctgaggtgtgcagcatccacagcgagagcagcggcggcagtgacagccgcagccagcccggccagtgctgcacagacaaccctgtgatgctggatgcccccctggtgagcagcagcctgccccagcccccaagagatgtgctgaaccaccccttccaccccaagaatgagaagcccacccgggcccgggccaagagcttcctgaagaggatggagaccctgcggggcaaaggagcccacggccgccacaagggcagcggccgcactggaggcctggtgatcagcggccccatgctgcagcaggagcctgagagcttcaaggccatgcagtgcatccagatccccaacggggacctgcagaacagccccccaccagcctgcaggaagggcctgccctgcagcggcaagagcagcggggagagcagccccagcgagcacagcagcagtggagtgtccaccccctgcctgaaggagaggaagtgccacgaggccaacaagaggggcggcatgtacctggaggacctggatgtgctggccggcacagccctgcctgatgctggggaccagagcaggatgcatgagttccacagccaggagaacctggtggtgcacatccccaaggaccacaagccaggcaccttccccaaggccctgagcattgagagcctgagccccacagacagcagcaatggagtgaactggaggacaggcagcatcagcctgggccgggagcaggtgcctggggcccgggagccccggctgatggccagctgccaccgggccagccgggtgtccatctatgacaacgtgcccggcagccacctgtatgccagcactggagacctgctggacctggagaaggatgacctcttcccccacctggatgacatcctgcagcacgtgaatggcctgcaggaggtggtggatgactggagcaaggatgtgctgcctgagctgcagacccatgacaccctggtgggggagcccggcctgagcaccttccccagccccaaccagatcaccctggactttgagggcaacagcgtgtctgagggccgcaccacccccagtgatgtggagagagatgtgaccagcctgaatgaaagtgagcccccaggagtgcgggacagaagagacagcggcgtgggcgccagcctgacccggcccaacagaaggctgcgctggaacagcttccagctgagccaccagcccaggcctgccccagccagcccccacatcagcagccagacagccagccagctgagcctgctgcagcgcttcagcctgctgcggctgacagccatcatggagaagcacagcatgagcaacaagcacggctggacctggagcgtgcccaagttcatgaagaggatgaaggtgcctgactacaaggacaaggctgtgtttggagtgcccctcatcgtgcacgtgcagaggacaggccagcccctgccccagagcatccagcaggccctgcgctacctgcggagcaactgcctggaccaggtgggcctcttcaggaagtctggagtgaagagccgcatccacgccctgcggcagatgaatgaaaacttcccagaaaatgtgaactatgaggaccagagcgcctatgatgtggccgacatggtgaagcagttcttccgggacctgcctgagcccctcttcaccaacaagctgtctgagaccttcctgcacatctaccagtatgtgtccaaggagcagaggctgcaggccgtgcaggccgccatcctgctgctggctgatgaaaatcgggaggtgctgcagaccctgctgtgcttcctgaatgatgtggtgaacctggtggaggagaaccagatgacccccatgaacctggccgtgtgcctggcccccagcctcttccacctgaacctgctgaagaaggagagcagccccagggtcatccagaagaagtatgccaccgggaagccagaccagaaggacctgaatgaaaacctggccgccgcccagggcctggcccacatgatcatggagtgtgaccggctgtttgaggtgccccatgagctggtggcccagagcagaaattcctatgtggaggccgagatccacgtgcccaccctggaggagctgggcacccagctggaggagagcggggccaccttccacacctacctgaaccacctgatccagggcctgcagaaggaggccaaggagaagttcaagggctgggtgacctgcagcagcacagacaacacagacctggccttcaagaaggtgggagatggcaaccccctgaagctgtggaaggcctctgtggaggtggaggccccacccagcgtggtgctgaacagagtgctgcgggagcggcacctgtgggatgaagattttgtgcagtggaaggtggtggagaccctggaccggcagacagagatctaccagtatgtgctgaacagcatggccccccaccccagccgggactttgtggtgctgcggacctggaagacagacctgcccaagggcatgtgcaccctggtgtccctgtctgtggagcacgaggaggcccagctgctgggcggcgtgcgggctgtggtgatggacagccagtacctgattgagccctgtggcagcggcaagagccggctgacccacatctgcagaattgacctgaagggccacagccctgagtggtacagcaagggcttcggccacctgtgtgccgctgaggtggcccgcatccggaacagcttccagcccctgattgctgagggccctgagaccaagatctag

SEQ ID NO: 22014 - DNA, 450 bp, synthetic construct
  misc_feature 1..450: note = Description of Artificial Sequence: Synthetic coding sequence
  source 1..450: mol_type = other DNA
atggccagcagtgacatccaggtgaaggagctggagaagagggccagcggccaggcctttgagctgatcctgagccccaggagcaaggagagcgtgcctgagttccccctgagcccccccaagaagaaggacctgagcctggaggagatccagaagaagctggaggccgctgaggagaggaggaagagccatgaggccgaggtgctgaagcagctggccgagaagcgggagcacgagaaggaggtgctgcagaaggccatcgaggagaacaacaacttcagcaagatggccgaggagaagctgacccacaagatggaggccaacaaggagaaccgggaggcccagatggccgccaagctggagcggctgcgggagaaggacaagcacatcgaggaggtgaggaagaacaaggagagcaaggaccctgcagatgaaacagaggccgactag

SEQ ID NO: 22015 - DNA, 450 bp, synthetic construct; identical to SEQ ID NO: 22014
  misc_feature 1..450: note = Description of Artificial Sequence: Synthetic coding sequence
  source 1..450: mol_type = other DNA

SEQ ID NO: 22016 - DNA, 450 bp, synthetic construct; identical to SEQ ID NO: 22014
  misc_feature 1..450: note = Description of Artificial Sequence: Synthetic coding sequence
  source 1..450: mol_type = other DNA

SEQ ID NO: 22017 - DNA, 525 bp, synthetic construct
  misc_feature 1..525: note = Description of Artificial Sequence: Synthetic coding sequence
  source 1..525: mol_type = other DNA
atggccagcagtgacatccaggtgaaggagctggagaagagggccagcggccaggcctttgagctgatcctgagccccaggagcaaggagagcgtgcctgagttccccctgagcccccccaagaagaaggacctgagcctggaggagatccagaagaagctggaggccgctgaggagaggaggaagagccatgaggccgaggtgctgaagcagctggccgagaagcgggagcacgagaaggaggtgctgcagaaggccatcgaggagaacaacaacttcagcaagatggccgaggagaagctgacccacaagatggaggccaacaaggagaaccgggaggcccagatggccgccaagctggagcggctgcgggagaagatgtacttctggacccacggccctggggcccacccagcccagatctctgctgagcagagctgcctgcacagcgtgcctgccctgtgcccagccctgggcctgcagagcgccctgatcacctggagcgacctgagccaccaccactag

SEQ ID NO: 22018 - DNA, 261 bp, synthetic construct
  misc_feature 1..261: note = Description of Artificial Sequence: Synthetic coding sequence
  source 1..261: mol_type = other DNA
atggccagcagtgacatccaggtgaaggagctggagaagagggccagcggccaggcctttgagctgatcctgagccccaggagcaaggagagcgtgcctgagttccccctgagcccccccaagaagaaggacctgagcctggaggagatccagaagaagctggaggccgctgaggagaggaggaagagccatgaggccgaggtgctgaagcagctggccgagaagcgggagcacgagaaggaggtgctgcagaaggcctag

SEQ ID NO: 22019 - DNA, 450 bp, synthetic construct; identical to SEQ ID NO: 22014
  misc_feature 1..450: note = Description of Artificial Sequence: Synthetic coding sequence
  source 1..450: mol_type = other DNA

SEQ ID NO: 22020 - DNA, 3615 bp, synthetic construct
  misc_feature 1..3615: note = Description of Artificial Sequence: Synthetic coding sequence
  source 1..3615: mol_type = other DNA
atgtccttcttcaacttcaggaagatcttcaagctgggcagcgagaagaagaagaagcagtatgaacatgtgaagagggacctgaaccctgaggacttctgggagatcattggagagctgggagatggagccttcggcaaggtgtacaaggcccagaacaaggagacctctgtgctggccgccgccaaggtgattgacaccaagtctgaggaggagctggaggactacatggtggagattgacatcctggccagctgtgaccaccccaacatcgtgaagctgctggatgccttctactatgagaacaacctgtggatcctgattgagttctgtgccggcggcgctgtggatgctgtgatgctggagctggagcggcccctgacagagagccagatccaggtggtgtgcaagcagaccctggatgccctgaactacctgcatgacaacaagatcatccaccgggacctgaaggccggcaacatcctcttcaccctggatggagacatcaagctggccgactttggagtgtctgccaagaacaccaggaccatccagaggcgggacagcttcatcggcaccccctactggatggcccctgaggtggtgatgtgtgagaccagcaaggaccggccctatgactacaaggcagatgtgtggagcctgggcatcaccctcatcgagatggccgagattgagcccccccaccacgagctgaaccccatgagggtgctgctgaagatcgccaagtctgagccccccaccctggcccagcccagccgctggagcagcaacttcaaggacttcctgaagaagtgcctggagaagaatgtggatgcccgctggaccaccagccagctgctgcagcacccctttgtgacagtggacagcaacaagcccatccgggagctgattgctgaggccaaggccgaggtgacagaggaggtggaggatggcaaggaggaggatgaggaggaggagacagagaacagcctgcccatcccagccagcaagagggccagcagtgacctgagcatcgccagcagcgaggaggacaagctgagccagaatgcctgcatcctggagagcgtgtctgagaagacagagaggagcaacagcgaggacaagctgaacagcaagatcctgaatgagaagcccaccacagatgagcctgagaaggctgtggaggacatcaatgagcacatcacagatgcccagctggaggccatgacagagctgcatgacagaacagctgtgatcaaggaaaatgaaagagagaagaggcccaagctggagaacctgcctgacacagaggaccaggagaccgtggacatcaacagcgtgtctgagggcaaggagaacaacatcatgatcaccctggagaccaacatcgagcacaacctgaagtctgaggaggagaaggaccaggagaagcagcagatgtttgagaacaagctgatcaagtctgaggagatcaaggacaccatcctgcagacagtggacctggtgtcccaggagaccggggagaaggaggccaacatccaggccgtggacagcgaggtgggcctgaccaaggaggacacccaggagaagctgggagaagatgacaagacccagaaggatgtgatcagcaacaccagtgatgtgattggcacctgtgaggccgcagatgtggcccagaaggtggatgaagattctgctgaggacacccagagcaatgatggcaaggaggtggtggaggtgggccagaagctgatcaacaagcccatggtgggccctgaggccggcggcaccaaggaggtgcccatcaaggagatcgtggagatgaatgaaattgaggagggcaagaacaaggagcaggccatcaacagcagcgagaacatcatggacatcaatgaggagcccggcaccacagaaggagaggagatcacagagagcagcagcacagaggagatggaggtgcgctctgtggtggccgacacagaccagaaggccctgggcagcgaggtgcaggatgccagcaaggtgaccacccagattgacaaggagaagaaggagatccctgtgtccatcaagaaggagcctgaggtgacagtggtgtcccagcccacagagccccagcctgtgctgatccccagcatcaacatcaacagcgacagcggggagaacaaggaggagatcggcagcctgagcaagacagagaccatcctgcccccagagagcgagaaccccaaggaaaatgacaatgacagcggcaccggcagcacagctgacaccagcagcattgacctgaacctgagcatcagcagcttcctgagcaagaccaaggacagcggcagcatcagcctgcaggagacccggcggcagaagaagaccctgaagaagaccaggaagttcatcgtggatggagtggaggtgtctgtgaccaccagcaagatcgtgacagacagcgacagcaagacagaggagctgcgcttcctgcggcggcaggagctgcgggagctgcgcttcctgcagaaggaggagcagagggcccagcagcagctgaacagcaagctgcagcagcagcgggagcagatcttcagaagatttgagcaggagatgatgagcaagaagaggcagtatgaccaggagattgagaacctggagaagcagcagaagcagaccatcgagcggctggagcaggagcacaccaaccggctgagagatgaggccaagaggatcaagggggagcaggagaaggagctgagcaagttccagaacatgctgaagaacaggaagaaggaggagcaggagtttgtgcagaagcagcagcaggagctggatggcagcctgaagaagatcatccagcagcagaaggccgagctggccaacatcgagagagaatgtctgaacaacaagcagcagctgatgagggcccgggaggccgccatctgggagctggaggagcggcacctgcaggagaagcaccagctgctgaagcagcagctgaaggaccagtacttcatgcagaggcaccagctgctgaagagacatgagaaggagacagagcagatgcagcgctacaaccagaggctcatcgaggagctgaagaaccggcagacccaggagcgggcccggctgcccaagatccagaggtctgaggccaagaccaggatggccatgttcaagaagagcctgcgcatcaacagcacagccaccccagaccaggaccgggacaagatcaagcagtttgctgcccaggaggagaagaggcagaagaatgaaagaatggcccagcaccagaagcatgagaaccagatgagggacctgcagctgcagtgtgaggccaacgtgcgggagctgcaccagctgcagaatgagaagtgccacctgctggtggagcacgagacccagaagctgaaggagctggatgaggagcacagccaggagctgaaggagtggagggagaagctgcggcccaggaagaagaccctggaggaggagtttgccaggaagctgcaggagcaggaggtgttcttcaagatgaccggggagagcgagtgcctgaaccccagcacccagagccgcatcagcaagttctaccccatccccagcctgcacagcacaggcagctag

SEQ ID NO: 22021 - DNA, 3708 bp, synthetic construct
  misc_feature 1..3708: note = Description of Artificial Sequence: Synthetic coding sequence
  source 1..3708: mol_type = other DNA
atgtccttcttcaacttcaggaagatcttcaagctgggcagcgagaagaagaagaagcagtatgaacatgtgaagagggacctgaaccctgaggacttctgggagatcattggagagctgggagatggagccttcggcaaggtgtacaaggcccagaacaaggagacctctgtgctggccgccgccaaggtgattgacaccaagtctgaggaggagctggaggactacatggtggagattgacatcctggccagctgtgaccaccccaacatcgtgaagctgctggatgccttctactatgagaacaacctgtggatcctgattgagttctgtgccggcggcgctgtggatgctgtgatgctggagctggagcggcccctgacagagagccagatccaggtggtgtgcaagcagaccctggatgccctgaactacctgcatgacaacaagatcatccaccgggacctgaaggccggcaacatcctcttcaccctggatggagacatcaagctggccgactttggagtgtctgccaagaacaccaggaccatccagaggcgggacagcttcatcggcaccccctactggatggcccctgaggtggtgatgtgtgagaccagcaaggaccggccctatgactacaaggcagatgtgtggagcctgggcatcaccctcatcgagatggccgagattgagcccccccaccacgagctgaaccccatgagggtgctgctgaagatcgccaagtctgagccccccaccctggcccagcccagccgctggagcagcaacttcaaggacttcctgaagaagtgcctggagaagaatgtggatgcccgctggaccaccagccagctgctgcagcacccctttgtgacagtggacagcaacaagcccatccgggagctgattgctgaggccaaggccgaggtgacagaggaggtggaggatggcaaggaggaggatgaggaggaggagacagagaacagcctgcccatcccagccagcaagagggccagcagtgacctgagcatcgccagcagcgaggaggacaagctgagccagaatgcctgcatcctggagagcgtgtctgagaagacagagaggagcaacagcgaggacaagctgaacagcaagatcctgaatgagaagcccaccacagatgagcctgagaaggctgtggaggacatcaatgagcacatcacagatgcccagctggaggccatgacagagctgcatgacagaacagctgtgatcaaggaaaatgaaagagagaagaggcccaagctggagaacctgcctgacacagaggaccaggagaccgtggacatcaacagcgtgtctgagggcaaggagaacaacatcatgatcaccctggagaccaacatcgagcacaacctgaagtctgaggaggagaaggaccaggagaagcagcagatgtttgagaacaagctgatcaagtctgaggagatcaaggacaccatcctgcagacagtggacctggtgtcccaggagaccggggagaaggaggccaacatccaggccgtggacagcgaggtgggcctgaccaaggaggacacccaggagaagctgggagaagatgacaagacccagaaggatgtgatcagcaacaccagtgatgtgattggcacctgtgaggccgcagatgtggcccagaaggtggatgaagattctgctgaggacacccagagcaatgatggcaaggaggtggtggaggtgggccagaagctgatcaacaagcccatggtgggccctgaggccggcggcaccaaggaggtgcccatcaaggagatcgtggagatgaatgaaattgaggagggcaagaacaaggagcaggccatcaacagcagcgagaacatcatggacatcaatgaggagcccggcaccacagaaggagaggagatcacagagagcagcagcacagaggagatggaggtgcgctctgtggtggccgacacagaccagaaggccctgggcagcgaggtgcaggatgccagcaaggtgaccacccagattgacaaggagaagaaggagatccctgtgtccatcaagaaggagcctgaggtgacagtggtgtcccagcccacagagccccagcctgtgctgatccccagcatcaacatcaacagcgacagcggggagaacaaggaggagatcggcagcctgagcaagacagagaccatcctgcccccagagagcgagaaccccaaggaaaatgacaatgacagcggcaccggcagcacagctgacaccagcagcattgacctgaacctgagcatcagcagcttcctgagcaagaccaaggacagcggcagcatcagcctgcaggagacccggcggcagaagaagaccctgaagaagaccaggaagttcatcgtggatggagtggaggtgtctgtgaccaccagcaagatcgtgacagacagcgacagcaagacagaggagctgcgcttcctgcggcggcaggagctgcgggagctgcgcttcctgcagaaggaggagcagagggcccagcagcagctgaacagcaagctgcagcagcagcgggagcagatcttcagaagatttgagcaggagatgatgagcaagaagaggcagtatgaccaggagattgagaacctggagaagcagcagaagcagaccatcgagcggctggagcaggagcacaccaaccggctgagagatgaggccaagaggatcaagggggagcaggagaaggagctgagcaagttccagaacatgctgaagaacaggaagaaggaggtgatcaatgaggtggagaaggcccccaaggagctgaggaaggagctgatgaagaggaggaaggaggagctggcccagagccagcacgcccaggagcaggagtttgtgcagaagcagcagcaggagctggatggcagcctgaagaagatcatccagcagcagaaggccgagctggccaacatcgagcgggagtgcctgaacaacaagcagcagctgatgagggcccgggaggccgccatctgggagctggaggagcggcacctgcaggagaagcaccagctgctgaagcagcagctgaaggaccagtacttcatgcagaggcaccagctgctgaagagacatgagaaggagacagagcagatgcagcgctacaaccagaggctgattgaggagctgaagaaccggcagacccaggagcgggcccggctgcccaagatccagaggtctgaggccaagaccaggatggccatgttcaagaagagcctgcgcatcaacagcacagccaccccagaccaggaccgggacaagatcaagcagtttgctgcccaggaggagaagaggcagaagaatgaaagaatggcccagcaccagaagcatgagaaccagatgagggacctgcagctgcagtgtgaggccaacgtgcgggagctgcaccagctgcagaatgagaagtgccacctgctggtggagcacgagacccagaagctgaaggagctggatgaggagcacagccaggagctgaaggagtggagggagaagctgcggcccaggaagaagaccctggaggaggagtttgccaggaagctgcaggagcaggaggtgttcttcaagatgactggagagagtgaatgtctgaaccccagcacccagagccgcatcagcaagttctaccccatccccagcctgcacagcacaggcagctag

SEQ ID NO: 22022 - DNA, 3444 bp, synthetic construct
  misc_feature 1..3444: note = Description of Artificial Sequence: Synthetic coding sequence
  source 1..3444: mol_type = other DNA
atggatgagccccccttcagcgaggccgccctggagcaggccctgggggagccctgtgacctggatgctgccctgctgacagacatcgaggacatgctgcagctgatcaacaaccaggacagcgacttccctggcctgtttgatcctccctatgccggcagcggggccggcggcacagatcctgccagcccagacaccagcagccctggcagcctgagccccccaccagccaccctgagcagcagcctggaggccttcctgagcggcccccaggccgcccccagccccctgagccccccccagcctgcccccacccccctgaagatgtaccccagcatgcctgccttcagccctggccctggcatcaaggaggagagcgtgcccctgagcatcctgcagacccccaccccccagcccctgcccggggccctgctgccccagagcttccctgccccagccccaccccagttcagcagcacccctgtgctgggctaccccagccccccaggcggcttcagcacaggcagccccccaggcaacacccagcagcccctgcccggcctgcccctggccagccccccaggagtgccccctgtgtccctgcacacccaggtgcagagcgtggtgccccagcagctgctgactgtgacagctgcccccacagctgcccctgtgaccaccaccgtgaccagccagatccagcaggtgcctgtgctgctgcagccccacttcatcaaggctgacagcctgctgctgacagccatgaagacagatggagccaccgtgaaggctgctggcctgagccccctggtgtctggcaccaccgtgcagacaggccccctgcccaccctggtgtctgggggcaccatcctggccaccgtgcccctggtggtggatgctgagaagctgcccatcaaccggctggccgccggcagcaaggccccagccagcgcccagagcagaggagagaagaggacagcccacaatgccatcgagaagcgctaccgcagcagcatcaatgacaagatcatcgagctgaaggacctggtggtgggcacagaggccaagctgaacaagtctgctgtgctgaggaaggccatcgactacatccgcttcctgcagcacagcaaccagaagctgaagcaggagaacctgagcctgaggacagctgtgcacaagagcaagagcctgaaggacctggtgtctgcctgtggcagcggcggcaacacagatgtgctgatggagggcgtgaagacagaggtggaggacaccctgaccccaccacccagtgatgctggcagccccttccagagcagccccctgagcctgggcagccggggcagcggcagcggcggcagcggcagtgacagcgagccagacagccctgtgtttgaggacagcaaggccaagccagagcagaggcccagcctgcacagccggggcatgctggacaggagccggctggccctgtgcaccctggtgttcctgtgcctgagctgcaaccccctggccagcctgctgggcgcccggggcctgcccagccccagcgacaccacctctgtgtaccacagccctggaagaaatgtgctgggcacagagagcagagatggccctggctgggcccagtggctgctgccccctgtggtgtggctgctgaatggcctgctggtgctggtgtccctggtgctgctgtttgtgtatggagagcctgtgacccggccccacagcggccctgctgtgtacttctggaggcacaggaagcaggccgacctggacctggcccggggggactttgcccaggccgcccagcagctgtggctggccctgcgggccctgggccggcccctgcccaccagccacctggacctggcctgcagcctgctgtggaacctgatccgccacctgctgcagaggctgtgggtgggccgctggctggccggccgggccggcggcctgcagcaggactgtgccctgcgggtggatgccagcgccagcgccagagatgctgccctggtgtaccacaagctgcaccagctgcacaccatgggcaagcacactggaggccacctgacagccaccaacctggccctgagcgccctgaacctggccgagtgtgctggagatgctgtgtctgtggccaccctggccgagatctacgtggccgccgccctgcgggtgaagaccagcctgccccgggccctgcacttcctgacccgcttcttcctgagcagcgcccggcaggcctgcctggcccagagcggctctgtgcccccagccatgcagtggctgtgccaccctgtgggccaccgcttctttgtggatggagactggagcgtgctgagcaccccctgggagagcctgtacagcctggccggcaaccctgtggaccccctggcccaggtgacccagctgttccgggagcacctgctggagcgggccctgaactgtgtgacccagcccaaccccagccctggcagcgcagatggagacaaggagttcagtgatgccctgggctacctgcagctgctgaacagctgcagtgatgctgctggggccccagcctacagcttcagcatcagcagctccatggccaccaccactggagtggaccctgtggccaagtggtgggccagcctgacagctgtggtgatccactggctgcggagagatgaggaggccgctgagcggctgtgccccctggtggagcacctgccccgggtgctgcaggagagcgagcggcccctgccccgggccgccctgcacagcttcaaggccgcccgggccctgctgggctgtgccaaggccgagagcggccctgccagcctgaccatctgtgagaaggccagcggctacctgcaggacagcctggccaccaccccagccagcagcagcattgacaaggctgtgcagctgttcctgtgtgacctgctgctggtggtgaggaccagcctgtggaggcagcagcagcccccagccccagccccagctgcccagggcaccagcagccggccccaggccagcgccctggagctgcggggcttccagagggacctgagcagcctgcggcggctggcccagagcttccggcctgccatgagaagagtcttcctgcacgaggccacagcccggctgatggccggggccagccccaccaggacccaccagctgctggacaggagcctgcggaggagagctggccctgggggcaagggcggcgctgtggccgagctggagccccggcccacccggcgggagcacgccgaggccctgctgctggccagctgctacctgcccccaggcttcctgagcgcccctggccagagggtgggcatgctggccgaggccgcccggaccctggagaagctgggggaccggcggctgctgcatgactgccagcagatgctgatgaggctgggcggcggcaccaccgtgaccagcagctag

SEQ ID NO: 22023 - DNA, 3216 bp, synthetic construct
  misc_feature 1..3216: note = Description of Artificial Sequence: Synthetic coding sequence
  source 1..3216: mol_type = other DNA
atggatgagccccccttcagcgaggccgccctggagcaggccctgggggagccctgtgacctggatgctgccctgctgacagacatcgaggacatgctgcagctgatcaacaaccaggacagcgacttccctggcctgtttgatcctccctatgccggcagcggggccggcggcacagatcctgccagcccagacaccagcagccctggcagcctgagccccccaccagccaccctgagcagcagcctggaggccttcctgagcggcccccaggccgcccccagccccctgagccccccccagcctgcccccacccccctgaagatgtaccccagcatgcctgccttcagccctggccctggcatcaaggaggagagcgtgcccctgagcatcctgcagacccccaccccccagcccctgcccggggccctgctgccccagagcttccctgccccagccccaccccagttcagcagcacccctgtgctgggctaccccagccccccaggcggcttcagcacaggcagccccccaggcaacacccagcagcccctgcccggcctgcccctggccagccccccaggagtgccccctgtgtccctgcacacccaggtgcagagcgtggtgccccagcagctgctgactgtgacagctgcccccacagctgcccctgtgaccaccaccgtgaccagccagatccagcaggtgcctgtgctgctgcagccccacttcatcaaggctgacagcctgctgctgacagccatgaagacagatggagccaccgtgaaggctgctggcctgagccccctggtgtctggcaccaccgtgcagacaggccccctgcccaccctggtgtctgggggcaccatcctggccaccgtgcccctggtggtggatgctgagaagctgcccatcaaccggctggccgccggcagcaaggccccagccagcgcccagagcagaggagagaagaggacagcccacaatgccatcgagaagcgctaccgcagcagcatcaatgacaagatcatcgagctgaaggacctggtggtgggcacagaggccaagctgaacaagtctgctgtgctgaggaaggccatcgactacatccgcttcctgcagcacagcaaccagaagctgaagcaggagaacctgagcctgaggacagctgtgcacaagagcaagagcctgaaggacctggtgtctgcctgtggcagcggcggcaacacagatgtgctgatggagggcgtgaagacagaggtggaggacaccctgaccccaccacccagtgatgctggcagccccttccagagcagccccctgagcctgggcagccggggcagcggcagcggcggcagcggcagtgacagcgagccagacagccctgtgtttgaggacagcaaggccaagccagagcagaggcccagcctgcacagccggggcatgctggacaggagccggctggccctgtgcaccctggtgttcctgtgcctgagctgcaaccccctggccagcctgctgggcgcccggggcctgcccagccccagcgacaccacctctgtgtaccacagccctggaagaaatgtgctgggcacagagagcagagatggccctggctgggcccagtggctgctgccccctgtggtgtggctgctgaatggcctgctggtgctggtgtccctggtgctgctgtttgtgtatggagagcctgtgacccggccccacagcggccctgctgtgtacttctggaggcacaggaagcaggccgacctggacctggcccggggggactttgcccaggccgcccagcagctgtggctggccctgcgggccctgggccggcccctgcccaccagccacctggacctggcctgcagcctgctgtggaacctgatccgccacctgctgcagaggctgtgggtgggccgctggctggccggccgggccggcggcctgcagcaggactgtgccctgcgggtggatgccagcgccagcgccagagatgctgccctggtgtaccacaagctgcaccagctgcacaccatgggcaagcacactggaggccacctgacagccaccaacctggccctgagcgccctgaacctggccgagtgtgctggagatgctgtgtctgtggccaccctggccgagatctacgtggccgccgccctgcgggtgaagaccagcctgccccgggccctgcacttcctgacccgcttcttcctgagcagcgcccggcaggcctgcctggcccagagcggctctgtgcccccagccatgcagtggctgtgccaccctgtgggccaccgcttctttgtggatggagactggagcgtgctgagcaccccctgggagagcctgtacagcctggccggcaaccctgtggaccccctggcccaggtgacccagctgttccgggagcacctgctggagcgggccctgaactgtgtgacccagcccaaccccagccctggcagcgcagatggagacaaggagttcagtgatgccctgggctacctgcagctgctgaacagctgcagtgatgctgctggggccccagcctacagcttcagcatcagcagctccatggccaccaccactggagtggaccctgtggccaagtggtgggccagcctgacagctgtggtgatccactggctgcggagagatgaggaggccgctgagcggctgtgccccctggtggagcacctgccccgggtgctgcaggagagcgagcggcccctgccccgggccgccctgcacagcttcaaggccgcccgggccctgctgggctgtgccaaggccgagagcggccctgccagcctgaccatctgtgagaaggccagcggctacctgcaggacagcctggccaccaccccagccagcagcagcattgacaaggctgtgcagctgttcctgtgtgacctgctgctggtggtgaggaccagcctgtggaggcagcagcagcccccagccccagccccagctgcccagggcaccagcagccggccccaggccagcgccctggagctgcggggcttccagagggacctgagcagcctgcggcggctggcccagagcttccggcctgccatgaggcggctgatggatgtgctgaccagcgagagcgcctgggccctgccccagcacctgggcaagggcttccccagccccagcggccacaaggtgcccggctggcacggccgcatggactag

SEQ ID NO: 22024 - DNA, 3534 bp, synthetic construct
  misc_feature 1..3534: note = Description of Artificial Sequence: Synthetic coding sequence
  source 1..3534: mol_type = other DNA
atggatgagccccccttcagcgaggccgccctggagcaggccctgggggagccctgtgacctggatgctgccctgctgacagacattgaaggagaggtgggcgccggccggggccgggccaacggcctggatgccccccgggccggggctgacagaggagccatggactgcacctttgaggacatgctgcagctgatcaacaaccaggacagcgacttccctggcctgtttgatcctccctatgccggcagcggggccggcggcacagatcctgccagcccagacaccagcagccctggcagcctgagccccccaccagccaccctgagcagcagcctggaggccttcctgagcggcccccaggccgcccccagccccctgagccccccccagcctgcccccacccccctgaagatgtaccccagcatgcctgccttcagccctggccctggcatcaaggaggagagcgtgcccctgagcatcctgcagacccccaccccccagcccctgcccggggccctgctgccccagagcttccctgccccagccccaccccagttcagcagcacccctgtgctgggctaccccagccccccaggcggcttcagcacaggcagccccccaggcaacacccagcagcccctgcccggcctgcccctggccagccccccaggagtgccccctgtgtccctgcacacccaggtgcagagcgtggtgccccagcagctgctgactgtgacagctgcccccacagctgcccctgtgaccaccaccgtgaccagccagatccagcaggtgcctgtgctgctgcagccccacttcatcaaggctgacagcctgctgctgacagccatgaagacagatggagccaccgtgaaggctgctggcctgagccccctggtgtctggcaccaccgtgcagacaggccccctgcccaccctggtgtctgggggcaccatcctggccaccgtgcccctggtggtggatgctgagaagctgcccatcaaccggctggccgccggcagcaaggccccagccagcgcccagagcagaggagagaagaggacagcccacaatgccatcgagaagcgctaccgcagcagcatcaatgacaagatcatcgagctgaaggacctggtggtgggcacagaggccaagctgaacaagtctgctgtgctgaggaaggccatcgactacatccgcttcctgcagcacagcaaccagaagctgaagcaggagaacctgagcctgaggacagctgtgcacaagagcaagagcctgaaggacctggtgtctgcctgtggcagcggcggcaacacagatgtgctgatggagggcgtgaagacagaggtggaggacaccctgaccccaccacccagtgatgctggcagccccttccagagcagccccctgagcctgggcagccggggcagcggcagcggcggcagcggcagtgacagcgagccagacagccctgtgtttgaggacagcaaggccaagccagagcagaggcccagcctgcacagccggggcatgctggacaggagccggctggccctgtgcaccctggtgttcctgtgcctgagctgcaaccccctggccagcctgctgggcgcccggggcctgcccagccccagcgacaccacctctgtgtaccacagccctggaagaaatgtgctgggcacagagagcagagatggccctggctgggcccagtggctgctgccccctgtggtgtggctgctgaatggcctgctggtgctggtgtccctggtgctgctgtttgtgtatggagagcctgtgacccggccccacagcggccctgctgtgtacttctggaggcacaggaagcaggccgacctggacctggcccggggggactttgcccaggccgcccagcagctgtggctggccctgcgggccctgggccggcccctgcccaccagccacctggacctggcctgcagcctgctgtggaacctgatccgccacctgctgcagaggctgtgggtgggccgctggctggccggccgggccggcggcctgcagcaggactgtgccctgcgggtggatgccagcgccagcgccagagatgctgccctggtgtaccacaagctgcaccagctgcacaccatgggcaagcacactggaggccacctgacagccaccaacctggccctgagcgccctgaacctggccgagtgtgctggagatgctgtgtctgtggccaccctggccgagatctacgtggccgccgccctgcgggtgaagaccagcctgccccgggccctgcacttcctgacccgcttcttcctgagcagcgcccggcaggcctgcctggcccagagcggctctgtgcccccagccatgcagtggctgtgccaccctgtgggccaccgcttctttgtggatggagactggagcgtgctgagcaccccctgggagagcctgtacagcctggccggcaaccctgtggaccccctggcccaggtgacccagctgttccgggagcacctgctggagcgggccctgaactgtgtgacccagcccaaccccagccctggcagcgcagatggagacaaggagttcagtgatgccctgggctacctgcagctgctgaacagctgcagtgatgctgctggggccccagcctacagcttcagcatcagcagctccatggccaccaccactggagtggaccctgtggccaagtggtgggccagcctgacagctgtggtgatccactggctgcggagagatgaggaggccgctgagcggctgtgccccctggtggagcacctgccccgggtgctgcaggagagcgagcggcccctgccccgggccgccctgcacagcttcaaggccgcccgggccctgctgggctgtgccaaggccgagagcggccctgccagcctgaccatctgtgagaaggccagcggctacctgcaggacagcctggccaccaccccagccagcagcagcattgacaaggctgtgcagctgttcctgtgtgacctgctgctggtggtgaggaccagcctgtggaggcagcagcagcccccagccccagccccagctgcccagggcaccagcagccggccccaggccagcgccctggagctgcggggcttccagagggacctgagcagcctgcggcggctggcccagagcttccggcctgccatgagaagagtcttcctgcacgaggccacagcccggctgatggccggggccagccccaccaggacccaccagctgctggacaggagcctgcggaggagagctggccctgggggcaagggcggcgctgtggccgagctggagccccggcccacccggcgggagcacgccgaggccctgctgctggccagctgctacctgcccccaggcttcctgagcgcccctggccagagggtgggcatgctggccgaggccgcccggaccctggagaagctgggggaccggcggctgctgcatgactgccagcagatgctgatgaggctgggcggcggcaccaccgtgaccagcagctag

SEQ ID NO: 22025 - DNA, 3468 bp, synthetic construct
  misc_feature 1..3468: note = Description of Artificial Sequence: Synthetic coding sequence
  source 1..3468: mol_type = other DNA
tgaaaaatccggcgggccctgaccggggaggtgggcgccggccggggccgggccaacggcctggatgccccccgggccggggctgacagaggagccatggactgcacctttgaggacatgctgcagctgatcaacaaccaggacagcgacttccctggcctgtttgatcctccctatgccggcagcggggccggcggcacagatcctgccagcccagacaccagcagccctggcagcctgagccccccaccagccaccctgagcagcagcctggaggccttcctgagcggcccccaggccgcccccagccccctgagccccccccagcctgcccccacccccctgaagatgtaccccagcatgcctgccttcagccctggccctggcatcaaggaggagagcgtgcccctgagcatcctgcagacccccaccccccagcccctgcccggggccctgctgccccagagcttccctgccccagccccaccccagttcagcagcacccctgtgctgggctaccccagccccccaggcggcttcagcacaggcagccccccaggcaacacccagcagcccctgcccggcctgcccctggccagccccccaggagtgccccctgtgtccctgcacacccaggtgcagagcgtggtgccccagcagctgctgactgtgacagctgcccccacagctgcccctgtgaccaccaccgtgaccagccagatccagcaggtgcctgtgctgctgcagccccacttcatcaaggctgacagcctgctgctgacagccatgaagacagatggagccaccgtgaaggctgctggcctgagccccctggtgtctggcaccaccgtgcagacaggccccctgcccaccctggtgtctgggggcaccatcctggccaccgtgcccctggtggtggatgctgagaagctgcccatcaaccggctggccgccggcagcaaggccccagccagcgcccagagcagaggagagaagaggacagcccacaatgccatcgagaagcgctaccgcagcagcatcaatgacaagatcatcgagctgaaggacctggtggtgggcacagaggccaagctgaacaagtctgctgtgctgaggaaggccatcgactacatccgcttcctgcagcacagcaaccagaagctgaagcaggagaacctgagcctgaggacagctgtgcacaagagcaagagcctgaaggacctggtgtctgcctgtggcagcggcggcaacacagatgtgctgatggagggcgtgaagacagaggtggaggacaccctgaccccaccacccagtgatgctggcagccccttccagagcagccccctgagcctgggcagccggggcagcggcagcggcggcagcggcagtgacagcgagccagacagccctgtgtttgaggacagcaaggccaagccagagcagaggcccagcctgcacagccggggcatgctggacaggagccggctggccctgtgcaccctggtgttcctgtgcctgagctgcaaccccctggccagcctgctgggcgcccggggcctgcccagccccagcgacaccacctctgtgtaccacagccctggaagaaatgtgctgggcacagagagcagagatggccctggctgggcccagtggctgctgccccctgtggtgtggctgctgaatggcctgctggtgctggtgtccctggtgctgctgtttgtgtatggagagcctgtgacccggccccacagcggccctgctgtgtacttctggaggcacaggaagcaggccgacctggacctggcccggggggactttgcccaggccgcccagcagctgtggctggccctgcgggccctgggccggcccctgcccaccagccacctggacctggcctgcagcctgctgtggaacctgatccgccacctgctgcagaggctgtgggtgggccgctggctggccggccgggccggcggcctgcagcaggactgtgccctgcgggtggatgccagcgccagcgccagagatgctgccctggtgtaccacaagctgcaccagctgcacaccatgggcaagcacactggaggccacctgacagccaccaacctggccctgagcgccctgaacctggccgagtgtgctggagatgctgtgtctgtggccaccctggccgagatctacgtggccgccgccctgcgggtgaagaccagcctgccccgggccctgcacttcctgacccgcttcttcctgagcagcgcccggcaggcctgcctggcccagagcggctctgtgcccccagccatgcagtggctgtgccaccctgtgggccaccgcttctttgtggatggagactggagcgtgctgagcaccccctgggagagcctgtacagcctggccggcaaccctgtggaccccctggcccaggtgacccagctgttccgggagcacctgctggagcgggccctgaactgtgtgacccagcccaaccccagccctggcagcgcagatggagacaaggagttcagtgatgccctgggctacctgcagctgctgaacagctgcagtgatgctgctggggccccagcctacagcttcagcatcagcagctccatggccaccaccactggagtggaccctgtggccaagtggtgggccagcctgacagctgtggtgatccactggctgcggagagatgaggaggccgctgagcggctgtgccccctggtggagcacctgccccgggtgctgcaggagagcgagcggcccctgccccgggccgccctgcacagcttcaaggccgcccgggccctgctgggctgtgccaaggccgagagcggccctgccagcctgaccatctgtgagaaggccagcggctacctgcaggacagcctggccaccaccccagccagcagcagcattgacaaggctgtgcagctgttcctgtgtgacctgctgctggtggtgaggaccagcctgtggaggcagcagcagcccccagccccagccccagctgcccagggcaccagcagccggccccaggccagcgccctggagctgcggggcttccagagggacctgagcagcctgcggcggctggcccagagcttccggcctgccatgagaagagtcttcctgcacgaggccacagcccggctgatggccggggccagccccaccaggacccaccagctgctggacaggagcctgcggaggagagctggccctgggggcaagggcggcgctgtggccgagctggagccccggcccacccggcgggagcacgccgaggccctgctgctggccagctgctacctgcccccaggcttcctgagcgcccctggccagagggtgggcatgctggccgaggccgcccggaccctggagaagctgggggaccggcggctgctgcatgactgccagcagatgctgatgaggctgggcggcggcaccaccgtgaccagcagctag

SEQ ID NO: 22026 - DNA, 2301 bp, synthetic construct
  misc_feature 1..2301: note = Description of Artificial Sequence: Synthetic coding sequence
  source 1..2301: mol_type = other DNA
atgctggcccacctgagccgggccgccccctgccccctggccgccggggctgtggccgctgtggccgtggccgtgaccaggagcctgacagcccagagcctgaggacagcccggctgggccctgccaccgtgccccccagccccctgcctgccatcagcagcgagccccatgaccgggccggcaagaccctgacagaccccaccagccacttcatcgaccgcatcacagaggcctggagccacgtgggcagccacagcaaggccaagccagagcagaggcccagcctgcacagccggggcatgctggacaggagccggctggccctgtgcaccctggtgttcctgtgcctgagctgcaaccccctggccagcctgctgggcgcccggggcctgcccagccccagcgacaccacctctgtgtaccacagccctggaagaaatgtgctgggcacagagagcagagatggccctggctgggcccagtggctgctgccccctgtggtgtggctgctgaatggcctgctggtgctggtgtccctggtgctgctgtttgtgtatggagagcctgtgacccggccccacagcggccctgctgtgtacttctggaggcacaggaagcaggccgacctggacctggcccggggggactttgcccaggccgcccagcagctgtggctggccctgcgggccctgggccggcccctgcccaccagccacctggacctggcctgcagcctgctgtggaacctgatccgccacctgctgcagaggctgtgggtgggccgctggctggccggccgggccggcggcctgcagcaggactgtgccctgcgggtggatgccagcgccagcgccagagatgctgccctggtgtaccacaagctgcaccagctgcacaccatgggcaagcacactggaggccacctgacagccaccaacctggccctgagcgccctgaacctggctgaatgtgctggagatgctgtgtctgtggccaccctggccgagatctacgtggccgccgccctgcgggtgaagaccagcctgccccgggccctgcacttcctgacccgcttcttcctgagcagcgcccggcaggcctgcctggcccagagcggctctgtgcccccagccatgcagtggctgtgccaccctgtgggccaccgcttctttgtggatggagactggagcgtgctgagcaccccctgggagagcctgtacagcctggccggcaaccctgtggaccccctggcccaggtgacccagctgttccgggagcacctgctggagcgggccctgaactgtgtgacccagcccaaccccagccctggcagcgcagatggagacaaggagttcagtgatgccctgggctacctgcagctgctgaacagctgcagtgatgctgctggggccccagcctacagcttcagcatcagcagctccatggccaccaccaccggggtggaccctgtggccaagtggtgggccagcctgacagctgtggtgatccactggctgcggagagatgaggaggccgctgagcggctgtgccccctggtggagcacctgccccgggtgctgcaggagagcgagcggcccctgcccagggctgccctgcacagcttcaaggccgcccgggccctgctgggctgtgccaaggccgagagcggccctgccagcctgaccatctgtgagaaggccagcggctacctgcaggacagcctggccaccaccccagccagcagcagcattgacaaggctgtgcagctgttcctgtgtgacctgctgctggtggtgaggaccagcctgtggaggcagcagcagcccccagccccagccccagctgcccagggcaccagcagccggccccaggccagcgccctggagctgcggggcttccagagggacctgagcagcctgcggcggctggcccagagcttccggcctgccatgagaagagtcttcctgcacgaggccacagcccggctgatggccggggccagccccaccaggacccaccagctgctggacaggagcctgcggcggcgggccggccctgggggcaaaggaggagctgtggccgagctggagccccggcccacccggcgggagcacgccgaggccctgctgctggccagctgctacctgcccccaggcttcctgagcgcccctggccagagggtgggcatgctggccgaggccgcccggaccctggagaagctgggggaccggcggctgctgcatgactgccagcagatgctgatgaggctgggcggcggcaccaccgtgaccagcagctag

SEQ ID NO: 22027 - DNA, 2682 bp, synthetic construct
  misc_feature 1..2682: note = Description of Artificial Sequence: Synthetic coding sequence
  source 1..2682: mol_type = other DNA
atgaagacagatggagccaccgtgaaggctgctggcctgagccccctggtgtctggcaccaccgtgcagacaggccccctgcccaccctggtgtctgggggcaccatcctggccaccgtgcccctggtggtggatgctgagaagctgcccatcaaccggctggccgccggcagcaaggccccagccagcgcccagagcagaggagagaagaggacagcccacaatgccatcgagaagcgctaccgcagcagcatcaatgacaagatcatcgagctgaaggacctggtggtgggcacagaggccaagctgaacaagtctgctgtgctgaggaaggccatcgactacatccgcttcctgcagcacagcaaccagaagctgaagcaggagaacctgagcctgaggacagctgtgcacaagagcaagagcctgaaggacctggtgtctgcctgtggcagcggcggcaacacagatgtgctgatggagggcgtgaagacagaggtggaggacaccctgaccccaccacccagtgatgctggcagccccttccagagcagccccctgagcctgggcagccggggcagcggcagcggcggcagcggcagtgacagcgagccagacagccctgtgtttgaggacagcaaggccaagccagagcagaggcccagcctgcacagccggggcatgctggacaggagccggctggccctgtgcaccctggtgttcctgtgcctgagctgcaaccccctggccagcctgctgggcgcccggggcctgcccagccccagcgacaccacctctgtgtaccacagccctggaagaaatgtgctgggcacagagagcagagatggccctggctgggcccagtggctgctgccccctgtggtgtggctgctgaatggcctgctggtgctggtgtccctggtgctgctgtttgtgtatggagagcctgtgacccggccccacagcggccctgctgtgtacttctggaggcacaggaagcaggccgacctggacctggcccggggggactttgcccaggccgcccagcagctgtggctggccctgcgggccctgggccggcccctgcccaccagccacctggacctggcctgcagcctgctgtggaacctgatccgccacctgctgcagaggctgtgggtgggccgctggctggccggccgggccggcggcctgcagcaggactgtgccctgcgggtggatgccagcgccagcgccagagatgctgccctggtgtaccacaagctgcaccagctgcacaccatgggcaagcacactggaggccacctgacagccaccaacctggccctgagcgccctgaacctggccgagtgtgctggagatgctgtgtctgtggccaccctggccgagatctacgtggccgccgccctgcgggtgaagaccagcctgccccgggccctgcacttcctgacccgcttcttcctgagcagcgcccggcaggcctgcctggcccagagcggctctgtgcccccagccatgcagtggctgtgccaccctgtgggccaccgcttctttgtggatggagactggagcgtgctgagcaccccctgggagagcctgtacagcctggccggcaaccctgtggaccccctggcccaggtgacccagctgttccgggagcacctgctggagcgggccctgaactgtgtgacccagcccaaccccagccctggcagcgcagatggagacaaggagttcagtgatgccctgggctacctgcagctgctgaacagctgcagtgatgctgctggggccccagcctacagcttcagcatcagcagctccatggccaccaccactggagtggaccctgtggccaagtggtgggccagcctgacagctgtggtgatccactggctgcggagagatgaggaggccgctgagcggctgtgccccctggtggagcacctgccccgggtgctgcaggagagcgagcggcccctgccccgggccgccctgcacagcttcaaggccgcccgggccctgctgggctgtgccaaggccgagagcggccctgccagcctgaccatctgtgagaaggccagcggctacctgcaggacagcctggccaccaccccagccagcagcagcattgacaaggctgtgcagctgttcctgtgtgacctgctgctggtggtgaggaccagcctgtggaggcagcagcagcccccagccccagccccagctgcccagggcaccagcagccggccccaggccagcgccctggagctgcggggcttccagagggacctgagcagcctgcggcggctggcccagagcttccggcctgccatgagaagagtcttcctgcacgaggccacagcccggctgatggccggggccagccccaccaggacccaccagctgctggacaggagcctgcggaggagagctggccctgggggcaagggcggcgctgtggccgagctggagccccggcccacccggcgggagcacgccgaggccctgctgctggccagctgctacctgcccccaggcttcctgagcgcccctggccagagggtgggcatgctggccgaggccgcccggaccctggagaagctgggggaccggcggctgctgcatgactgccagcagatgctgatgaggctgggcggcggcaccaccgtgaccagcagctag

SEQ ID NO: 22028 - DNA, 2955 bp, synthetic construct
  misc_feature 1..2955: note = Description of Artificial Sequence: Synthetic coding sequence
  source 1..2955: mol_type = other DNA
atggactgcacctttgaggacatgctgcagctgatcaacaaccaggacagcgacttccctggcctgtttgatcctccctatgccggcagcggggccggcggcacagatcctgccagcccagacaccagcagccctggcagcctgagccccccaccagccaccctgagcagcagcctggaggccttcctgagcggcccccaggccgcccccagccccctgagccccccccagcctgcccccacccccctgaagatgtaccccagcatgcctgccttcagccctggccctggcatcaaggaggagagcgtgcccctgagcatcctgcagacccccaccccccagcccctgcctgtgcccaccctggtgtctgggggcaccatcctggccaccgtgcccctggtggtggatgctgagaagctgcccatcaaccggctggccgccggcagcaaggccccagccagcgcccagagcagaggagagaagaggacagcccacaatgccatcgagaagcgctaccgcagcagcatcaatgacaagatcatcgagctgaaggacctggtggtgggcacagaggccaagctgaacaagtctgctgtgctgaggaaggccatcgactacatccgcttcctgcagcacagcaaccagaagctgaagcaggagaacctgagcctgaggacagctgtgcacaagagcaagagcctgaaggacctggtgtctgcctgtggcagcggcggcaacacagatgtgctgatggagggcgtgaagacagaggtggaggacaccctgaccccacctccttctgatgctggcagccccttccagagcagccccctgagcctgggcagccggggcagcggcagcggcggcagcggcagtgacagcgagccagacagccctgtgtttgaggacagcaaggccaagccagagcagaggcccagcctgcacagccggggcatgctggacaggagccggctggccctgtgcaccctggtgttcctgtgcctgagctgcaaccccctggccagcctgctgggcgcccggggcctgcccagccccagcgacaccacctctgtgtaccacagccctggaagaaatgtgctgggcacagagagcagagatggccctggctgggcccagtggctgctgccccctgtggtgtggctgctgaatggcctgctggtgctggtgtccctggtgctgctgtttgtgtatggagagcctgtgacccggccccacagcggccctgctgtgtacttctggaggcacaggaagcaggccgacctggacctggcccggggggactttgcccaggccgcccagcagctgtggctggccctgcgggccctgggccggcccctgcccaccagccacctggacctggcctgcagcctgctgtggaacctgatccgccacctgctgcagaggctgtgggtgggccgctggctggccggccgggccggcggcctgcagcaggactgtgccctgcgggtggatgccagcgccagcgccagagatgctgccctggtgtaccacaagctgcaccagctgcacaccatgggcaagcacactggaggccacctgacagccaccaacctggccctgagcgccctgaacctggctgaatgtgctggagatgctgtgtctgtggccaccctggccgagatctacgtggccgccgccctgcgggtgaagaccagcctgccccgggccctgcacttcctgacccgcttcttcctgagcagcgcccggcaggcctgcctggcccagagcggctctgtgcccccagccatgcagtggctgtgccaccctgtgggccaccgcttctttgtggatggagactggagcgtgctgagcaccccctgggagagcctgtacagcctggccggcaaccctgtggaccccctggcccaggtgacccagctgttccgggagcacctgctggagcgggccctgaactgtgtgacccagcccaaccccagccctggcagcgcagatggagacaaggagttcagtgatgccctgggctacctgcagctgctgaacagctgcagtgatgctgctggggccccagcctacagcttcagcatcagcagctccatggccaccaccaccggggtggaccctgtggccaagtggtgggccagcctgacagctgtggtgatccactggctgcggagagatgaggaggccgctgagcggctgtgccccctggtggagcacctgccccgggtgctgcaggagagcgagcggcccctgcccagggctgccctgcacagcttcaaggccgcccgggccctgctgggctgtgccaaggccgagagcggccctgccagcctgaccatctgtgagaaggccagcggctacctgcaggacagcctggccaccaccccagccagcagcagcattgacaaggctgtgcagctgttcctgtgtgacctgctgctggtggtgaggaccagcctgtggaggcagcagcagcccccagccccagccccagctgcccagggcaccagcagccggccccaggccagcgccctggagctgcggggcttccagagggacctgagcagcctgcggcggctggcccagagcttccggcctgccatgagaagagtcttcctgcacgaggccacagcccggctgatggccggggccagccccaccaggacccaccagctgctggacaggagcctgcggcggcgggccggccctgggggcaaaggaggagctgtggccgagctggagccccggcccacccggcgggagcacgccgaggccctgctgctggccagctgctacctgcccccaggcttcctgagcgcccctggccagagggtgggcatgctggccgaggccgcccggaccctggagaagctgggggaccggcggctgctgcatgactgccagcagatgctgatgaggctgggcggcggcaccaccgtgaccagcagctag

SEQ ID NO: 22029 - DNA, 3222 bp, synthetic construct
  misc_feature 1..3222: note = Description of Artificial Sequence: Synthetic coding sequence
  source 1..3222: mol_type = other DNA
atggactgcacctttgaggacatgctgcagctgatcaacaaccaggacagcgacttccctggcctgtttgatcctccccagcctgcccccacccccctgaagatgtaccccagcatgcctgccttcagccctggccctggcatcaaggaggagagcgtgcccctgagcatcctgcagacccccaccccccagcccctgcccggggccctgctgccccagagcttccctgccccagccccaccccagttcagcagcacccctgtgctgggctaccccagccccccaggcggcttcagcacaggcagccccccaggcaacacccagcagcccctgcccggcctgcccctggccagccccccaggagtgccccctgtgtccctgcacacccaggtgcagagcgtggtgccccagcagctgctgactgtgacagctgcccccacagctgcccctgtgaccaccaccgtgaccagccagatccagcaggtgcctgtgctgctgcagccccacttcatcaaggctgacagcctgctgctgacagccatgaagacagatggagccaccgtgaaggctgctggcctgagccccctggtgtctggcaccaccgtgcagacaggccccctgcccaccctggtgtctgggggcaccatcctggccaccgtgcccctggtggtggatgctgagaagctgcccatcaaccggctggccgccggcagcaaggccccagccagcgcccagagcagaggagagaagaggacagcccacaatgccatcgagaagcgctaccgcagcagcatcaatgacaagatcatcgagctgaaggacctggtggtgggcacagaggccaagctgaacaagtctgctgtgctgaggaaggccatcgactacatccgcttcctgcagcacagcaaccagaagctgaagcaggagaacctgagcctgaggacagctgtgcacaagagcaagagcctgaaggacctggtgtctgcctgtggcagcggcggcaacacagatgtgctgatggagggcgtgaagacagaggtggaggacaccctgaccccaccacccagtgatgctggcagccccttccagagcagccccctgagcctgggcagccggggcagcggcagcggcggcagcggcagtgacagcgagccagacagccctgtgtttgaggacagcaaggccaagccagagcagaggcccagcctgcacagccggggcatgctggacaggagccggctggccctgtgcaccctggtgttcctgtgcctgagctgcaaccccctggccagcctgctgggcgcccggggcctgcccagccccagcgacaccacctctgtgtaccacagccctggaagaaatgtgctgggcacagagagcagagatggccctggctgggcccagtggctgctgccccctgtggtgtggctgctgaatggcctgctggtgctggtgtccctggtgctgctgtttgtgtatggagagcctgtgacccggccccacagcggccctgctgtgtacttctggaggcacaggaagcaggccgacctggacctggcccggggggactttgcccaggccgcccagcagctgtggctggccctgcgggccctgggccggcccctgcccaccagccacctggacctggcctgcagcctgctgtggaacctgatccgccacctgctgcagaggctgtgggtgggccgctggctggccggccgggccggcggcctgcagcaggactgtgccctgcgggtggatgccagcgccagcgccagagatgctgccctggtgtaccacaagctgcaccagctgcacaccatgggcaagcacactggaggccacctgacagccaccaacctggccctgagcgccctgaacctggccgagtgtgctggagatgctgtgtctgtggccaccctggccgagatctacgtggccgccgccctgcgggtgaagaccagcctgccccgggccctgcacttcctgacccgcttcttcctgagcagcgcccggcaggcctgcctggcccagagcggctctgtgcccccagccatgcagtggctgtgccaccctgtgggccaccgcttctttgtggatggagactggagcgtgctgagcaccccctgggagagcctgtacagcctggccggcaaccctgtggaccccctggcccaggtgacccagctgttccgggagcacctgctggagcgggccctgaactgtgtgacccagcccaaccccagccctggcagcgcagatggagacaaggagttcagtgatgccctgggctacctgcagctgctgaacagctgcagtgatgctgctggggccccagcctacagcttcagcatcagcagctccatggccaccaccactggagtggaccctgtggccaagtggtgggccagcctgacagctgtggtgatccactggctgcggagagatgaggaggccgctgagcggctgtgccccctggtggagcacctgccccgggtgctgcaggagagcgagcggcccctgccccgggccgccctgcacagcttcaaggccgcccgggccctgctgggctgtgccaaggccgagagcggccctgccagcctgaccatctgtgagaaggccagcggctacctgcaggacagcctggccaccaccccagccagcagcagcattgacaaggctgtgcagctgttcctgtgtgacctgctgctggtggtgaggaccagcctgtggaggcagcagcagcccccagccccagccccagctgcccagggcaccagcagccggccccaggccagcgccctggagctgcggggcttccagagggacctgagcagcctgcggcggctggcccagagcttccggcctgccatgagaagagtcttcctgcacgaggccacagcccggctgatggccggggccagccccaccaggacccaccagctgctggacaggagcctgcggaggagagctggccctgggggcaagggcggcgctgtggccgagctggagccccggcccacccggcgggagcacgccgaggccctgctgctggccagctgctacctgcccccaggcttcctgagcgcccctggccagagggtgggcatgctggccgaggccgcccggaccctggagaagctgggggaccggcggctgctgcatgactgccagcagatgctgatgaggctgggcggcggcaccaccgtgaccagcagctag

SEQ ID NO: 22030 - DNA, 1413 bp, synthetic construct
  misc_feature 1..1413: note = Description of Artificial Sequence: Synthetic coding sequence
  source 1..1413: mol_type = other DNA
atggatgagccccccttcagcgaggccgccctggagcaggccctgggggagccctgtgacctggatgctgccctgctgacagacatcgaggacatgctgcagctgatcaacaaccaggacagcgacttccctggcctgtttgatcctccctatgccggcagcggggccggcggcacagatcctgccagcccagacaccagcagccctggcagcctgagccccccaccagccaccctgagcagcagcctggaggccttcctgagcggcccccaggccgcccccagccccctgagccccccccagcctgcccccacccccctgaagatgtaccccagcatgcctgccttcagccctggccctggcatcaaggaggagagcgtgcccctgagcatcctgcagacccccaccccccagcccctgcccggggccctgctgccccagagcttccctgccccagccccaccccagttcagcagcacccctgtgctgggctaccccagccccccaggcggcttcagcacaggcagccccccaggcaacacccagcagcccctgcccggcctgcccctggccagccccccaggagtgccccctgtgtccctgcacacccaggtgcagagcgtggtgccccagcagctgctgactgtgacagctgcccccacagctgcccctgtgaccaccaccgtgaccagccagatccagcaggtgcctgtgctgctgcagccccacttcatcaaggctgacagcctgctgctgacagccatgaagacagatggagccaccgtgaaggctgctggcctgagccccctggtgtctggcaccaccgtgcagacaggccccctgcccaccctggtgtctgggggcaccatcctggccaccgtgcccctggtggtggatgctgagaagctgcccatcaaccggctggccgccggcagcaaggccccagccagcgcccagagcagaggagagaagaggacagcccacaatgccatcgagaagcgctaccgcagcagcatcaatgacaagatcatcgagctgaaggacctggtggtgggcacagaggccaagctgaacaagtctgctgtgctgaggaaggccatcgactacatccgcttcctgcagcacagcaaccagaagctgaagcaggagaacctgagcctgaggacagctgtgcacaagagcaagagcctgaaggacctggtgtctgcctgtggcagcggcggcaacacagatgtgctgatggagggcgtgaagacagaggtggaggacaccctgaccccaccacccagtgatgctggcagccccttccagagcagccccctgagcctgggcagccggggcagcggcagcggcggcagcggcagtgacagcgagccagacagccctgtgtttgaggacagcaagacagaatag

SEQ ID NO: 22031 - DNA, 645 bp, synthetic construct
  misc_feature 1..645: note = Description of Artificial Sequence: Synthetic coding sequence
  source 1..645: mol_type = other DNA
ctgatgcctgcctgcctgcccgggaagcacactggaggccacctgacagccaccaacctggccctgagcgccctgaacctggctgaatgtgctggagatgctgtgtctgtggccaccctggccgagatctacgtggccgccgccctgcgggtgaagaccagcctgccccgggccctgcacttcctgacccgcttcttcctgagcagcgcccggcaggcctgcctggcccagagcggctctgtgcccccagccatgcagtggctgtgccaccctgtgggccaccgcttctttgtggatggagactggagcgtgctgagcaccccctgggagagcctgtacagcctggccggcaaccctgtggaccccctggcccaggtgacccagctgttccgggagcacctgctggagcgggccctgaactgtgtgacccagcccaaccccagccctggcagcgcagatggagacaaggagttcagtgatgccctgggctacctgcagctgctgaacagctgcagtgatgctgctggggccccagcctacagcttcagcatcagcagctccatggccaccaccaccggggacccctgccccggccagctgtgcacccccagccggctgcccggcccctgctgggccgtgccctag

SEQ ID NO: 22032 - DNA, 747 bp, synthetic construct
  misc_feature 1..747: note = Description of Artificial Sequence: Synthetic coding sequence
  source 1..747: mol_type = other DNA
atggagcgggccagcctcatccagaaggccaagctggccgagcaggccgagagatatgaggacatggccgccttcatgaagggagctgtggagaagggggaggagctgagctgtgaggagaggaacctgctgtctgtggcctacaagaatgtggtgggcggccagagagctgcctggagggtgctgagcagcattgagcagaagagcaatgaggagggcagcgaggagaagggccctgaggtgcgggagtaccgggagaaggtggagacagagctgcagggcgtgtgtgacacagtgctgggcctgctggacagccacctgatcaaggaggccggagatgctgagagcagggtcttctacctgaagatgaagggggactactaccgctacctggccgaggtggccactggagatgacaagaagaggatcatcgacagcgcccggagcgcctaccaggaggccatggacatcagcaagaaggagatgccacccaccaaccccatccggctgggcctggccctgaacttctctgtgttccactatgaaattgccaacagccctgaggaggccatcagcctggccaagaccacctttgatgaggccatggctgacctgcacaccctgtctgaggacagctacaaggacagcaccctcatcatgcagctgctgcgggacaacctgaccctgtggacagctgacaatgctggggaggagggcggggaggccccccaggagccccagagctag

SEQ ID NO: 22033 - DNA, 651 bp, synthetic construct
  misc_feature 1..651: note = Description of Artificial Sequence: Synthetic coding sequence
  source 1..651: mol_type = other DNA
atggagcgggccagcctcatccagaaggccaagctggccgagcaggccgagagatatgaggacatggccgccttcatgaagggagctgtggagaagggggaggagctgagctgtgaggagaggaacctgctgtctgtggcctacaagaatgtggtgggcggccagagagctgcctggagggtgctgagcagcattgagcagaagagcaatgaggagggcagcgaggagaagggccctgaggtgcgggagtacagagtcttctacctgaagatgaagggggactactaccgctacctggccgaggtggccactggagatgacaagaagaggatcatcgacagcgcccggagcgcctaccaggaggccatggacatcagcaagaaggagatgccacccaccaaccccatccggctgggcctggccctgaacttctctgtgttccactatgaaattgccaacagccctgaggaggccatcagcctggccaagaccacctttgatgaggccatggctgacctgcacaccctgtctgaggacagctacaaggacagcaccctcatcatgcagctgctgcgggacaacctgaccctgtggacagctgacaatgctggggaggagggcggggaggccccccaggagccccagagctag

SEQ ID NO: 22034 - DNA, 3702 bp, synthetic construct
  misc_feature 1..3702: note = Description of Artificial Sequence: Synthetic coding sequence
  source 1..3702: mol_type = other DNA
atgggcttcctgaagctgattgaaattgagaacttcaagagctacaagggccggcagatcatcggccccttccagcgcttcaccgccatcatcggccccaacggcagcggcaagagcaacctgatggatgccatcagctttgtgctgggggagaagaccagcaacctgcgggtgaagaccctgcgggacctgatccacggggcccctgtgggcaagccagctgccaacagagcctttgtgtccatggtgtacagcgaggagggcgctgaggacaggacctttgcccgggtcatcgtgggcggcagcagcgagtacaagatcaacaacaaggtggtgcagctgcacgagtacagcgaggagctggagaagctgggcatcctgatcaaggccaggaacttcctggtgttccagggcgctgtggagagcatcgccatgaagaaccccaaggagaggacagccctgtttgaggagatcagccgctctggagagctggcccaggagtatgacaagaggaagaaggagatggtgaaggccgaggaggacacccagttcaactaccacaggaagaagaacattgctgctgagaggaaggaggccaagcaggagaaggaggaggccgaccgctaccagaggctgaaggatgaggtggtgcgggcccaggtgcagctgcagctgttcaagctgtaccacaatgaggtggagattgagaagctgaacaaggagctggccagcaagaacaaggagattgagaaggacaagaagaggatggacaaggtggaggatgagctgaaggagaagaagaaggagctgggcaagatgatgagggagcagcagcagatcgagaaggagatcaaggagaaggacagcgagctgaaccagaagaggccccagtacatcaaggccaaggagaacaccagccacaagatcaagaagctggaggccgccaagaagagcctgcagaatgcccagaagcactacaagaagaggaagggggacatggatgagctggagaaggagatgctgtctgtggagaaggcccggcaggagtttgaggagaggatggaggaggagagccagagccagggccgggacctgaccctggaggagaaccaggtgaagaagtaccaccggctgaaggaggaggccagcaagagagctgccaccctggcccaggagctggagaagttcaacagagaccagaaggctgaccaggaccggctggacctggaggagaggaagaaggtggagacagaggccaagatcaagcagaagctgcgggagattgaggagaaccagaagagaattgagaagctggaggagtacatcaccaccagcaagcagagcctggaggagcagaagaagctggagggggagctgacagaggaggtggagatggccaagagaagaattgatgagatcaacaaggagctgaaccaggtgatggagcagctgggagatgccagaattgaccggcaggagagcagccggcagcagaggaaggccgagatcatggagagcatcaagaggctgtacccaggctctgtgtatggccgcctgattgacctgtgccagcccacccagaagaagtaccagattgctgtgaccaaggtgctgggcaagaacatggatgccatcatcgtggacagcgagaagacaggccgggactgcatccagtacatcaaggagcagagaggagagcctgagaccttcctgcccctggactacctggaggtgaagcccacagatgagaagctgcgggagctgaagggggccaagctggtgattgatgtgatccgctatgagcccccccacatcaagaaggccctgcagtatgcctgtggaaatgccctggtgtgtgacaacgtggaggatgcccggcgcatcgccttcggcggccaccagaggcacaagacagtggccctggatggcaccctcttccagaagtctggagtcatctctggaggagccagtgacctgaaggccaaggcccggcgctgggatgagaaggctgtggacaagctgaaggagaagaaggagcggctgacagaggagctgaaggagcagatgaaggccaagaggaaggaggccgagctgcggcaggtgcagagccaggcccacggcctgcagatgaggctgaagtacagccagagcgacctggagcagaccaagaccaggcacctggccctgaacctgcaggagaagagcaagctggagagcgagctggccaactttggcccccgcatcaatgacatcaagaggatcatccagagccgggagcgggagatgaaggacctgaaggagaagatgaaccaggtggaggatgaggtgtttgaggagttctgccgggagattggagtgaggaacatccgggagtttgaggaggagaaggtgaagaggcagaatgaaattgccaagaagaggctggagtttgagaaccagaagacccggctgggcatccagctggactttgagaagaaccagctgaaggaggaccaggacaaggtgcacatgtgggagcagacagtgaagaaggatgaaaatgaaattgagaagctgaagaaggaggagcagaggcacatgaagatcattgatgagaccatggcccagctgcaggacctgaagaaccagcacctggccaagaagtctgaggtgaatgacaagaaccacgagatggaggagatcaggaagaagctgggcggggccaacaaggagatgacccacctgcagaaggaggtgacagccatcgagaccaagctggagcagaagagaagtgacagacacaacctgctgcaggcctgcaagatgcaggacatcaagctgcccctgagcaagggcaccatggatgacatcagccaggaggagggcagcagccagggcgaggacagcgtgtctggcagccagaggatcagcagcatctatgcccgggaggccctgattgaaattgattatggagacctgtgtgaggacctgaaggatgcccaggccgaggaggagatcaagcaggagatgaacaccctgcagcagaagctgaatgagcagcagagcgtgctgcagagaattgctgcccccaacatgaaggccatggagaagctggagagcgtgcgggacaagttccaggagaccagtgatgaatttgaagctgccaggaagagggccaagaaggccaagcaggcctttgagcagatcaagaaggagagatttgaccgcttcaatgcctgctttgagagcgtggccaccaacattgatgagatctacaaggccctgagcaggaacagcagcgcccaggccttcctgggcccagaaaatcctgaggagccctacctggatggcatcaactacaactgtgtggcccctgggaagcgcttccggcccatggacaacctgtctggaggagagaagacagtggccgccctggccctgctgtttgccatccacagctacaagccagcccccttctttgtgctggatgaaattgatgctgccctggacaacaccaacatcggcaaggtggccaactacatcaaggagcagagcacctgcaacttccaggccatcgtcatcagcctgaaggaggagttctacaccaaggccgagagcctgattggagtgtacccagagcagggcgactgtgtgatcagcaaggtgctgacctttgacctgaccaagtacccagatgccaaccccaaccccaatgagcagtag

SEQ ID NO: 22035 - DNA, 612 bp, synthetic construct
  misc_feature 1..612: note = Description of Artificial Sequence: Synthetic coding sequence
  source 1..612: mol_type = other DNA
atgggcttcctgaagctgattgaaattgagaacttcaagagctacaagggccggcagatcatcggccccttccagcgcttcaccgccatcatcggccccaacggcagcggcaagagcaacctgatggatgccatcagctttgtgctgggggagaagaccagcaacctgcgggtgaagaccctgcgggacctgatccacggggcccctgtgggcaagccagctgccaacagagcctttgtgtccatggtgtacagcgaggagggcgctgaggacaggacctttgcccgggtcatcgtgggcggcagcagcgagtacaagatcaacaacaaggtggtgcagctgcacgagtacagcgaggagctggagaagctgggcatcctgatcaaggccaggaacttcctggtgttccagggctgctgcggcatctactgccacgagacccccaagaggggccagctgtacctgaagatcagccgcagcggggagctggcccaggagtatgacaagaggaagaaggagatggtgaaggccgaggaggacacccagttcaactaccacaggaagaagaacattgctgctgagaggaaggaggccaagcaggagaaggagtag

SEQ ID NO: 22036 - DNA, 1551 bp, synthetic construct
  misc_feature 1..1551: note = Description of Artificial Sequence: Synthetic coding sequence
  source 1..1551: mol_type = other DNA
atgggcttcctgaagctgattgaaattgagaacttcaagagctacaagggccggcagatcatcggccccttccagcgcttcaccgccatcatcggccccaacggcagcggcaagagcaacctgatggatgccatcagctttgtgctgggggagaagaccagcaacctgcgggtgaagaccctgcgggacctgatccacggggcccctgtgggcaagccagctgccaacagagcctttgtgtccatggtgtacagcgaggagggcgctgaggacaggacctttgcccgggtcatcgtgggcggcagcagcgagtacaagatcaacaacaaggtggtgcagctgcacgagtacagcgaggagctggagaagctgggcatcctgatcaaggccaggaacttcctggtgttccaggtgaagaagtaccaccggctgaaggaggaggccagcaagagagctgccaccctggcccaggagctggagaagttcaacagagaccagaaggctgaccaggaccggctggacctggaggagaggaagaaggtggagacagaggccaagatcaagcagaagctgcgggagattgaggagaaccagaagagaattgagaagctggaggagtacatcaccaccagcaagcagagcctggaggagcagaagaagctggagggggagctgacagaggaggtggagatggccaagagaagaattgatgagatcaacaaggagctgaaccaggtgatggagcagctgggagatgccagaattgaccggcaggagagcagccggcagcagaggaaggccgagatcatggagagcatcaagaggctgtacccaggctctgtgtatggccgcctgattgacctgtgccagcccacccagaagaagtaccagattgctgtgaccaaggtgctgggcaagaacatggatgccatcatcgtggacagcgagaagacaggccgggactgcatccagtacatcaaggagcagagaggagagcctgagaccttcctgcccctggactacctggaggtgaagcccacagatgagaagctgcgggagctgaagggggccaagctggtgattgatgtgatccgctatgagcccccccacatcaagaaggccctgcagtatgcctgtggaaatgccctggtgtgtgacaacgtggaggatgcccggcgcatcgccttcggcggccaccagaggcacaagacagtggccctggatggcaccctcttccagaagtctggagtcatctctggaggagccagtgacctgaaggccaaggcccggcgctgggatgagaaggctgtggacaagctgaaggagaagaaggagcggctgacagaggagctgaaggagcagatgaaggccaagaggaaggaggccgagctgcggcaggtgcagagccaggcccacggcctgcagatgaggctgaagtacagccagagcgacctggagcagaccaagaccaggcacctggccctgaacctgcaggtgggccctggcctgcagccctgcagccccaaggccatccacaccttcctggcctag

SEQ ID NO: 22037 - DNA, 870 bp, synthetic construct
  misc_feature 1..870: note = Description of Artificial Sequence: Synthetic coding sequence
  source 1..870: mol_type = other DNA
tgatggtacacccccacccccttctacagcagcctggaggccgccctgctgaacttccggcccagcgcccctgtgttcaggatgctggaggtgtccatccccaccccccacagatatgtgcggggcaagagcaacctgatggatgccatcagctttgtgctgggggagaagaccagcaacctgcgggtgaagaccctgcgggacctgattcatggagcccctgtgggcaagccagctgccaacagagcctttgtgtccatggtgtacagcgaggagggcgctgaggacaggacctttgcccgggtgattgtgggcggcagcagcgagtacaagatcaacaacaaggtggtgcagctgcacgagtacagcgaggagctggagaagctgggcatcctgatcaaggccaggaacttcctggtgttccagggcgctgtggagagcatcgccatgaagaaccccaaggagaggacagccctgtttgaggagatcagccgcagcggggagctggcccaggagtatgacaagaggaagaaggagatggtgaaggccgaggaggacacccagttcaactaccacaggaagaagaacattgctgctgagaggaaggaggccaagcaggagaaggaggaggccgaccgctaccagaggctgaaggatgaggtggtgcgggcccaggtgcagctgcagctgttcaagctgtaccacaatgaggtggagattgagaagctgaacaaggagctggccagcaagaacaaggagattgagaaggacaagaagaggatggacaaggtggaggatgagctgaaggagaagaagaaggagctgggcaagatgatgagggagcagcagcagatcgagaaggagatctag

SEQ ID NO: 22038 - DNA, 1995 bp, synthetic construct
  misc_feature 1..1995: note = Description of Artificial Sequence: Synthetic coding sequence
  source 1..1995: mol_type = other DNA
atgtctggagtgcggggcctgagccggctgctgagcgcccggcggctggccctggccaaggcctggcccaccgtgctgcagacaggcacccggggcttccacttcaccgtggatggcaacaagagggccagcgccaaggtgtctgacagcatcagcgcccagtaccctgtggtggaccacgagtttgatgctgtggtggtgggcgccggcggggccggcctgcgggccgccttcggcctgtctgaggccggcttcaacacagcctgtgtgaccaagctgttccccaccaggagccacacagtggccgcccagggcggcatcaatgctgccctgggcaacatggaggaggacaactggcgctggcacttctatgacacagtgaagggcagtgactggctgggggaccaggatgccatccactacatgacagagcaggccccagctgctgtggtggagctggagaactacggcatgcccttcagcaggacagaagatggcaagatctaccagagggcctttggaggccagagcctgaagtttgggaagggcggccaggcccaccgctgctgctgcgtggccgacagaacaggccacagcctgctgcacaccctgtatggccgcagcctgcgctatgacaccagctactttgtggagtactttgccctggacctgctgatggagaatggagagtgccggggcgtgattgccctgtgcattgaagatggcagcatccaccgcatccgggccaagaacacagtggtggccaccggcggctacggccgcacctacttcagctgcaccagcgcccacaccagcactggagatggaacagccatgatcaccagggctggcctgccctgccaggacctggagtttgtgcagttccaccccaccggcatctatggagctggctgcctgatcacagagggctgccgcggggagggcggcatcctgatcaacagccagggcgagcgcttcatggagagatatgcccctgtggccaaggacctggccagcagagatgtggtgagccgctccatgaccctggagatccgggagggccggggctgcggccctgagaaggaccacgtgtacctgcagctgcaccacctgcccccagagcagctggccacccggctgcccggcatcagcgagacagccatgatctttgctggggtggatgtgaccaaggagcccatccctgtgctgcccaccgtgcactacaacatgggcggcatccccaccaactacaagggccaggtgctgcggcacgtgaatggccaggaccagatcgtgcccggcctgtatgcctgtggggaggccgcctgtgcctctgtgcatggagccaaccggctgggcgccaacagcctgctggacctggtggtgtttggccgggcctgtgccctgagcattgaggagagctgcaggcctggggacaaggtgccccccatcaagcccaatgctggggaggagagcgtgatgaacctggacaagctgcgctttgctgatggcagcatccgcaccagcgagctgcggctgtccatgcagaagtccatgcagaaccacgccgctgtgttccgggtgggctctgtgctgcaggagggctgtgggaagatcagcaagctgtatggagacctgaagcacctgaagacctttgaccggggcatggtgtggaacacagacctggtggagaccctggagctgcagaacctgatgctgtgtgccctgcagaccatctacggggctgaggccaggaaggagagcagaggagcccacgcccgggaggactacaaggtgagaattgatgaatatgactacagcaagcccatccagggccagcagaagaagccctttgaggagcactggaggaagcacaccctgtcctatgtggatgtgggcaccgggaaggtgaccctggagtacagacctgtgattgacaagaccctgaatgaggccgactgtgccaccgtgcccccagccatccgcagctactag

SEQ ID NO: 22039 - DNA, 1560 bp, synthetic construct
  misc_feature 1..1560: note = Description of Artificial Sequence: Synthetic coding sequence
  source 1..1560: mol_type = other DNA
atgtctggagtgcggggcctgagccggctgctgagcgcccggcggctggccctggccaaggcctggcccaccgtgctgcagacaggcacccggggcttccacttcaccgtggatggcaacaagagggccagcgccaaggtgtctgacagcatcagcgcccagtaccctgtggtggaccacgagtttgatgctgtggtggtgggcgccggcggggccggcctgcgggccgccttcggcctgtctgaggccggcttcaacacagcctgtgtgaccaagctgttccccaccaggagccacacagtggccgcccagggcggcatcaatgctgccctgggcaacatggaggaggacaactggcgctggcacttctatgacaccagcactggagatggaacagccatgatcacccgggccggcctgccctgccaggacctggagtttgtgcagttccaccccaccggcatctacggggccggctgcctgatcacagagggctgccgcggggagggcggcatcctgatcaacagccagggcgagcgcttcatggagagatatgcccctgtggccaaggacctggccagcagagatgtggtgagccgctccatgaccctggagatccgggagggccggggctgcggccctgagaaggaccacgtgtacctgcagctgcaccacctgcccccagagcagctggccacccggctgcccggcatcagcgagacagccatgatctttgctggggtggatgtgaccaaggagcccatccctgtgctgcccaccgtgcactacaacatgggcggcatccccaccaactacaagggccaggtgctgcggcacgtgaatggccaggaccagatcgtgcccggcctgtatgcctgtggggaggccgcctgtgcctctgtgcacggggccaaccggctgggcgccaacagcctgctggacctggtggtgtttggccgggcctgtgccctgagcattgaggagagctgcaggcctggggacaaggtgccccccatcaagcccaatgctggggaggagagcgtgatgaacctggacaagctgcgctttgctgatggcagcatccgcaccagcgagctgcggctgtccatgcagaagtccatgcagaaccacgccgctgtgttccgggtgggctctgtgctgcaggagggctgcggcaagatcagcaagctgtatggagacctgaagcacctgaagacctttgaccggggcatggtgtggaacacagacctggtggagaccctggagctgcagaacctgatgctgtgtgccctgcagaccatctatggagctgaggccaggaaggagagcagaggagcccacgcccgggaggactacaaggtgagaattgatgaatatgactacagcaagcccatccagggccagcagaagaagccctttgaggagcactggaggaagcacaccctgtcctatgtggatgtgggcaccgggaaggtgaccctggagtacagacctgtgattgacaagaccctgaatgaagctgactgtgccaccgtgcccccagccatccgcagctactag

SEQ ID NO: 22040 - DNA, 6645 bp, synthetic construct
  misc_feature 1..6645: note = Description of Artificial Sequence: Synthetic coding sequence
  source 1..6645: mol_type = other DNA
atgaagaggaaggagagaattgcccggcggctggagggcattgaaaatgacacccagcccatcctgctgcagagctgcaccggcctggtgacccaccggctgctggaggaggacaccccccgctacatgagggccagtgaccctgccagcccccacatcggccgcagcaatgaggaggaggagaccagtgacagcagcctggagaagcagaccaggagcaagtactgcacagagaccagcggcgtgcatggagacagcccctacggcagcggcaccatggacacccacagcctggagagcaaggccgagagaattgcccgctacaaggccgagcggcggcggcagctggccgagaagtatggcctgaccctggaccctgaggccgacagcgagtacctgagccgctacaccaagagcaggaaggagccagatgctgtggagaagaggggcggcaagagtgacaagcaggaggagagcagcagagatgccagcagcctgtacccaggcacagagaccatgggcctgcggacctgtgccggggagagcaaggactatgccctgcacgtgggagatggcagcagtgaccctgaggtgctgctgaacatcgagaaccagaggcggggccaggagctgagcgccacccggcaggcccatgacctgagccctgctgctgagagcagcagcaccttctccttcagcggccgggacagcagcttcacagaggtgcccaggagccccaagcacgcccacagcagcagcctgcagcaggccgccagccgcagccccagctttggagacccccagctgagccctgaggcccggcccagcacaggcaagcccaagcatgagtggttcctgcagaaggacagcgagggggacacccccagcctcatcaactggcccagccgggtgaaggtgcgggagaagctggtgaaggaggagagcgccaggaacagccctgagctggccagcgagagcgtgacccagaggaggcaccagcctgcccctgtgcactacgtgtccttccagagcgagcacagcgcctttgacagagtgcccagcaaggctgctggcagcacccggcagcccatccggggctacgtgcagcctgctgacaccggccacacagccaagctggtgaccccagagaccccagaaaatgccagcgagtgctcctgggtggccagcgccacccagaatgtgcccaagccacccagcctgactgtgctggagggagatggccgggacagccctgtgctgcacgtgtgtgagagcaaggccgaggaggaggagggggagggggagggggaggagaaggaggaggatgtgtgcttcacagaggccctggagcagagcaagaagaccctgctggccctggagggagatggcctggtgcgcagccctgaggaccccagcagaaatgaagattttgggaagccagctgtgtccacagtgaccctggagcaccagaaggagctggagaatgtggcccagcccccccaggccccccaccagcccacagagaggacaggccgctctgagatggtgctgtacatccagagcgagcctgtgtcccaggatgccaagcccaccggccacaaccgggaggccagcaagaagaggaaggtgaggaccaggagcctgagtgacttcaccggccccccccagctgcaggccctgaagtacaaggaccctgccagccggcgggagctggagctgcccagcagcaagacagagggcccctacggggagatctccatgctggacaccaaggtgtctgtggcccagctgcggagcgccttcctggccagcgccaatgcctgcagaagacctgagctgaagagccgggtggagaggtctgctgagggccctggcctgcccaccggggtggagcgggagcggggcagcaggaagccccggcgctacttcagccctggagagagcaggaagaccagcgagcgcttccgcacccagcccatcaccagcgctgagaggaaggagagtgaccgctgcaccagccacagcgagacccccaccgtggatgatgaggagaaggtggatgagcgggccaagctgtctgtggccgccaagaggctgctcttccgggagatggagaagagctttgatgagcagaatgtgcccaagaggaggagcaggaacacagctgtggagcagaggctgcggcggctgcaggacaggagcctgacccagcccatcaccacagaggaggtggtgattgctgccacagagcccatcccagccagctgcagcggcggcacccaccctgtgatggcccggctgcccagccccaccgtggcccggtctgctgtgcagcctgcccggctgcaggccagcgcccaccagaaggccctggccaaggaccagaccaatgaaggcaaggagctggccgagcagggcgagccagacagcagcaccctgagcctggccgagaagctggccctcttcaacaagctgagccagcctgtgtccaaggccatcagcaccaggaacagaattgacacccggcagaggaggatgaatgcccgctaccagacccagcctgtgaccctgggggaggtggagcaggtgcagagcggcaagctgatccccttctccccagctgtgaacacctctgtgtccacagtggccagcacagtggcccccatgtatgctggggacctgcggaccaagccacccctggaccacaatgccagcgccacagactacaagttcagcagcagcattgagaacagcgacagccctgtgcgcagcatcctgaagagccaggcctggcagcccctggtggagggctctgaaaataaaggcatgctgcgggagtatggagaaacagagagcaagagggccctgaccggccgggacagcggcatggagaagtatggcagctttgaggaggccgaggccagctaccccatcctgaacagagcccgggagggggacagccacaaggagagcaaatatgctgtgccccggcggggcagcctggagcgggccaacccccccatcacccacctgggagatgagcccaaggagttctccatggccaagatgaatgcccagggcaacctggacctgcgggaccggctgccctttgaggagaaggtggaggtggagaatgtgatgaagaggaagttcagcctgcgggctgctgagtttggagagcccaccagcgagcagacaggaacagctgctgggaagaccatcgcccagaccacagcccctgtgtcctggaagccccaggacagcagcgagcagccccaggagaagctgtgcaagaacccctgtgccatgtttgctgctggggagatcaagacccccactggagagggcctgctggacagccccagcaagaccatgagcatcaaggagcggctggccctgctgaagaagtctggagaggaggactggaggaaccggctgagccggcggcaggagggcggcaaggccccagccagcagcctgcacacccaggaggccggccgcagcctcatcaagaagagggtgacagagagccgggagagccagatgaccatcgaggagaggaagcagctgatcaccgtgcgggaggaggcctggaagacccggggcagaggagctgccaatgacagcacccagttcaccgtggccggccgcatggtgaagaagggcctggccagccccacagccatcacccctgtggccagccccatctgtgggaagacccggggcaccacccctgtgtccaagcccctggaggacatcgaggcccggccagacatgcagctggagagtgacctgaagctggaccggctggagaccttcctgcggcggctgaacaacaaggtgggcggcatgcatgaaacagtgctgactgtgacaggcaagtctgtgaaggaggtgatgaagccagatgatgatgagacctttgccaagttctacagatctgtggactacaacatgcccaggagccctgtggagatggatgaggactttgatgtgatctttgacccctatgcccccaagctgaccagctctgtggccgagcacaagagagctgtgcggcccaagagaagagtgcaggccagcaagaaccccctgaagatgctggccgcccgggaggacctgctgcaggagtacacagagcagaggctgaatgtggccttcatggagagcaagaggatgaaggtggagaagatgagcagcaacagcaacttcagcgaggtgaccctggccggcctggccagcaaggagaacttcagcaatgtgtccctgcggtctgtgaacctgacagagcagaacagcaacaacagcgctgtgccctacaagaggctgatgctgctgcagatcaagggcagaagacatgtgcagacccggctggtggagccccgggccagcgccctgaacagcggggactgcttcctgctgctgagcccccactgctgcttcctgtgggtgggggagtttgccaacgtgattgagaaggccaaggccagcgagctggccaccctcatccagaccaagcgggagctgggctgccgggccacctacatccagaccatcgaggagggcatcaacacccacacccatgctgccaaggacttctggaagctgctgggcggccagaccagctaccagagcgctggggaccccaaggaggatgagctgtatgaagctgccatcatcgagaccaactgcatctaccgcctgatggatgacaagctggtgcctgatgatgactactggggcaagatccccaagtgcagcctgctgcagcccaaggaggtgctggtgtttgattttggaagtgaggtgtatgtgtggcacggcaaggaggtgaccctggcccagaggaagatcgccttccagctggccaagcacctgtggaatggcacctttgattatgagaactgtgacatcaaccccctggaccctggagagtgcaaccccctcatccccaggaagggccagggccgcccagactgggccatcttcggccgcctgacagagcacaatgagaccatcctcttcaaggagaagttcctggactggacagagctgaagaggagcaatgagaagaaccctggagagctggcccagcacaaggaggaccccaggacagatgtgaaggcctatgatgtgaccaggatggtgtccatgccccagaccacagctggcaccatcctggatggagtgaatgtgggccggggctacggcctggtggagggccatgaccggcggcagtttgagatcacctctgtgtctgtggatgtgtggcacatcctggagtttgactacagccggctgcccaagcagagcatcggccagttccacgagggagatgcctacgtggtgaagtggaagttcatggtgtccacagctgtgggcagccggcagaagggggagcacagcgtgcgggccgccggcaaggagaagtgtgtgtacttcttctggcagggccgccacagcacagtgtctgagaagggcaccagcgccctgatgacagtggagctggatgaggagcggggggcccaggtgcaggtgctgcagggcaaggagcccccctgcttcctgcagtgcttccagggcggcatggtggtgcacagcggcagaagagaggaggaggaggagaatgtgcagagcgagtggaggctgtactgtgtgcggggggaggtgcctgtggagggcaacctgctggaggtggcctgccactgcagcagcctgcggagcaggacctccatggtggtgctgaatgtgaacaaggccctgatctacctgtggcacggctgcaaggcccaggcccacaccaaggaggtgggccgcacagctgccaacaagatcaaggagcagtgccccctggaggccggcctgcacagcagcagcaaggtgaccatccatgaatgtgatgagggcagcgagcccctgggcttctgggatgccctgggcagaagagacaggaaggcctatgactgcatgctgcaggaccccggcagcttcaactttgcccccaggctcttcatcctgagcagcagcagcggggactttgctgccacagaatttgtgtacccagcccgggcccccagcgtggtgtcctccatgcccttcctgcaggaggacctgtacagcgccccccagcctgccctcttcctggtggacaaccaccacgaggtgtacctgtggcagggctggtggcccatcgagaacaagatcactggaagtgcccgcatccgctgggccagtgacaggaagagcgccatggagaccgtgctgcagtactgcaagggcaagaacctgaagaagccagcccccaagagctacctgattcatgctggcctggagcccctgaccttcaccaacatgttccccagctgggagcaccgggaggacattgctgagatcacagagatggacacagaggtgagcaaccagatcaccctggtggaggatgtgctggccaagctgtgcaagaccatctaccccctggccgacctgctggcccggcccctgcctgagggcgtggaccccctgaagctggagatctacctgacagatgaagattttgaatttgccctggacatgaccagagatgagtacaatgccctgcctgcctggaagcaggtgaacctgaagaaggccaagggcctcttctag

SEQ ID NO: 22041 - DNA, 6645 bp, synthetic construct; identical to SEQ ID NO: 22040
  misc_feature 1..6645: note = Description of Artificial Sequence: Synthetic coding sequence
  source 1..6645: mol_type = other DNA

SEQ ID NO: 22042 - DNA, 5367 bp, synthetic construct
  misc_feature 1..5367: note = Description of Artificial Sequence: Synthetic coding sequence
  source 1..5367: mol_type = other DNA
atgaagaggaaggagagaattgcccggcggctggagggcattgaaaatgacacccagcccatcctgctgcagagctgcaccggcctggtgacccaccggctgctggaggaggacaccccccgctacatgagggccagtgaccctgccagcccccacatcggccgcagcaatgaggaggaggagaccagtgacagcagcctggagaagcagaccaggagcaagtactgcacagagaccagcggcgtgcatggagacagcccctacggcagcggcaccatggacacccacagcctggagagcaaggccgagagaattgcccgctacaaggccgagcggcggcggcagctggccgagaagtatggcctgaccctggaccctgaggccgacagcgagtacctgagccgctacaccaagagcaggaaggagccagatgctgtggagaagaggggcggcaagagtgacaagcaggaggagagcagcagagatgccagcagcctgtacccaggcacagagaccatgggcctgcggacctgtgccggggagagcaaggactatgccctgcacgtgggagatggcagcagtgaccctgaggtgctgctgaacatcgagaaccagaggcggggccaggagctgagcgccacccggcaggcccatgacctgagccctgctgctgagagcagcagcaccttctccttcagcggccgggacagcagcttcacagaggtgcccaggagccccaagcacgcccacagcagcagcctgcagcaggccgccagccgcagccccagctttggagacccccagctgagccctgaggcccggccccgctgcaccagccacagcgagacccccaccgtggatgatgaggagaaggtggatgagcgggccaagctgtctgtggccgccaagaggctgctcttccgggagatggagaagagctttgatgagcagaatgtgcccaagaggaggagcaggaacacagctgtggagcagaggctgcggcggctgcaggacaggagcctgacccagcccatcaccacagaggaggtggtgattgctgccaccctgcaggccagcgcccaccagaaggccctggccaaggaccagaccaatgaaggcaaggagctggccgagcagggcgagccagacagcagcaccctgagcctggccgagaagctggccctcttcaacaagctgagccagcctgtgtccaaggccatcagcaccaggaacagaattgacacccggcagaggaggatgaatgcccgctaccagacccagcctgtgaccctgggggaggtggagcaggtgcagagcggcaagctgatccccttctccccagctgtgaacacctctgtgtccacagtggccagcacagtggcccccatgtatgctggggacctgcggaccaagccacccctggaccacaatgccagcgccacagactacaagttcagcagcagcattgagaacagcgacagccctgtgcgcagcatcctgaagagccaggcctggcagcccctggtggagggctctgaaaataaaggcatgctgcgggagtatggagaaacagagagcaagagggccctgaccggccgggacagcggcatggagaagtatggcagctttgaggaggccgaggccagctaccccatcctgaacagagcccgggagggggacagccacaaggagagcaaatatgctgtgccccggcggggcagcctggagcgggccaacccccccatcacccacctgggagatgagcccaaggagttctccatggccaagatgaatgcccagggcaacctggacctgcgggaccggctgccctttgaggagaaggtggaggtggagaatgtgatgaagaggaagttcagcctgcgggctgctgagtttggagagcccaccagcgagcagacaggaacagctgctgggaagaccatcgcccagaccacagcccctgtgtcctggaagccccaggacagcagcgagcagccccaggagaagctgtgcaagaacccctgtgccatgtttgctgctggggagatcaagacccccactggagagggcctgctggacagccccagcaagaccatgagcatcaaggagcggctggccctgctgaagaagtctggagaggaggactggaggaaccggctgagccggcggcaggagggcggcaaggccccagccagcagcctgcacacccaggaggccggccgcagcctcatcaagaagagggtgacagagagccgggagagccagatgaccatcgaggagaggaagcagctgatcaccgtgcgggaggaggcctggaagacccggggcagaggagctgccaatgacagcacccagttcaccgtggccggccgcatggtgaagaagggcctggccagccccacagccatcacccctgtggccagccccatctgtgggaagacccggggcaccacccctgtgtccaagcccctggaggacatcgaggcccggccagacatgcagctggagagtgacctgaagctggaccggctggagaccttcctgcggcggctgaacaacaaggtgggcggcatgcatgaaacagtgctgactgtgacaggcaagtctgtgaaggaggtgatgaagccagatgatgatgagacctttgccaagttctacagatctgtggactacaacatgcccaggagccctgtggagatggatgaggactttgatgtgatctttgacccctatgcccccaagctgaccagctctgtggccgagcacaagagagctgtgcggcccaagagaagagtgcaggccagcaagaaccccctgaagatgctggccgcccgggaggacctgctgcaggagtacacagagcagaggctgaatgtggccttcatggagagcaagaggatgaaggtggagaagatgagcagcaacagcaacttcagcgaggtgaccctggccggcctggccagcaaggagaacttcagcaatgtgtccctgcggtctgtgaacctgacagagcagaacagcaacaacagcgctgtgccctacaagaggctgatgctgctgcagatcaagggcagaagacatgtgcagacccggctggtggagccccgggccagcgccctgaacagcggggactgcttcctgctgctgagcccccactgctgcttcctgtgggtgggggagtttgccaacgtgattgagaaggccaaggccagcgagctggccaccctcatccagaccaagcgggagctgggctgccgggccacctacatccagaccatcgaggagggcatcaacacccacacccatgctgccaaggacttctggaagctgctgggcggccagaccagctaccagagcgctggggaccccaaggaggatgagctgtatgaagctgccatcatcgagaccaactgcatctaccgcctgatggatgacaagctggtgcctgatgatgactactggggcaagatccccaagtgcagcctgctgcagcccaaggaggtgctggtgtttgattttggaagtgaggtgtatgtgtggcacggcaaggaggtgaccctggcccagaggaagatcgccttccagctggccaagcacctgtggaatggcacctttgattatgagaactgtgacatcaaccccctggaccctggagagtgcaaccccctcatccccaggaagggccagggccgcccagactgggccatcttcggccgcctgacagagcacaatgagaccatcctcttcaaggagaagttcctggactggacagagctgaagaggagcaatgagaagaaccctggagagctggcccagcacaaggaggaccccaggacagatgtgaaggcctatgatgtgaccaggatggtgtccatgccccagaccacagctggcaccatcctggatggagtgaatgtgggccggggctacggcctggtggagggccatgaccggcggcagtttgagatcacctctgtgtctgtggatgtgtggcacatcctggagtttgactacagccggctgcccaagcagagcatcggccagttccacgagggagatgcctacgtggtgaagtggaagttcatggtgtccacagctgtgggcagccggcagaagggggagcacagcgtgcgggccgccggcaaggagaagtgtgtgtacttcttctggcagggccgccacagcacagtgtctgagaagggcaccagcgccctgatgacagtggagctggatgaggagcggggggcccaggtgcaggtgctgcagggcaaggagcccccctgcttcctgcagtgcttccagggcggcatggtggtgcacagcggcagaagagaggaggaggaggagaatgtgcagagcgagtggaggctgtactgtgtgcggggggaggtgcctgtggagggcaacctgctggaggtggcctgccactgcagcagcctgcggagcaggacctccatggtggtgctgaatgtgaacaaggccctgatctacctgtggcacggctgcaaggcccaggcccacaccaaggaggtgggccgcacagctgccaacaagatcaaggagcagtgccccctggaggccggcctgcacagcagcagcaaggtgaccatccatgaatgtgatgagggcagcgagcccctgggcttctgggatgccctgggcagaagagacaggaaggcctatgactgcatgctgcaggaccccggcagcttcaactttgcccccaggctcttcatcctgagcagcagcagcggggactttgctgccacagaatttgtgtacccagcccgggcccccagcgtggtgtcctccatgcccttcctgcaggaggacctgtacagcgccccccagcctgccctcttcctggtggacaaccaccacgaggtgtacctgtggcagggctggtggcccatcgagaacaagatcactggaagtgcccgcatccgctgggccagtgacaggaagagcgccatggagaccgtgctgcagtactgcaagggcaagaacctgaagaagccagcccccaagagctacctgattcatgctggcctggagcccctgaccttcaccaacatgttccccagctgggagcaccgggaggacattgctgagatcacagagatggacacagaggtgagcaaccagatcaccctggtggaggatgtgctggccaagctgtgcaagaccatctaccccctggccgacctgctggcccggcccctgcctgagggcgtggaccccctgaagctggagatctacctgacagatgaagattttgaatttgccctggacatgaccagagatgagtacaatgccctgcctgcctggaagcaggtgaacctgaagaaggccaagggcctcttctag

SEQ ID NO: 22043 - DNA, 3387 bp, synthetic construct
  misc_feature 1..3387: note = Description of Artificial Sequence: Synthetic coding sequence
  source 1..3387: mol_type = other DNA
atgtttgctgctggggagatcaagacccccactggagagggcctgctggacagccccagcaagaccatgagcatcaaggagcggctggccctgctgaagaagtctggagaggaggactggaggaaccggctgagccggcggcaggagggcggcaaggccccagccagcagcctgcacacccaggaggccggccgcagcctcatcaagaaggaggagggcggcgtggctgatgattctgccatcagcaacctgctgtggagggtgacagagagccgggagagccagatgaccatcgaggagaggaagcagctgatcaccgtgcgggaggaggcctggaagacccggggcagaggagctgccaatgacagcacccagttcaccgtggccggccgcatggtgaagaagggcctggccagccccacagccatcacccctgtggccagccccatctgtgggaagacccggggcaccacccctgtgtccaagcccctggaggacatcgaggcccggccagacatgcagctggagagtgacctgaagctggaccggctggagaccttcctgcggcggctgaacaacaaggtgggcggcatgcatgaaacagtgctgactgtgacaggcaagtctgtgaaggaggtgatgaagccagatgatgatgagacctttgccaagttctacagatctgtggactacaacatgcccaggagccctgtggagatggatgaggactttgatgtgatctttgacccctatgcccccaagctgaccagctctgtggccgagcacaagagagctgtgcggcccaagagaagagtgcaggccagcaagaaccccctgaagatgctggccgcccgggaggacctgctgcaggagtacacagagcagaggctgaatgtggccttcatggagagcaagaggatgaaggtggagaagatgagcagcaacagcaacttcagcgaggtgaccctggccggcctggccagcaaggagaacttcagcaatgtgtccctgcggtctgtgaacctgacagagcagaacagcaacaacagcgctgtgccctacaagaggctgatgctgctgcagatcaagggcagaagacatgtgcagacccggctggtggagccccgggccagcgccctgaacagcggggactgcttcctgctgctgagcccccactgctgcttcctgtgggtgggggagtttgccaacgtgattgagaaggccaaggccagcgagctggccaccctcatccagaccaagcgggagctgggctgccgggccacctacatccagaccatcgaggagggcatcaacacccacacccatgctgccaaggacttctggaagctgctgggcggccagaccagctaccagagcgctggggaccccaaggaggatgagctgtatgaagctgccatcatcgagaccaactgcatctaccgcctgatggatgacaagctggtgcctgatgatgactactggggcaagatccccaagtgcagcctgctgcagcccaaggaggtgctggtgtttgattttggaagtgaggtgtatgtgtggcacggcaaggaggtgaccctggcccagaggaagatcgccttccagctggccaagcacctgtggaatggcacctttgattatgagaactgtgacatcaaccccctggaccctggagagtgcaaccccctcatccccaggaagggccagggccgcccagactgggccatcttcggccgcctgacagagcacaatgagaccatcctcttcaaggagaagttcctggactggacagagctgaagaggagcaatgagaagaaccctggagagctggcccagcacaaggaggaccccaggacagatgtgaaggcctatgatgtgaccaggatggtgtccatgccccagaccacagctggcaccatcctggatggagtgaatgtgggccggggctacggcctggtggagggccatgaccggcggcagtttgagatcacctctgtgtctgtggatgtgtggcacatcctggagtttgactacagccggctgcccaagcagagcatcggccagttccacgagggagatgcctacgtggtgaagtggaagttcatggtgtccacagctgtgggcagccggcagaagggggagcacagcgtgcgggccgccggcaaggagaagtgtgtgtacttcttctggcagggccgccacagcacagtgtctgagaagggcaccagcgccctgatgacagtggagctggatgaggagcggggggcccaggtgcaggtgctgcagggcaaggagcccccctgcttcctgcagtgcttccagggcggcatggtggtgcacagcggcagaagagaggaggaggaggagaatgtgcagagcgagtggaggctgtactgtgtgcggggggaggtgcctgtggagggcaacctgctggaggtggcctgccactgcagcagcctgcggagcaggacctccatggtggtgctgaatgtgaacaaggccctgatctacctgtggcacggctgcaaggcccaggcccacaccaaggaggtgggccgcacagctgccaacaagatcaaggagcagtgccccctggaggccggcctgcacagcagcagcaaggtgaccatccatgaatgtgatgagggcagcgagcccctgggcttctgggatgccctgggcagaagagacaggaaggcctatgactgcatgctgcaggaccccggcagcttcaactttgcccccaggctcttcatcctgagcagcagcagcggggactttgctgccacagaatttgtgtacccagcccgggcccccagcgtggtgtcctccatgcccttcctgcaggaggacctgtacagcgccccccagcctgccctcttcctggtggacaaccaccacgaggtgtacctgtggcagggctggtggcccatcgagaacaagatcactggaagtgcccgcatccgctgggccagtgacaggaagagcgccatggagaccgtgctgcagtactgcaagggcaagaacctgaagaagccagcccccaagagctacctgattcatgctggcctggagcccctgaccttcaccaacatgttccccagctgggagcaccgggaggacattgctgagatcacagagatggacacagaggtgagcaaccagatcaccctggtggaggatgtgctggccaagctgtgcaagaccatctaccccctggccgacctgctggcccggcccctgcctgagggcgtggaccccctgaagctggagatctacctgacagatgaagattttgaatttgccctggacatgaccagagatgagtacaatgccctgcctgcctggaagcaggtgaacctgaagaaggccaagggcctcttctag

SEQ ID NO: 22044 - DNA, 2301 bp, synthetic construct
  misc_feature 1..2301: note = Description of Artificial Sequence: Synthetic coding sequence
  source 1..2301: mol_type = other DNA
atgaagaggaagttcagcctgcgggctgctgagtttggagagcccaccagcgagcagacaggaacagctgctgggaagaccatcgcccagaccacagcccctgtgtcctggaagccccaggacagcagcgagcagccccaggagaagctgtgcaagaacccctgtgccatgtttgctgctggggagatcaagacccccactggagagggcctgctggacagccccagcaagaccatgagcatcaaggagcggctggccctgctgaagaagtctggagaggaggactggaggaaccggctgagccggcggcaggagggcggcaaggccccagccagcagcctgcacacccaggaggccggccgcagcctcatcaagaagagggtgacagagagccgggagagccagatgaccatcgaggagaggaagcagctgatcaccgtgcgggaggaggcctggaagacccggggcagaggagctgccaatgacagcacccagttcaccgtggccggccgcatggtgaagaagggcctggccagccccacagccatcacccctgtggccagccccatctgtgggaagacccggggcaccacccctgtgtccaagcccctggaggacatcgaggcccggccagacatgcagctggagagtgacctgaagctggaccggctggagaccttcctgcggcggctgaacaacaaggtgggcggcatgcatgaaacagtgctgactgtgacaggcaagtctgtgaaggaggtgatgaagccagatgatgatgagacctttgccaagttctacagatctgtggactacaacatgcccaggagccctgtggagatggatgaggactttgatgtgatctttgacccctatgcccccaagctgaccagctctgtggccgagcacaagagagctgtgcggcccaagagaagagtgcaggccagcaagaaccccctgaagatgctggccgcccgggaggacctgctgcaggagtacacagagcagaggctgaatgtggccttcatggagagcaagaggatgaaggtggagaagatgagcagcaacagcaacttcagcgaggtgaccctggccggcctggccagcaaggagaacttcagcaatgtgtccctgcggtctgtgaacctgacagagcagaacagcaacaacagcgctgtgccctacaagaggctgatgctgctgcagatcaagggcagaagacatgtgcagacccggctggtggagccccgggccagcgccctgaacagcggggactgcttcctgctgctgagcccccactgctgcttcctgtgggtgggggagtttgccaacgtgattgagaaggccaaggccagcgagctggccaccctcatccagaccaagcgggagctgggctgccgggccacctacatccagaccatcgaggagggcatcaacacccacacccatgctgccaaggacttctggaagctgctgggcggccagaccagctaccagagcgctggggaccccaaggaggatgagctgtatgaagctgccatcatcgagaccaactgcatctaccgcctgatggatgacaagctggtgcctgatgatgactactggggcaagatccccaagtgcagcctgctgcagcccaaggaggtgctggtgtttgattttggaagtgaggtgtatgtgtggcacggcaaggaggtgaccctggcccagaggaagatcgccttccagctggccaagcacctgtggaatggcacctttgattatgagaactgtgacatcaaccccctggaccctggagagtgcaaccccctcatccccaggaagggccagggccgcccagactgggccatcttcggccgcctgacagagcacaatgagaccatcctcttcaaggagaagttcctggactggacagagctgaagaggagcaatgagaagaaccctggagagctggcccagcacaaggaggaccccaggacagatgtgaaggcctatgatgtgaccaggatggtgtccatgccccagaccacagctggcaccatcctggatggagtgaatgtgggccggggctacggcctggtggagggccatgaccggcggcagtttgagatcacctctgtgtctgtggatgtgtggcacatcctggagtttgactacagccggctgcccaagcagagcatcggccagttccacgagggagatgcctacgtggtgaagtggaagttcatggtgtccacagctgtgctgcgggcctggaggggggcccggggccgggagtttgctggcagcggcctgagcctgtag

SEQ ID NO: 22045 - DNA, 1758 bp, synthetic construct
  misc_feature 1..1758: note = Description of Artificial Sequence: Synthetic coding sequence
  source 1..1758: mol_type = other DNA
atgaacagcagtgatgtgagcagcctgaagcaccccagcagcctggccagccccacagccatcacccctgtggccagccccatctgtgggaagacccggggcaccacccctgtgtccaagcccctggaggacatcgaggcccggccagacatgcagctggagagtgacctgaagctggaccggctggagaccttcctgcggcggctgaacaacaaggtgggcggcatgcatgaaacagtgctgactgtgacaggcaagtctgtgaaggaggtgatgaagccagatgatgatgagacctttgccaagttctacagatctgtggactacaacatgcccaggagccctgtggagatggatgaggactttgatgtgatctttgacccctatgcccccaagctgaccagctctgtggccgagcacaagagagctgtgcggcccaagagaagagtgcaggccagcaagaaccccctgaagatgctggccgcccgggaggacctgctgcaggagtacacagagcagaggctgaatgtggccttcatggagagcaagaggatgaaggtggagaagatgagcagcaacagcaacttcagcgaggtgaccctggccggcctggccagcaaggagaacttcagcaatgtgtccctgcggtctgtgaacctgacagagcagaacagcaacaacagcgctgtgccctacaagaggctgatgctgctgcagatcaagggcagaagacatgtgcagacccggctggtggagccccgggccagcgccctgaacagcggggactgcttcctgctgctgagcccccactgctgcttcctgtgggtgggggagtttgccaacgtgattgagaaggccaaggccagcgagctggccaccctcatccagaccaagcgggagctgggctgccgggccacctacatccagaccatcgaggagggcatcaacacccacacccatgctgccaaggacttctggaagctgctgggcggccagaccagctaccagagcgctggggaccccaaggaggatgagctgtatgaagctgccatcatcgagaccaactgcatctaccgcctgatggatgacaagctggtgcctgatgatgactactggggcaagatccccaagtgcagcctgctgcagcccaaggaggtgctggtgtttgattttggaagtgaggtgtatgtgtggcacggcaaggaggtgaccctggcccagaggaagatcgccttccagctggccaagcacctgtggaatggcacctttgattatgagaactgtgacatcaaccccctggaccctggagagtgcaaccccctcatccccaggaagggccagggccgcccagactgggccatcttcggccgcctgacagagcacaatgagaccatcctcttcaaggagaagttcctggactggacagagctgaagaggagcaatgagaagaaccctggagagctggcccagcacaaggaggaccccaggacagatgtgaaggcctatgatgtgaccaggatggtgtccatgccccagaccacagctggcaccatcctggatggagtgaatgtgggccggggctacggcctggtggagggccatgaccggcggcagtttgagatcacctctgtgtctgtggatgtgtggcacatcctggagtttgactacagccggctgcccaagcagagcatcggccagttccacgagggagatgcctacgtggtgaagtggaagttcatggtgtccacagctggatag

SEQ ID NO: 22046 - DNA, 636 bp, synthetic construct
  misc_feature 1..636: note = Description of Artificial Sequence: Synthetic coding sequence
  source 1..636: mol_type = other DNA
atggtggcccacaaccaggtggccgctgacaatgctgtgtccacagctgctgagcccaggagaagacctgagcccagcagcagcagcagcagcagccctgctgccccagcccggccccggccctgcccagctgtgcctgccccagcccctggggacacccacttccgcaccttccgcagccacgccgactaccgccgcatcacccgggccagcgccctgctggatgcctgtggcttctactggggccccctgtctgtgcatggagcccacgagcggctgcgggcagagcctgtgggcaccttcctggtgcgggacagccggcagaggaactgcttctttgccctgtctgtgaagatggccagcggccccaccagcatccgggtgcacttccaggccggccgcttccacctggatggcagccgggagagctttgactgcctgtttgagctgctggagcactacgtggccgcccccaggaggatgctgggcgcccccctgcggcagaggagagtgcggcccctgcaggagctgtgccggcagagaattgtggccaccgtgggccgggagaacctggcccgcatccccctgaaccctgtgctgcgggactacctgagcagcttccccttccagatctag

SEQ ID NO: 22047 - DNA, 678 bp, synthetic construct
  misc_feature 1..678: note = Description of Artificial Sequence: Synthetic coding sequence
  source 1..678: mol_type = other DNA
atggtgacccacagcaagtttcctgctgctggcatgagccggcccctggacaccagcctgcggctgaagaccttcagcagcaagtctgagtaccagctggtggtgaatgctgtgaggaagctgcaggagagcggcttctactggagcgctgtgactggaggagaggccaacctgctgctgtctgctgagcctgctggcaccttcctgatccgggacagcagtgaccagaggcacttcttcaccctgtctgtgaagacccagagcggcaccaagaacctgcgcatccagtgtgagggcggcagcttcagcctgcagagcgaccccaggagcacccagcctgtgcccaggtttgactgtgtgctgaagctggtgcaccactacatgcctcctcctggggcccccagcttccccagccccccaacagagcccagcagcgaggtgcctgagcagcccagcgcccagcccctgcccggcagccccccccggcgggcctactacatctacagcggcggggagaagatccccctggtgctgagccggcccctgagcagcaatgtggccaccctgcagcacctgtgcaggaagacagtgaatggccacctggacagctatgagaaggtgacccagctgcccggccccatccgggagttcctggaccagtatgatgcccccctgtag

SEQ ID NO: 22048 - DNA, 1302 bp, synthetic construct
  misc_feature 1..1302: note = Description of Artificial Sequence: Synthetic coding sequence
  source 1..1302: mol_type = other DNA
atggccgagctgcggcccagcggggcccctggccccacagcccccccagcccctggccccacagcccccccagcctttgccagcctcttccccccaggcctgcacgccatctacggggagtgccggcggctgtacccagaccagcccaaccccctgcaggtgacagccatcgtgaagtactggctgggcggccctgaccccctggactatgtgtccatgtacagaaatgtgggcagccccagcgccaacatccctgagcactggcactacatcagctttggcctgagtgacctgtatggagacaacagagtgcatgagttcaccggcacagatggccccagcggcttcggctttgagctgaccttccggctgaagcgggagaccggggagagcgccccacccacctggccagctgagctgatgcagggcctggcccgctacgtgttccagagcgagaacaccttctgcagcggggaccacgtgtcctggcacagccccctggacaacagcgagagccgcatccagcacatgctgctgacagaggacccccagatgcagcctgtgcagacccccttcggcgtggtgaccttcctgcagatcgtgggcgtgtgcacagaggagctgcacagcgcccagcagtggaatggccagggcatcctggagctgctgaggacagtgcccatcgccggcggcccctggctgatcacagacatgagaagaggagagaccatctttgaaattgacccccacctgcaggagcgggtggacaagggcattgaaacagatggcagcaacctgtctggagtgtctgccaagtgtgcctgggatgacctgagccggcccccagaagatgatgaggacagccgcagcatctgcatcggcacccagccccggcggctgagcggcaaggacacagagcagatccgggagaccctgcggcggggcctggagatcaacagcaagcctgtgctgccccccatcaacccccagaggcagaatggcctggcccatgaccgggcccccagcaggaaggacagcctggagagtgacagcagcacagccatcatcccccatgagctgatccgcacccggcagctggagagcgtgcacctgaagttcaaccaggagagcggggccctgatccccctgtgcctgcggggccgcctgctgcacggccgccacttcacctacaagagcatcactggagacatggccatcacctttgtgtccactggagtggagggcgcctttgccacagaggagcacccctatgctgcccacggcccctggctgcagctgtag

SEQ ID NO: 22049 - DNA, 1455 bp, synthetic construct
  misc_feature 1..1455: note = Description of Artificial Sequence: Synthetic coding sequence
  source 1..1455: mol_type = other DNA
atggccgagctgcggcccagcggggcccctggccccacagcccccccagcccctggccccacagcccccccagcctttgccagcctcttccccccaggcctgcacgccatctacggggagtgccggcggctgtacccagaccagcccaaccccctgcaggtgacagccatcgtgaagtactggctgggcggccctgaccccctggactatgtgtccatgtacagaaatgtgggcagccccagcgccaacatccctgagcactggcactacatcagctttggcctgagtgacctgtatggagacaacagagtgcatgagttcaccggcacagatggccccagcggcttcggctttgagctgaccttccggctgaagcgggagaccggggagagcgccccacccacctggccagctgagctgatgcagggcctggcccgctacgtgttccagagcgagaacaccttctgcagcggggaccacgtgtcctggcacagccccctggacaacagcgagagccgcatccagcacatgctgctgacagaggacccccagatgcagcctgtgcagacccccttcggcgtggtgaccttcctgcagatcgtgggcgtgtgcacagaggagctgcacagcgcccagcagtggaatggccagggcatcctggagctgctgaggacagtgcccatcgccggcggcccctggctgatcacagacatgagaagaggagagaccatctttgaaattgacccccacctgcaggagcgggtggacaagggcattgaaacagatggcagcaacctgtctggagtgtctgccaagtgtgcctgggatgacctgagccggcccccagaagatgatgaggacagccgcagcatctgcatcggcacccagccccggcggctgagcggcaaggacacagagcagatccgggagaccctgcggcggggcctggagatcaacagcaagcctgtgctgccccccatcaacccccagaggcagaatggcctggcccatgaccgggcccccagcaggaaggacagcctggagagtgacagcagcacagccatcatcccccatgagctgatccgcacccggcagctggagagcgtgcacctgaagttcaaccaggagagcggggccctgatccccctgtgcctgcggggccgcctgctgcacggccgccacttcacctacaagagcatcactggagacatggccatcacctttgtgtccactggagtggagggcgcctttgccacagaggagcacccctatgctgcccacggcccctggctgcagatcctgctgacagaggagtttgtggagaagatgctggaggacctggaggacctgaccagccctgaggagttcaagctgcccaaggagtacagctggccagagaagaagctgaaggtgtccatcctgcctgatgtggtgtttgacagccccctgcactag

SEQ ID NO: 22050 - DNA, 240 bp, synthetic construct
  misc_feature 1..240: note = Description of Artificial Sequence: Synthetic coding sequence
  source 1..240: mol_type = other DNA
atggcccggagccggctgacagccacctctgtgtcccaggtgcaggagaatggatttgtgaagaagctggagcccaagagcggctggatgaccttcctggaggtgacaggcaagatctgtgagatgctgttctgcccagaggccatcctgctgaccaggaaggacaccccctactgtgaaacaggcctcatcttcctgaccctgaccaagaccatcgccaacacctacttctacttctag

SEQ ID NO: 22051 - DNA, 240 bp, synthetic construct; identical to SEQ ID NO: 22050
  misc_feature 1..240: note = Description of Artificial Sequence: Synthetic coding sequence
  source 1..240: mol_type = other DNA

SEQ ID NO: 22052 - DNA, 1245 bp, synthetic construct
  misc_feature 1..1245: note = Description of Artificial Sequence: Synthetic coding sequence
  source 1..1245: mol_type = other DNA
atgaacctgcagcgctactggggcgagatccccatcagcagcagccagaccaacagaagcagctttgacctgctgccccgggagttccggctggtggaggtgcatgacccccccctgcaccagcccagcgccaacaagcccaagccacccaccatgctggacatccccagcgagccctgcagcctgaccatccacaccatccagctgatccagcacaacagaaggctgaggaacctgattgccacagcccaggcccagaaccagcagcagacagaaggagtgaagacagaggagagcgagcccctgcccagctgccccggcagcccccccctgcctgatgacctgctgcccctggactgcaagaaccccaatgcccccttccagatccgccacagcgaccctgagagtgacttctaccggggcaagggggagcctgtgacagagctgtcctggcacagctgccggcagctgctgtaccaggccgtggccaccatcctggcccatgctggctttgactgtgccaatgaatctgtgctggagaccctgacagatgtggcccacgagtactgcctgaagttcaccaagctgctgcgctttgctgtggaccgggaggcccggctgggccagacccccttcccagatgtgatggagcaggtgttccacgaggtgggcatcggctctgtgctgagcctgcagaagttctggcagcaccgcatcaaggactaccacagctacatgctgcagatcagcaagcagctgtctgaggagtatgagcgcatcgtgaaccctgagaaggccacagaagatgccaagcctgtgaagatcaaggaggagcctgtgtctgacatcaccttccctgtgtctgaggagctggaggccgacctggccagcggggaccagagcctgcccatgggcgtgctgggcgcccagagcgagcgcttccccagcaacctggaggtggaggccagcccccaggccagcagcgctgaggtgaatgccagccccctgtggaacctggcccacgtgaagatggagccccaggagagcgaggagggcaatgtgtctggccatggagtgctgggcagtgatgtgtttgaggagcccatgagcggcatgtctgaggccggcatcccccagagcccagatgacagcgacagcagctatggcagccacagcacagacagcctgatgggcagcagccctgtgttcaaccagcgctgcaagaagaggatgaggaagatctag

SEQ ID NO: 22053 - DNA, 840 bp, synthetic construct
  misc_feature 1..840: note = Description of Artificial Sequence: Synthetic coding sequence
  source 1..840: mol_type = other DNA
atgaacctgcagagcgggaaaggagagcctgtgacagagctgtcctggcacagctgccggcagctgctgtaccaggccgtggccaccatcctggcccacgccggctttgactgtgccaatgaatctgtgctggagaccctgacagatgtggcccacgagtactgcctgaagttcaccaagctgctgcgctttgctgtggaccgggaggcccggctgggccagacccccttcccagatgtgatggagcaggtgttccacgaggtgggcatcggctctgtgctgagcctgcagaagttctggcagcaccgcatcaaggactaccacagctacatgctgcagatcagcaagcagctgtctgaggagtatgaaagaattgtgaaccctgagaaggccacagaagatgccaagcctgtgaagatcaaggaggagcctgtgtctgacatcaccttccctgtgtctgaggagctggaggccgacctggccagcggggaccagagcctgcccatgggcgtgctgggcgcccagagcgagcgcttccccagcaacctggaggtggaggccagcccccaggccagcagcgctgaggtgaatgccagccccctgtggaacctggcccacgtgaagatggagccccaggagagcgaggagggcaatgtgtctggccacggcgtgctgggcagtgatgtgtttgaggagcccatgagcggcatgtctgaggccggcatcccccagagcccagatgacagcgacagcagctatggcagccacagcacagacagcctgatgggcagcagccctgtgttcaaccagcgctgcaagaagaggatgaggaagatctag

SEQ ID NO: 22054 - DNA, 1239 bp, synthetic construct
  misc_feature 1..1239: note = Description of Artificial Sequence: Synthetic coding sequence
  source 1..1239: mol_type = other DNA
atgctgcgctactggggcgagatccccatcagcagcagccagaccaacagaagcagctttgacctgctgccccgggagttccggctggtggaggtgcatgacccccccctgcaccagcccagcgccaacaagcccaagccacccaccatgctggacatccccagcgagccctgcagcctgaccatccacaccatccagctgatccagcacaacagaaggctgaggaacctgattgccacagcccaggcccagaaccagcagcagacagaaggagtgaagacagaggagagcgagcccctgcccagctgccccggcagcccccccctgcctgatgacctgctgcccctggactgcaagaaccccaatgcccccttccagatccgccacagcgaccctgagagtgacttctaccggggcaagggggagcctgtgacagagctgtcctggcacagctgccggcagctgctgtaccaggccgtggccaccatcctggcccatgctggctttgactgtgccaatgaatctgtgctggagaccctgacagatgtggcccacgagtactgcctgaagttcaccaagctgctgcgctttgctgtggaccgggaggcccggctgggccagacccccttcccagatgtgatggagcaggtgttccacgaggtgggcatcggctctgtgctgagcctgcagaagttctggcagcaccgcatcaaggactaccacagctacatgctgcagatcagcaagcagctgtctgaggagtatgagcgcatcgtgaaccctgagaaggccacagaagatgccaagcctgtgaagatcaaggaggagcctgtgtctgacatcaccttccctgtgtctgaggagctggaggccgacctggccagcggggaccagagcctgcccatgggcgtgctgggcgcccagagcgagcgcttccccagcaacctggaggtggaggccagcccccaggccagcagcgctgaggtgaatgccagccccctgtggaacctggcccacgtgaagatggagccccaggagagcgaggagggcaatgtgtctggccatggagtgctgggcagtgatgtgtttgaggagcccatgagcggcatgtctgaggccggcatcccccagagcccagatgacagcgacagcagctatggcagccacagcacagacagcctgatgggcagcagccctgtgttcaaccagcgctgcaagaagaggatgaggaagatctag

SEQ ID NO: 22055 - DNA, 1239 bp, synthetic construct; identical to SEQ ID NO: 22054
  misc_feature 1..1239: note = Description of Artificial Sequence: Synthetic coding sequence
  source 1..1239: mol_type = other DNA

SEQ ID NO: 22056 - DNA, 1239 bp, synthetic construct; identical to SEQ ID NO: 22054
  misc_feature 1..1239: note = Description of Artificial Sequence: Synthetic coding sequence
  source 1..1239: mol_type = other DNA

SEQ ID NO: 22057 - DNA, 1272 bp, synthetic construct
  misc_feature 1..1272: note = Description of Artificial Sequence: Synthetic coding sequence
  source 1..1272: mol_type = other DNA
atggtgggcatgagccggctgagaaatgaccggctggccgaccccctgaccggctgcagcgtgtgctgcaagagctcctggaaccagctgcaggacctgtgccgcctggccaagctgagctgcccagccctgggcatcagcaagaggaacctgtatgactttgaggtggagtacctgtgtgactacaagaagatccgggagcaggagtactacctggtgaagtggaggggctacccagattctgagagcacctgggagccccggcagaacctgaagtgtgtgcgcatcctgaagcagttccacaaggacctggagcgggagctgctgcggcggcaccacaggagcaagacccccaggcacctggaccccagcctggccaactacctggtgcagaaggccaagcagaggcgggccctgcggcgctgggagcaggagctgaatgccaagaggagccacctgggccgcatcaccgtggagaatgaggtggacctggatggccccccccgggcctttgtgtacatcaatgagtacagagtgggggagggcatcaccctgaaccaggtggccgtgggctgtgagtgccaggactgcctgtgggcccccaccggcggctgctgccctggggccagcctgcacaagtttgcctacaatgaccagggccaggtgcggctgcgggccggcctgcccatctatgagtgcaacagccgctgccgctgtggctatgactgccccaacagagtggtgcagaagggcatccgctatgacctgtgcatcttcagaacagatgatggccggggctggggcgtgaggaccctggagaagatcaggaagaacagctttgtgatggagtatgtgggggagatcatcaccagcgaggaggccgagcggcggggccagatctatgaccggcagggcgccacctacctgtttgacctggactatgtggaggatgtgtacacagtggatgctgcctactacggcaacatcagccactttgtgaaccacagctgtgaccccaacctgcaggtgtacaacgtgttcatcgacaacctggatgagcggctgccccgcatcgccttctttgccaccaggaccatccgggccggggaggagctgacctttgactacaacatgcaggtggaccctgtggacatggagagcaccaggatggacagcaactttggcctggccggcctgcccggcagccccaagaagagggtgagaattgagtgcaagtgtggcacagagagctgcaggaagtacctgttctag

SEQ ID NO: 22058 - DNA, 1239 bp, synthetic construct
  misc_feature 1..1239: note = Description of Artificial Sequence: Synthetic coding sequence
  source 1..1239: mol_type = other DNA
atggccgagaacctgaagggctgcagcgtgtgctgcaagagctcctggaaccagctgcaggacctgtgccgcctggccaagctgagctgcccagccctgggcatcagcaagaggaacctgtatgactttgaggtggagtacctgtgtgactacaagaagatccgggagcaggagtactacctggtgaagtggaggggctacccagacagcgagagcacctgggagccccggcagaacctgaagtgtgtgcgcatcctgaagcagttccacaaggacctggagcgggagctgctgcggcggcaccacaggagcaagacccccaggcacctggaccccagcctggccaactacctggtgcagaaggccaagcagaggcgggccctgcggcgctgggagcaggagctgaatgccaagaggagccacctgggccgcatcaccgtggagaatgaggtggacctggatggccccccccgggcctttgtgtacatcaatgagtacagagtgggggagggcatcaccctgaaccaggtggccgtgggctgtgagtgccaggactgcctgtgggcccccactggaggctgctgccctggggccagcctgcacaagtttgcctacaatgaccagggccaggtgcggctgcgggccggcctgcccatctatgagtgcaacagccgctgccgctgtggctatgactgccccaacagagtggtgcagaagggcatccgctatgacctgtgcatcttcagaacagatgatggccggggctggggcgtgaggaccctggagaagatcaggaagaacagctttgtgatggagtatgtgggggagatcatcaccagcgaggaggccgagcggcggggccagatctatgaccggcagggcgccacctacctgtttgacctggactatgtggaggatgtgtacacagtggatgctgcctactacggcaacatcagccactttgtgaaccacagctgtgaccccaacctgcaggtgtacaacgtgttcatcgacaacctggatgagcggctgcccagaattgccttctttgccaccaggaccatccgggccggggaggagctgacctttgactacaacatgcaggtggaccctgtggacatggagagcaccaggatggacagcaactttggcctggccggcctgcccggcagccccaagaagagggtgagaattgaatgtaaatgtggcacagagagctgcaggaagtacctgttctag

SEQ ID NO: 22059 - DNA, 648 bp, synthetic construct
  misc_feature 1..648: note = Description of Artificial Sequence: Synthetic coding sequence
  source 1..648: mol_type = other DNA
atggcctggatcagccggctgcgggagcacctggatggccccccccgggcctttgtgtacatcaatgagtacagagtgggggagggcatcaccctgaaccaggtggccgtgggctgtgagtgccaggactgcctgtgggcccccactggaggctgctgccctggggccagcctgcacaagtttgcctacaatgaccagggccaggtgcggctgcgggccggcctgcccatctatgagtgcaacagccgctgccgctgtggctatgactgccccaacagagtggtgcagaagggcatccgctatgacctgtgcatcttcagaacagatgatggccggggctggggcgtgaggaccctggagaagatcaggaagaacagctttgtgatggaccctgccctgctgactgtgtgcctgaagctgcctgccttccccatgggcaaggcctgggagacagacctgtctgtgacaggcaccctgggccggggctgcggcagaggagaagatcggctgcaggagagccccttccctgtgcctgcccccagcgtgggctgcacctacaagcccccacccaccttcagaaattccttcagcaccagccggctgtctgtggtgggcatccacggcctgctgcggcgcagcaagggctag

SEQ ID NO: 22060 - DNA, 1230 bp, synthetic construct
  misc_feature 1..1230: note = Description of Artificial Sequence: Synthetic coding sequence
  source 1..1230: mol_type = other DNA
atggccgagaacctgaagggctgcagcgtgtgctgcaagagctcctggaaccagctgcaggacctgtgccgcctggccaagctgagctgcccagccctgggcatcagcaagaggaacctgtatgactttgaggtggagtatgtgcggctgcaggaggaccccaggacaggcatcctgcccggggagatggcctggatcagccggctgcgggagcacctgggcgccacagctgagagccaggtgtgtgcctacccccaggccgtgccccagggcctgaggaagggggccgccccagctgcccctcctgtgaaggaccccccagcccctggccccaagctgggccagctgcctggagctgagggccaggccgaggccggggcccccagcctgggcgctggggcccagtgccaggcccacctgggccgcatcaccgtggagaatgaggtggacctggatggccccccccgggcctttgtgtacatcaatgagtacagagtgggggagggcatcaccctgaaccaggtggccgtgggctgtgagtgccaggactgcctgtgggcccccactggaggctgctgccccaggcactgcaccagcctgcccaccatgacccgggcccgctgtggctttgagcccggctgccccagcaccagcgccaccccagctgctgctgctgccatgacagcccagatcgtgtggtacagaagagtgtctgacatgaccagcgccagcagcgccaggatgatgggcgtggccggggccagcgccccctggaggagatttgccaggacagccagctcctggagcacctgggagaggagcctgccccagaggcggcagagcggcggccagatctatgaccggcagggcgccacctacctgtttgacctggactatgtggaggatgtgtacacagtggatgctgcctactacggcaacatcagccactttgtgaaccacagctgtgaccccaacctgcaggtgtacaacgtgttcatcgacaacctggatgagcggctgcccagcctgagcctgccccaggagcccagcggccaggcccggagcagccccctcatcaccacctgcaagtggaccccctggacctggagggccccagcctggacccccaccctggcctggctgggcagcctggcccccctgcggagcggctctgtgctgaatgcctctgtgggcctgagccctgctgccaacaccagcagcagcccctag

SEQ ID NO: 22061 - DNA, 555 bp, synthetic construct
  misc_feature 1..555: note = Description of Artificial Sequence: Synthetic coding sequence
  source 1..555: mol_type = other DNA
atggcctggatcagccggctgcgggagcacctgggcgccacagctgagagccaggtgtgtgcctacccccaggccgtgccccagggcctgaggaagggggccgccccagctgcccctcctgtgaaggaccccccagcccctggccccaagctgggccagctgcctggagctgagggccaggccgagcccggctgccccagcaccagcgccaccccagctgctgctgctgccatgacagcccagatcgtgtggtaccgccgggtgtctgacatgaccagcgccagcagcgccaggatgatgggcgtggccggggccagcgccccctggaggagatttgccaggacagccagctcctggagcacctgggagaggagcctgccccagaggcggcagagcggcggggcccggagcaccaccgtgcgggccccacccaccagcctgacctggaccacctggaggacctgcaccccctggatgccacccaccatggccaccagccccaccctgagcaccaccgtggtgacccccacctgccgctgcaccaccagcagctag

SEQ ID NO: 22062 - DNA, 285 bp, synthetic construct
  misc_feature 1..285: note = Description of Artificial Sequence: Synthetic coding sequence
  source 1..285: mol_type = other DNA
atgagagctggcttcagtgacttccagctgatccgggaccaggtgctcttcctgcaggaccaggcccagaggctgacagagtggctgcagctgagcggctttgaaaatcctgtgtctgagagcaccaccctgtgcctgcgggagcgggagaagaggatccccacctgtgtggccgtgtgtgtgcccagccctggcaccgtgcacacagccctgctgcaccccaccaccctgagccagagccgcagcagcagcgaggccaagatgctgatcatccacacagcctag

SEQ ID NO: 22063 - DNA, 594 bp, synthetic construct
  misc_feature 1..594: note = Description of Artificial Sequence: Synthetic coding sequence
  source 1..594: mol_type = other DNA
atggatgtgggcagcaaggaggtgctgatggagagccccccagactacagcgctgccccccggggccgcttcggcatcccctgctgccctgtgcacctgaagaggctgctgattgtggtggtggtggtggtgctgattgtggtggtgattgtgggcgccctgctgatgggcctgcacatgagccagaagcacacagagatggtgctggagatgagcattggagcccctgaggcccagcagaggctggccctgtctgagcacctggtgaccacagccaccttcagcatcggcagcacaggcctggtggtgtatgactaccagcagctgctgattgcctacaagccagcccctggcacctgctgctacatcatgaagatcgcccctgagagcatccccagcctggaggccctgaccaggaaggtgcacaacttccagatggagtgcagcctgcaggccaagccagctgtgcccaccagcaagctgggccaggccgagggcagagatgctggcagcgcccccagcggcggggaccctgccttcctgggcatggctgtgtccaccctgtgtggggaggtgcccctgtactacatctag

SEQ ID NO: 22064 - DNA, 576 bp, synthetic construct
  misc_feature 1..576: note = Description of Artificial Sequence: Synthetic coding sequence
  source 1..576: mol_type = other DNA
atggatgtgggcagcaaggaggtgctgatggagagccccccagactacagcgctgccccccggggccgcttcggcatcccctgctgccctgtgcacctgaagaggctgctgattgtggtggtggtggtggtgctgattgtggtggtgattgtgggcgccctgctgatgggcctgcacatgagccagaagcacacagagatggtgctggagatgagcattggagcccctgaggcccagcagaggctggccctgtctgagcacctggtgaccacagccaccttcagcatcggcagcacaggcctggtggtgtatgactaccagcagctgctgattgcctacaagccagcccctggcacctgctgctacatcatgaagatcgcccctgagagcatccccagcctggaggccctgaccaggaaggtgcacaacttccaggccaagccagctgtgcccaccagcaagctgggccaggccgagggcagagatgctggcagcgcccccagcggcggggaccctgccttcctgggcatggctgtgtccaccctgtgtggggaggtgcccctgtactacatctag

SEQ ID NO: 22065 - DNA, 1158 bp, synthetic construct
  misc_feature 1..1158: note = Description of Artificial Sequence: Synthetic coding sequence
  source 1..1158: mol_type = other DNA
atgatgatgatggccctgagcaagaccttcggccagaagcctgtgaagttccagctggaggatgatggagagttctacatgattggcagcgaggtgggcaactacctgaggatgttccggggcagcctgtacaagcgctaccccagcctgtggaggcggctggccaccgtggaggagaggaagaagatcgtggccagcagccacggcaagaagaccaagcccaacaccaaggaccacggctacaccaccctggccacctctgtgaccctgctgaaggccagcgaggtggaggagatcctggatggaaatgatgagaagtacaaggctgtgtccatcagcacagagccccccacctacctgcgggagcagaaggccaagaggaacagccagtgggtgcccaccctgcccaacagcagccaccacctggatgctgtgccctgcagcaccaccatcaacagaaacaggatgggccgggacaagaagaggaccttccccctgtgctttgatgaccatgaccctgctgtgattcatgaaaatgccagccagcctgaggtgctggtgcccatccggctggacatggagattgatggccagaagctgagagatgccttcacctggaacatgaatgagaagctgatgaccccagagatgttttctgagatcctgtgtgatgacctggacctgaaccccctgacctttgtgcctgccatcgccagcgccatccggcagcagatcgagagctaccccacagacagcatcctggaggaccagagcgaccagagggtcatcatcaagctgaacatccacgtgggcaacatcagcctggtggaccagtttgagtgggacatgtctgagaaggagaacagccctgagaagtttgccctgaagctgtgcagcgagctgggcctgggcggggagtttgtgaccaccatcgcctacagcatccggggccagctgtcctggcaccagaagacctacgccttcagcgagaaccccctgcccaccgtggagatcgccatcagaaatactggagatgctgaccagtggtgccccctgctggagaccctgacagatgctgagatggagaagaagatccgggaccaggacaggaacaccaggaggatgaggcggctggccaacacagccccagcctggtag

SEQ ID NO: 22066 - DNA, 1131 bp, synthetic construct
  misc_feature 1..1131: note = Description of Artificial Sequence: Synthetic coding sequence
  source 1..1131: mol_type = other DNA
atgatgatgatggccctgagcaagaccttcggccagaagcctgtgaagttccagctggaggatgatggagagttctacatgattggcagcgaggtgggcaactacctgaggatgttccggggcagcctgtacaagcgctaccccagcctgtggaggcggctggccaccgtggaggagaggaagaagatcgtggccagcagccatgaccacggctacaccaccctggccacctctgtgaccctgctgaaggccagcgaggtggaggagatcctggatggaaatgatgagaagtacaaggctgtgtccatcagcacagagccccccacctacctgcgggagcagaaggccaagaggaacagccagtgggtgcccaccctgcccaacagcagccaccacctggatgctgtgccctgcagcaccaccatcaacagaaacaggatgggccgggacaagaagaggaccttccccctgtgctttgatgaccatgaccctgctgtgattcatgaaaatgccagccagcctgaggtgctggtgcccatccggctggacatggagattgatggccagaagctgagagatgccttcacctggaacatgaatgagaagctgatgaccccagagatgttcagcgagatcctgtgtgatgacctggacctgaaccccctgacctttgtgcctgccatcgccagcgccatccggcagcagatcgagagctaccccacagacagcatcctggaggaccagagcgaccagagggtcatcatcaagctgaacatccacgtgggcaacatcagcctggtggaccagtttgagtgggacatgtctgagaaggagaacagccctgagaagtttgccctgaagctgtgcagcgagctgggcctgggcggggagtttgtgaccaccatcgcctacagcatccggggccagctgtcctggcaccagaagacctacgccttcagcgagaaccccctgcccaccgtggagatcgccatccggaacacaggagatgctgaccagtggtgccccctgctggagaccctgacagatgctgagatggagaagaagatccgggaccaggacaggaacaccaggaggatgaggcggctggccaacacagccccagcctggtag

SEQ ID NO: 22067 - DNA, 81 bp, synthetic construct
  misc_feature 1..81: note = Description of Artificial Sequence: Synthetic coding sequence
  source 1..81: mol_type = other DNA
tggaggcggctggccaccgtggaggagaggaagaagatcgtggccagcagccacgccctgatgaccatgacccagctgtag

SEQ ID NO: 22068 - DNA, 7626 bp, synthetic construct
  misc_feature 1..7626: note = Description of Artificial Sequence: Synthetic coding sequence
  source 1..7626: mol_type = other DNA
atggtggccctgagcctgaagatcagcattggaaatgtggtgaagaccatgcagtttgagcccagcaccatggtgtatgatgcctgccgcatcatccgggagcgcatccctgaggccccagctggccccccaagtgactttggcctcttcctgagtgatgatgaccccaagaagggcatctggctggaggccggcaaggccctggactactacatgctgagaaatggagacaccatggagtacaggaagaagcagaggcccctgaagatccgcatgctggatggcaccgtgaagaccatcatggtggatgacagcaagacagtgacagacatgctgatgaccatctgtgccagaattggcatcaccaaccatgatgagtacagcctggtgcgggagctgatggaggagaagaaggaggagatcaccggcaccctgaggaaggacaagaccctgctgagagatgagaagaagatggagaagctgaagcagaagctgcacacagatgatgagctgaactggctggaccacggccgcaccctgcgggagcagggcgtggaggagcacgagaccctgctgctgcggaggaagttcttctacagcgaccagaatgtggacagccgggaccctgtgcagctgaacctgctgtatgtgcaggccagagatgacatcctgaatggcagccaccctgtgtcctttgacaaggcctgtgaatttgctggcttccagtgccagatccagtttggcccccacaatgagcagaagcacaaggccggcttcctggacctgaaggacttcctgcccaaggagtatgtgaagcagaagggggagaggaagatcttccaggcccacaagaactgtggccagatgtctgaaattgaggccaaggtgcgctacgtgaagctggcccggagcctgaagacctacggcgtgtccttcttcctggtgaaggagaagatgaagggcaagaacaagctggtgccccggctgctgggcatcaccaaggaatgtgtgatgagggtggatgagaagaccaaggaggtgatccaggagtggaacctgaccaacatcaagcgctgggccgccagccccaagagcttcaccctggactttggagactaccaggacggctactacagcgtgcagaccacagaaggagagcagatcgcccagctgattgctggctacatcgacatcatcctgaagaagaagaagagcaaggaccacttcggcctggagggagatgaggagagcaccatgctggaggacagcgtgagccccaagaagagcacagtgctgcagcagcagtacaacagagtgggcaaggtggagcacggctctgtggccctgcctgccatcatgaggtctggggccagcggccctgagaacttccaggtgggctccatgcccccagcccagcagcagatcaccagcggccagatgcaccggggccacatgccacccctgaccagcgcccagcaggccctgaccggcaccatcaacagctccatgcaggccgtgcaggccgcccaggccaccctggatgactttgacaccctgccccccctgggccaggatgctgccagcaaggcctggaggaagaacaagatggatgagagcaagcatgagatccacagccaggtggatgccatcacagctggaacagcctctgtggtgaacctgacagctggggaccctgctgagacagactacacagctgtgggctgtgctgtgaccaccatcagcagcaacctgacagagatgagccggggcgtgaagctgctggccgccctgctggaggatgagggcggcagcggccggcccctgctgcaggccgccaagggcctggccggggctgtgtctgagctgctgcggagcgcccagcctgccagcgctgagccccggcagaacctgctgcaggccgctggaaatgtgggccaggccagcggggagctgctgcagcagattggagagagtgacacagacccccacttccaggatgccctgatgcagctggccaaggctgtggccagcgctgctgctgccctggtgctgaaggccaagtctgtggcccagaggacagaggacagcggcctgcagacccaggtgattgctgctgccacccagtgtgccctgagcaccagccagctggtggcctgcaccaaggtggtggcccccaccatcagcagccctgtgtgccaggagcagctggtggaggccggccgcctggtggccaaggctgtggagggctgtgtgtctgccagccaggccgccacagaagatggccagctgctgcggggcgtgggcgccgccgccacagctgtgacccaggccctgaatgagctgctgcagcacgtgaaggcccacgccaccggggccggccctgctggccgctatgaccaggccacagacaccatcctgactgtgacagagaacatcttcagctccatgggagatgctggggagatggtgcggcaggcccgcatcctggcccaggccaccagtgacctggtgaatgccatcaaggcagatgctgagggggagagtgacctggagaacagcaggaagctgctgtctgctgccaagatcctggctgatgccacagccaagatggtggaggccgccaagggagctgctgcccacccagattctgaggagcagcagcagaggctgcgggaggccgctgagggcctgaggatggccaccaatgctgctgcccagaatgccatcaagaagaagctggtgcagaggctggagcacgccgccaagcaggccgccgccagcgccacccagaccatcgccgccgcccagcacgccgccagcacccccaaggccagcgctggcccccagcccctgctggtgcagagctgcaaggctgtggccgagcagatccccctgctggtgcagggcgtgcggggcagccaggcccagcctgacagccccagcgcccagctggccctgattgctgccagccagagcttcctgcagcccggcggcaagatggtggccgccgccaaggcctctgtgcccaccatccaggaccaggccagcgccatgcagctgagccagtgtgccaagaacctgggcacagccctggccgagctgaggacagctgcccagaaggcccaggaggcctgtggccccctggagatggacagcgccctgtctgtggtgcagaacctggagaaggacctgcaggaggtgaaggccgccgccagagatggcaagctgaagcccctgcccggggagaccatggagaagtgcacccaggacctgggcaacagcaccaaggctgtgagcagcgccatcgcccagctgctgggggaggtggcccagggcaatgaaaattatgccggcattgctgccagagatgtggccggcggcctgcggagcctggcccaggccgcccggggcgtggccgccctgaccagtgaccctgctgtgcaggccatcgtgctggacacagccagtgatgtgctggacaaggccagcagcctcatcgaggaggccaagaaggctgctggccaccctggggaccctgagagccagcagaggctggcccaggtggccaaggctgtgacccaggccctgaacagatgtgtgtcctgcctgcccggccagagagatgtggacaatgccctgcgggctgtgggagatgccagcaagaggctgctgagtgacagcctgccccccagcacaggcaccttccaggaggcccagagccggctgaatgaagctgctgctggcctgaaccaggccgccacagagctggtgcaggccagccggggcaccccccaggacctggcccgggccagcggccgcttcggccaggacttcagcaccttcctggaggccggcgtggagatggccggccaggcccccagccaggaggaccgggcccaggtggtgagcaacctgaagggcatctccatgagcagcagcaagctgctgctggccgccaaggccctgagcacagatcctgctgcccccaacctgaagagccagctggccgccgccgcccgggctgtgacagacagcatcaaccagctgatcaccatgtgcacccagcaggcccctggccagaaggaatgtgacaatgccctgcgggagctggagaccgtgcgggagctgctggagaaccctgtgcagcccatcaatgacatgagctacttcggctgcctggacagcgtgatggagaacagcaaggtgctgggggaggccatgacaggcatcagccagaatgccaagaatggaaacctgcctgagtttggagatgccatcagcacagccagcaaggccctgtgtggcttcacagaagctgctgcccaggccgcctacctggtgggcgtgtctgaccccaacagccaggccggccagcagggcctggtggagcccacccagtttgcccgggccaaccaggccatccagatggcctgccagagcctgggggagcccggctgcacccaggcccaggtgctgtctgctgccaccatcgtggccaagcacaccagcgccctgtgcaacagctgccgcctggccagcgcccggaccaccaaccccacagccaagaggcagtttgtgcagagcgccaaggaggtggccaacagcacagccaacctggtgaagaccatcaaggccctggatggagccttcacagaagaaaatagagcccagtgccgggccgccacagcccccctgctggaggccgtggacaacctgagcgcctttgccagcaaccctgagttcagcagcatcccagcccagatcagccctgagggccgggccgccatggagcccatcgtcatcagcgccaagaccatgctggagagcgctgggggcctcatccagacagcccgggccctggccgtgaacccccgggaccccccatcctggagcgtgctggccggccacagcaggacagtgtctgacagcatcaagaagctgatcacctccatgagggacaaggcccctggccagctggagtgtgaaacagccatcgccgccctgaacagctgcctgcgggacctggaccaggccagcctggccgctgtgtcccagcagctggccccccgggagggcatcagccaggaggccctgcacacccagatgctgacagctgtgcaggagatcagccacctgattgagcccctggccaatgctgcccgggcagaggccagccagctgggccacaaggtgtcccagatggcccagtactttgagcccctgaccctggccgctgtgggcgccgccagcaagaccctgagccacccccagcagatggccctgctggaccagaccaagaccctggccgagagcgccctgcagctgctgtacacagccaaggaggccggcggcaaccccaagcaggccgcccacacccaggaggccctggaggaggccgtgcagatgatgacagaggccgtggaggacctgaccaccaccctgaatgaagctgccagcgctgctggggtggtgggcggcatggtggacagcatcacccaggccatcaaccagctggatgagggccccatgggagagcctgagggcagctttgtggactaccagaccaccatggtgaggacagccaaggccatcgctgtgacagtgcaggagatggtgaccaagagcaacaccagccctgaggagctgggccccctggccaaccagctgaccagtgactatggccgcctggccagcgaggccaagccagctgctgtggccgcagaaaatgaggagatcggcagccacatcaagcaccgggtgcaggagctgggccacggctgtgccgccctggtgaccaaggccggggccctgcagtgcagccccagtgatgcctacaccaagaaggagctgattgaatgtgccaggagagtgtctgagaaggtgagccacgtgctggccgccctgcaggccggcaacagaggcacccaggcctgcatcacagctgccagcgctgtgtctggcatcatcgctgacctggacaccaccatcatgtttgccacagctggcaccctgaaccgggagggcacagagacctttgctgaccaccgggagggcatcctgaagacagccaaggtgctggtggaggacaccaaggtgctggtgcagaatgctgctggcagccaggagaagctggcccaggccgcccagagctctgtggccaccatcacccggctggctgatgtggtgaagctgggcgccgccagcctgggcgctgaggaccctgagacccaggtggtgctgatcaatgctgtgaaggatgtggccaaggccctgggggacctgatcagcgccaccaaggctgctgctgggaaggtgggagatgatcctgctgtgtggcagctgaagaacagcgccaaggtgatggtgaccaacgtgaccagcctgctgaagacagtgaaggctgtggaggatgaggccaccaagggcacccgggccctggaggccaccacagagcacatccggcaggagctggccgtgttctgcagccctgagcccccagccaagaccagcaccccagaggacttcatccgcatgaccaagggcatcaccatggccacagccaaggctgtggccgccggcaacagctgccggcaggaggatgtgattgccacagccaacctgagcagaagagccatcgctgacatgctgcgggcctgcaaggaggccgcctaccaccctgaggtggccccagatgtgcggctgcgggccctgcactacggccgggagtgtgccaacggctacctggagctgctggaccacgtgctgctgaccctgcagaagcccagccctgagctgaagcagcagctgaccggccacagcaagagggtggccggctctgtgacagagctgatccaggccgctgaggccatgaagggcacagagtgggtggaccctgaggaccccaccgtgattgctgaaaatgagctgctgggcgctgctgctgccatcgaggccgccgccaagaagctggagcagctgaagccccgggccaagcccaaggaggctgatgagagcctgaactttgaggagcagatcctggaggccgccaagagcattgctgctgccaccagcgccctggtgaaggccgccagcgctgcccagcgggagctggtggcccagggcaaggtgggcgccatcccagccaatgccctggatgatggccagtggagccagggcctcatctctgctgccaggatggtggccgccgccaccaacaacctgtgtgaggccgccaatgctgctgtgcagggccacgccagccaggagaagctgatcagcagcgccaagcaggtggccgccagcacagcccagctgctggtggcctgcaaggtgaaggctgaccaggacagcgaggccatgaagaggctgcaggccgctggaaatgctgtgaagagggccagtgacaacctggtgaaggccgcccagaaggccgccgcctttgaggagcaggagaatgaaacagtggtggtgaaggagaagatggtgggcggcatcgcccagatcatcgccgcccaggaggagatgctgaggaaggagcgggagctggaggaggccaggaagaagctggcccagatccggcagcagcagtacaagttcctgcccagcgagctgagagatgagcactag

SEQ ID NO: 22069 - DNA, 7290 bp, synthetic construct
  misc_feature 1..7290: note = Description of Artificial Sequence: Synthetic coding sequence
  source 1..7290: mol_type = other DNA
atggtggccctgagcctgaagatcagcattggaaatgtggtgaagaccatgcagtttgagcccagcaccatggtgtatgatgcctgccgcatcatccgggagcgcatccctgaggccccagctggccccccaagtgactttggcctcttcctgagtgatgatgaccccaagaagggcatctggctggaggccggcaaggccctggactactacatgctgagaaatggagacaccatggagtacaggaagaagcagaggcccctgaagatccgcatgctggatggcaccgtgaagaccatcatggtggatgacagcaagacagtgacagacatgctgatgaccatctgtgccagaattggcatcaccaaccatgatgagtacagcctggtgcgggagctgatggaggagaagaaggaggagatcaccggcaccctgaggaaggacaagaccctgctgagagatgagaagaagatggagaagctgaagcagaagctgcacacagatgatgagctgaactggctggaccacggccgcaccctgcgggagcagggcgtggaggagcacgagaccctgctgctgcggaggaagttcttctacagcgaccagaatgtggacagccgggaccctgtgcagctgaacctgctgtatgtgcaggccagagatgacatcctgaatggcagccaccctgtgtcctttgacaaggcctgtgaatttgctggcttccagtgccagatccagtttggcccccacaatgagcagaagcacaaggccggcttcctggacctgaaggacttcctgcccaaggagtatgtgaagcagaagggggagaggaagatcttccaggcccacaagaactgtggccagatgtctgaaattgaggccaaggtgcgctacgtgaagctggcccggagcctgaagacctacggcgtgtccttcttcctggtgaaggagaagatgaagggcaagaacaagctggtgccccggctgctgggcatcaccaaggaatgtgtgatgagggtggatgagaagaccaaggaggtgatccaggagtggaacctgaccaacatcaagcgctgggccgccagccccaagagcttcaccctggactttggagactaccaggacggctactacagcgtgcagaccacagaaggagagcagatcgcccagctgattgctggctacatcgacatcatcctgaagaagaagaagagcaaggaccacttcggcctggagggagatgaggagagcaccatgctggaggacagcgtgagccccaagaagagcacagtgctgcagcagcagtacaacagagtgggcaaggtggagcacggctctgtggccctgcctgccatcatgaggtctggggccagcggccctgagaacttccaggtgggctccatgcccccagcccagcagcagatcaccagcggccagatgcaccggggccacatgccacccctgaccagcgcccagcaggccctgaccggcaccatcaacagctccatgcaggccgtgcaggccgcccaggccaccctggatgactttgacaccctgccccccctgggccaggatgctgccagcaaggcctggaggaagaacaagatggatgagagcaagcatgagatccacagccaggtggatgccatcacagctggaacagcctctgtggtgaacctgacagctggggaccctgctgagacagactacacagctgtgggctgtgctgtgaccaccatcagcagcaacctgacagagatgagccggggcgtgaagctgctggccgccctgctggaggatgagggcggcagcggccggcccctgctgcaggccgccaagggcctggccggggctgtgtctgagctgctgcggagcgcccagcctgccagcgctgagccccggcagaacctgctgcaggccgctggaaatgtgggccaggccagcggggagctgctgcagcagattggagagagtgacacagacccccacttccaggatgccctgatgcagctggccaaggctgtggccagcgctgctgctgccctggtgctgaaggccaagtctgtggcccagaggacagaggacagcggcctgcagacccaggtgattgctgctgccacccagtgtgccctgagcaccagccagctggtggcctgcaccaaggtggtggcccccaccatcagcagccctgtgtgccaggagcagctggtggaggccggccgcctggtggccaaggctgtggagggctgtgtgtctgccagccaggccgccacagaagatggccagctgctgcggggcgtgggcgccgccgccacagctgtgacccaggccctgaatgagctgctgcagcacgtgaaggcccacgccaccggggccggccctgctggccgctatgaccaggccacagacaccatcctgactgtgacagagaacatcttcagctccatgggagatgctggggagatggtgcggcaggcccgcatcctggcccaggccaccagtgacctggtgaatgccatcaaggcagatgctgagggggagagtgacctggagaacagcaggaagctgctgtctgctgccaagatcctggctgatgccacagccaagatggtggaggccgccaagggagctgctgcccacccagattctgaggagcagcagcagaggctgcgggaggccgctgagggcctgaggatggccaccaatgctgctgcccagaatgccatcaagaagaagctggtgcagaggctggagcacgccgccaagcaggccgccgccagcgccacccagaccatcgccgccgcccagcacgccgccagcacccccaaggccagcgctggcccccagcccctgctggtgcagagctgcaaggctgtggccgagcagatccccctgctggtgcagggcgtgcggggcagccaggcccagcctgacagccccagcgcccagctggccctgattgctgccagccagagcttcctgcagcccggcggcaagatggtggccgccgccaaggcctctgtgcccaccatccaggaccaggccagcgccatgcagctgagccagtgtgccaagaacctgggcacagccctggccgagctgaggacagctgcccagaaggcccaggaggcctgtggccccctggagatggacagcgccctgtctgtggtgcagaacctggagaaggacctgcaggaggtgaaggccgccgccagagatggcaagctgaagcccctgcccggggagaccatggagaagtgcacccaggacctgggcaacagcaccaaggctgtgagcagcgccatcgcccagctgctgggggaggtggcccagggcaatgaaaattatgccggcattgctgccagagatgtggccggcggcctgcggagcctggcccaggccgcccggggcgtggccgccctgaccagtgaccctgctgtgcaggccatcgtgctggacacagccagtgatgtgctggacaaggccagcagcctcatcgaggaggccaagaaggctgctggccaccctggggaccctgagagccagcagaggctggcccaggtggccaaggctgtgacccaggccctgaacagatgtgtgtcctgcctgcccggccagagagatgtggacaatgccctgcgggctgtgggagatgccagcaagaggctgctgagtgacagcctgccccccagcacaggcaccttccaggaggcccagagccggctgaatgaagctgctgctggcctgaaccaggccgccacagagctggtgcaggccagccggggcaccccccaggacctggcccgggccagcggccgcttcggccaggacttcagcaccttcctggaggccggcgtggagatggccggccaggcccccagccaggaggaccgggcccaggtggtgagcaacctgaagggcatctccatgagcagcagcaagctgctgctggccgccaaggccctgagcacagatcctgctgcccccaacctgaagagccagctggccgccgccgcccgggctgtgacagacagcatcaaccagctgatcaccatgtgcacccagcaggcccctggccagaaggaatgtgacaatgccctgcgggagctggagaccgtgcgggagctgctggagaaccctgtgcagcccatcaatgacatgagctacttcggctgcctggacagcgtgatggagaacagcaaggtgctgggggaggccatgacaggcatcagccagaatgccaagaatggaaacctgcctgagtttggagatgccatcagcacagccagcaaggccctgtgtggcttcacagaagctgctgcccaggccgcctacctggtgggcgtgtctgaccccaacagccaggccggccagcagggcctggtggagcccacccagtttgcccgggccaaccaggccatccagatggcctgccagagcctgggggagcccggctgcacccaggcccaggtgctgtctgctgccaccatcgtggccaagcacaccagcgccctgtgcaacagctgccgcctggccagcgcccggaccaccaaccccacagccaagaggcagtttgtgcagagcgccaaggaggtggccaacagcacagccaacctggtgaagaccatcaaggccctggatggagccttcacagaagaaaatagagcccagtgccgggccgccacagcccccctgctggaggccgtggacaacctgagcgcctttgccagcaaccctgagttcagcagcatcccagcccagatcagccctgagggccgggccgccatggagcccatcgtcatcagcgccaagaccatgctggagagcgctgggggcctcatccagacagcccgggccctggccgtgaacccccgggaccccccatcctggagcgtgctggccggccacagcaggacagtgtctgacagcatcaagaagctgatcacctccatgagggacaaggcccctggccagctggagtgtgaaacagccatcgccgccctgaacagctgcctgcgggacctggaccaggccagcctggccgctgtgtcccagcagctggcccccctgcaggagatcagccacctgattgagcccctggccaatgctgcccgggcagaggccagccagctgggccacaaggtgtcccagatggcccagtactttgagcccctgaccctggccgctgtgggcgccgccagcaagaccctgagccacccccagcagatggccctgctggaccagaccaagaccctggccgagagcgccctgcagctgctgtacacagccaaggaggccggcggcaaccccaagctggatgagggccccatgggagagcctgagggcagctttgtggactaccagaccaccatggtgaggacagccaaggccatcgctgtgacagtgcaggagatgattggcagccacatcaagcaccgggtgcaggagctgggccacggctgtgccgccctggtgaccaaggccggggccctgcagtgcagccccagtgatgcctacaccaagaaggagctgattgaatgtgccaggagagtgtctgagaaggtgagccacgtgctggccgccctgcaggccggcaacagaggcacccaggcctgcatcacagctgccagcgctgtgtctggcatcatcgctgacctggacaccaccatcatgtttgccacagctggcaccctgaaccgggagggcacagagacctttgctgaccaccgggagggcatcctgaagacagccaaggtgctggtggaggacaccaaggtgctggtgcagaatgctgctggcagccaggagaagctggcccaggccgcccagagctctgtggccaccatcacccggctggctgatgtggtgaagctgggcgccgccagcctgggcgctgaggaccctgagacccaggtggtgctgatcaatgctgtgaaggatgtggccaaggccctgggggacctgatcagcgccaccaaggctgctgctgggaaggtgggagatgatcctgctgtgtggcagctgaagaacagcgccaaggtgatggtgaccaacgtgaccagcctgctgaagacagtgaaggctgtggaggatgaggccaccaagggcacccgggccctggaggccaccacagagcacatccggcaggagctggcccccccagccaagaccagcaccccagaggacttcatccgcatgaccaagggcatcaccatggccacagccaaggctgtggccgccggcaacagctgccggcaggaggatgtgattgccacagccaacctgagcagaagagccatcgctgacatgctgcgggcctgcaaggaggccgcctaccaccctgaggtggccccagatgtgcggctgcgggccctgcactacggccgggagtgtgccaacggctacctggagctgctggaccacgtgctgctgaccctgcagaagcccagccctgagctgaagcagcagctgaccggccacagcaagagggtggccggctctgtgacagagctgatccaggccgctgaggccatgaagggcacagagtgggtggaccctgaggaccccaccgtgattgctgaaaatgagctgctgggcgctgctgctgccatcgaggccgccgccaagaagctggagcagctgaagccccgggccaagcccaaggaggctgatgagagcctgaactttgaggagcagatcctggaggccgccaagagcattgctgctgccaccagcgccctggtgaaggccgccagcgctgcccagcgggagctggtggcccagggcaaggtgggcgccatcccagccaatgccctggatgatggccagtggagccagggcctcatctctgctgccaggatggtggccgccgccaccaacaacctgtgtgaggccgccaatgctgctgtgcagggccacgccagccaggagaagctgatcagcagcgccaagcaggtggccgccagcacagcccagctgctggtggcctgcaaggtgaaggctgaccaggacagcgaggccatgaagaggctgcaggccgctggaaatgctgtgaagagggccagtgacaacctggtgaaggccgcccagaaggccgccgcctttgaggagcaggagaatgaaacagtggtggtgaaggagaagatggtgggcggcatcgcccagatcatcgccgcccaggaggagatgctgaggaaggagcgggagctggaggaggccaggaagaagctggcccagatccggcagcagcagtacaagttcctgcccagcgagctgagagatgagcactag

SEQ ID NO: 22070 - DNA, 3984 bp, synthetic construct
  misc_feature 1..3984: note = Description of Artificial Sequence: Synthetic coding sequence
  source 1..3984: mol_type = other DNA
atggccgccagcagaagaagccagcaccaccaccaccaccaccagcagcagctgcagcctgcccctggggccagcgcccctcctcctcctcctcctccacccctgagccctggcctggcccctggcaccaccccagccagccccacagccagcggcctggccccctttgccagccccaggcatggcctggccctgcctgaaggagatggcagccgggaccccccagaccggcccaggagcccagaccctgtggatggcaccagctgctgcagcaccaccagcaccatctgcaccgtggccgccgcccctgtggtgcctgctgtgtccaccagcagcgctgctggggtggcccccaacccagctggcagcggcagcaacaacagccccagcagcagcagcagccccaccagcagcagcagcagcagccccagcagccctggcagcagcctggccgagagccctgaggccgccggcgtgagcagcacagcccccctgggccctggagctgctggccctggcaccggggtgcctgctgtgtctggggccctgcgggagctgctggaggcctgcagaaatggagatgtgtcccgggtgaagaggctggtggatgctgccaacgtgaatgccaaggacatggccggcaggaagagcagccccctgcactttgctgctggcttcggcaggaaggatgtggtggagcacctgctgcagatgggcgccaacgtgcacgccagagatgatggcggcctcatccccctgcacaatgcctgcagctttggacatgctgaggtggtgtccctgctgctgtgccagggcgctgaccccaatgcccgggacaactggaactacacccccctgcatgaagctgccatcaagggcaagattgatgtgtgcatcgtgctgctgcagcacggggctgaccccaacatccggaacacagatggcaagagcgccctggacctggccgaccccagcgccaaggctgtgctgactggagagtacaagaaggatgagctgctggaggccgcccggtctggaaatgaggagaagctgatggccctgctgacccccctgaatgtgaactgccacgccagtgatggcaggaagagcacccccctgcacctggccgccggctacaacagagtgcgcatcgtgcagctgctgctgcagcacggggctgatgtgcacgccaaggacaagggcggcctggtgcccctgcacaatgcctgcagctatggccactatgaggtgacagagctgctgctgaagcacggggcctgtgtgaatgccatggacctgtggcagttcacccccctgcacgaggccgccagcaagaacagagtggaggtgtgcagcctgctgctgagccatggagctgaccccaccctggtgaactgccacggcaagtctgctgtggacatggcccccaccccagagctgcgggagcggctgacctatgagttcaagggccacagcctgctgcaggccgcccgggaggccgacctggccaaggtgaagaagaccctggccctggagatcatcaacttcaagcagccccagagccatgaaacagccctgcactgtgctgtggccagcctgcaccccaagaggaagcaggtgacagagctgctgctgaggaaaggagccaacgtgaatgagaagaacaaggacttcatgacccccctgcacgtggccgctgagcgggcccacaatgatgtgatggaggtgctgcacaagcacggggccaagatgaatgccctggacaccctgggccagacagccctgcaccgggccgccctggccggccacctgcagacctgccgcctgctgctgtcctatggcagtgaccccagcatcatcagcctgcagggcttcaccgctgcccagatgggaaatgaggccgtgcagcagatcctgtctgagagcacccccatccgcaccagtgatgtggactaccgcctgctggaggccagcaaggccggggacctggagaccgtgaagcagctgtgcagcagccagaatgtgaactgccgggacctggagggccgccacagcacccccctgcactttgctgctggctacaacagagtgtctgtggtggagtacctgctgcaccacggggctgatgtgcacgccaaggacaagggcggcctggtgcccctgcacaatgcctgcagctatggccactatgaggtggccgagctgctggtgagacatggagcctctgtgaatgtggccgacctgtggaagttcacccccctgcatgaagctgctgccaagggcaagtatgagatctgcaagctgctgctgaagcacggggctgaccccaccaagaagaacagagatggcaacacccccctggacctggtgaaggagggggacacagacatccaggacctgctgcggggagatgctgccctgctggatgctgccaagaagggctgcctggcccgggtgcagaagctgtgcaccccagagaacatcaactgccgggacacccagggcaggaacagcacccccctgcacctggccgccggctacaacaacctggaggtggccgagtacctgctggagcacggggctgatgtgaatgcccaggacaagggcggcctcatccccctgcacaatgctgccagctatggccacgtggacattgctgccctgctgatcaagtacaacacctgtgtgaatgccacagacaagtgggccttcacccccctgcacgaggccgcccagaagggccgcacccagctgtgtgccctgctgctggcccatggagctgaccccaccatgaagaaccaggagggccagacccccctggacctggccacagcagatgacatccgggccctgctgattgatgccatgcctcctgaggccctgcccacctgcttcaagccccaggccaccgtggtgtctgccagcctcatcagccctgccagcacccccagctgcctgtctgctgccagcagcattgacaacctgaccggccccctggccgagctggccgtgggcggggccagcaatgctggagatggagctgctggaacagagaggaaggagggggaggtggccggcctggacatgaacatcagccagttcctgaagagcctgggcctggagcacctgcgggacatctttgaaacagagcagatcaccctggatgtgctggccgacatgggccacgaggagctgaaggagatcggcatcaatgcctacggccaccgccacaagctgatcaagggcgtggagcggctgctgggcggccagcagggcaccaacccctacctgaccttccactgtgtgaaccagggcaccatcctgctggacctggcccctgaggacaaggagtaccagagcgtggaggaggagatgcagagcaccatccgggagcacagagatggcggcaatgctgggggcatcttcaaccgctacaacgtcatccgcatccagaaggtggtgaacaagaagctgcgggagcgcttctgccaccggcagaaggaggtgtctgaggagaaccacaaccaccacaatgaaagaatgctgttccacggcagccccttcatcaatgccatcatccacaagggctttgatgaaagacatgcctacatcggcggcatgtttggagctggcatctactttgctgagaacagcagcaagagcaaccagtatgtgtatggcatcggcggcggcaccggctgccccacccacaaggacaggagctgctacatctgccaccggcagatgctgttctgccgggtgaccctgggcaagagcttcctgcagttcagcaccatgaagatggcccacgcccctcctggccaccacagcgtgattggccggcccagcgtgaatggcctggcctatgcagaatatgtgatctacagaggagagcaggcctacccagagtacctgatcacctaccagatcatgaagccagaggcccccagccagacagccacagctgctgagcagaagacctag

SEQ ID NO: 22071 - DNA, 3501 bp, synthetic construct
  misc_feature 1..3501: note = Description of Artificial Sequence: Synthetic coding sequence
  source 1..3501: mol_type = other DNA
atgagcggccgccgctgtgccggcggcggggccgcctgtgccagcgctgctgctgaggccgtggagcctgctgcccgggagctgtttgaggcctgcagaaatggagatgtggagcgggtgaagaggctggtgaccccagagaaggtgaacagccgggacacagctggcaggaagagcacccccctgcactttgctgctggcttcggcaggaaggatgtggtggagtacctgctgcagaatggagccaacgtgcaggccagagatgatggcggcctcatccccctgcacaatgcctgcagctttggacatgctgaggtggtgaacctgctgctgcggcatggagctgaccccaatgcccgggacaactggaactacacccccctgcatgaagctgccatcaagggcaagattgatgtgtgcatcgtgctgctgcagcacggggctgagcccaccatccggaacacagatggccgcacagccctggacctggccgaccccagcgccaaggctgtgctgactggagagtacaagaaggatgagctgctggagagcgcccggtctggaaatgaggagaagatgatggccctgctgacccccctgaatgtgaactgccacgccagtgatggcaggaagagcacccccctgcacctggccgccggctacaacagagtgaagatcgtgcagctgctgctgcagcacggggctgatgtgcacgccaaggacaagggggacctggtgcccctgcacaatgcctgcagctatggccactatgaggtgacagagctgctggtgaagcacggggcctgtgtgaatgccatggacctgtggcagttcacccccctgcacgaggccgccagcaagaacagagtggaggtgtgcagcctgctgctgtcctatggagctgaccccaccctgctgaactgccacaacaagagcgccatcgacctggcccccaccccccagctgaaggagcggctggcctatgagttcaagggccacagcctgctgcaggccgcccgggaggctgatgtgacccgcatcaagaagcacctgagcctggagatggtgaacttcaagcacccccagacccatgaaacagccctgcactgtgccgccgccagcccctaccccaagaggaagcagatctgtgagctgctgctgaggaaaggagccaacatcaatgagaagaccaaggagttcctgacccccctgcacgtggccagcgagaaggcccacaatgatgtggtggaggtggtggtgaagcatgaggccaaggtgaatgccctggacaacctgggccagaccagcctgcaccgggccgcctactgcggccacctgcagacctgccgcctgctgctgtcctatggctgtgaccccaacatcatcagcctgcagggcttcaccgccctgcagatgggaaatgaaaatgtgcagcagctgctgcaggagggcatcagcctgggcaacagcgaggccgaccggcagctgctggaggccgccaaggctggagatgtggagaccgtgaagaagctgtgcaccgtgcagagcgtgaactgccgggacatcgagggccggcagagcacccccctgcactttgctgctggctacaacagagtgtctgtggtggagtacctgctgcagcacggggctgatgtgcacgccaaggacaagggcggcctggtgcccctgcacaatgcctgcagctatggccactatgaggtggccgagctgctggtgaagcatggagctgtggtgaatgtggccgacctgtggaagttcacccccctgcatgaagctgctgccaagggcaagtatgagatctgcaagctgctgctgcagcacggggctgaccccaccaagaagaacagagatggcaacacccccctggacctggtgaaggatggagacacagacatccaggacctgctgcggggagatgctgccctgctggatgctgccaagaagggctgcctggcccgggtgaagaagctgagcagcccagacaacgtgaactgccgggacacccagggccgccacagcacccccctgcacctggccgccggctacaacaacctggaggtggccgagtacctgctgcagcacggggctgatgtgaatgcccaggacaagggcggcctcatccccctgcacaatgctgccagctatggccacgtggatgtggccgccctgctgatcaagtacaatgcctgtgtgaatgccacagacaagtgggccttcacccccctgcacgaggccgcccagaagggccgcacccagctgtgtgccctgctgctggcccatggagctgaccccaccctgaagaaccaggagggccagacccccctggacctggtgtctgcagatgatgtgtctgccctgctgacagctgccatgcctccttctgccctgcccagctgctacaagccccaggtgctgaatggagtgcgcagccctggggccacagcagatgccctgagcagcggccccagcagccccagcagcctgtctgctgccagcagcctggacaacctgagcggcagcttcagcgagctgagctctgtggtgagcagcagcggcacagagggcgccagcagcctggagaagaaggaggtgcctggggtggacttcagcatcacccagtttgtgaggaacctgggcctggagcacctgatggacatctttgagcgggagcagatcaccctggatgtgctggtggagatgggccacaaggagctgaaggagatcggcatcaatgcctacggccaccgccacaagctgatcaagggcgtggagcggctcatcagcggccagcagggcctgaacccctacctgaccctgaacaccagcggcagcggcaccatcctgattgacctgagcccagatgacaaggagttccagagcgtggaggaggagatgcagagcacagtgcgggagcacagagatggcggccatgctgggggcatcttcaaccgctacaacatcctgaagatccagaaggtgtgcaacaagaagctgtgggagcgctacacccacaggaggaaggaggtgtctgaggagaaccacaaccacgccaatgaaagaatgctgttccacggcagcccctttgtgaatgccatcatccacaagggctttgatgaaagacatgcctacatcggcggcatgtttggagctggcatctactttgctgagaacagcagcaagagcaaccagtatgtgtatggaattggaggcggcaccggctgccctgtgcacaaggacaggagctgctacatctgccaccggcagctgctcttctgccgggtgaccctgggcaagagcttcctgcagttcagcgccatgaagatggcccacagccccccaggccaccacagcgtgacaggccggcccagcgtgaatggcctggccctggccgagtatgtgatctacagaggagagcaggcctacccagagtacctgatcacctaccagatcatgaggcctgagggcatggtggatggatag

SEQ ID NO: 22072 - DNA, 2139 bp, synthetic construct
  misc_feature 1..2139: note = Description of Artificial Sequence: Synthetic coding sequence
  source 1..2139: mol_type = other DNA
atgagggagcccgccctggccgccagcgccatggcctaccaccccttccacgcccccaggcctgctgacttccccatgtctgccttcctggccgccgcccagcccagcttcttccctgccctggccctgcccccaggggccctggccaagcccctgcctgaccccggcctggccggggctgctgctgctgctgctgctgctgctgctgctgctgaggccggcctgcacgtgtctgccctgggcccccaccccccagctgcccacctgcggagcctgaagagcctggagccagaagatgaggtggaggatgaccccaaggtgaccctggaggccaaggagctgtgggaccagttccacaagctgggcacagagatggtgatcaccaagagcggccgcaggatgttcccccccttcaaggtgcgggtgtctggcctggacaagaaggccaagtacatcctgctgatggacatcgtggccgcagatgactgccgctacaagttccacaacagccgctggatggtggccggcaaggctgaccctgagatgcccaagaggatgtacatccacccagacagccctgccactggagagcagtggatggccaagcctgtggccttccacaagctgaagctgaccaacaacatcagtgacaagcacggcttcaccatcctgaacagcatgcacaagtaccagccccgcttccacatcgtgcgggccaatgacatcctgaagctgccctacagcaccttccgcacctacgtgtttcctgagacagacttcatcgctgtgacagcctaccagaatgacaagatcacccagctgaagattgacaacaacccctttgccaagggcttccgggacacaggaaatggccggcgggagaagaggaagcagctgaccctgcccagcctgcggctgtatgaggagcactgcaagccagagagagatggagctgagagtgatgccagcagctgtgaccccccaccagcccgggagccccccaccagccctggagctgcccccagccccctgcggctgcaccgggcccgggcagaggagaagagctgtgccgctgacagcgaccctgagcctgagcggctgtctgaggagcgggccggggcccccctgggccgcagccctgccccagacagcgccagccccacccggctgacagagcctgagcgggcccgggagaggaggagccctgagcggggcaaggagcctgctgagagcggaggagatggccccttcggcctgcggagcctggagaaggagagagctgaggcccggaggaaggatgagggcaggaaggaggccgctgagggcaaggagcagggcctggcccccctggtggtgcagacagacagcgccagccccctgggcgccggccacctgcccggcctggccttcagcagccacctgcacggccagcagttcttcggccccctgggcgccggccagcccctcttcctgcaccctggccagttcaccatgggccctggggccttcagcgccatgggcatgggccacctgctggcctctgtggccggcggcggcaatggaggcggcggcggccctggaacagctgctggcctggatgctgggggcctgggccctgctgccagcgctgccagcacagctgcccccttccccttccacctgagccagcacatgctggccagccagggcatccccatgcccacctttggaggcctcttcccctacccctacacctacatggctgctgctgctgctgctgccagcgccctgcctgccaccagcgctgctgctgctgctgctgctgctgctggcagcctgagccgcagccccttcctgggcagcgcccggccccggctgcgcttcagcccctaccagatccctgtgaccatcccccccagcaccagcctgctgaccaccggcctggccagcgagggcagcaaggctgctgggggcaacagccgggagcccagccccctgcctgagctggccctgaggaaggtgggcgcccccagcagaggagccctgagccccagcggcagcgccaaggaggccgccaatgagctgcagagcatccagaggctggtgtctggcctggagagccagagggccctgagccctggccgggagagccccaagtag

SEQ ID NO: 22073 - DNA, 981 bp, synthetic construct
  misc_feature 1..981: note = Description of Artificial Sequence: Synthetic coding sequence
  source 1..981: mol_type = other DNA
atgtctgccttcctggccgccgcccagcccagcttcttccctgccctggccctgcccccaggggccctggccaagcccctgcctgaccccggcctggccggggctgctgctgctgctgctgctgctgctgctgctgctgaggccggcctgcacgtgtctgccctgggcccccaccccccagctgcccacctgcggagcctgaagagcctggagccagaagatgaggtggaggatgaccccaaggtgaccctggaggccaaggagctgtgggaccagttccacaagctgggcacagagatggtgatcaccaagtctggaagaaggatgtttcctcccttcaaggtgcgggtgtctggcctggacaagaaggccaagtacatcctgctgatggacatcgtggccgcagatgactgccgctacaagttccacaacagccgctggatggtggccggcaaggctgaccctgagatgcccaagaggatgtacatccacccagacagccctgccaccggggagcagtggatggccaagcctgtggccttccacaagctgaagctgaccaacaacatcagtgacaagcacggcttcaccatcctgaacagcatgcacaagtaccagccccgcttccacatcgtgcgggccaatgacatcctgaagctgccctacagcaccttccgcacctacgtgtttcctgagacagacttcatcgctgtgacagcctaccagaatgacaagatcacccagctgaagattgacaacaacccctttgccaagggcttccgggacacaggaaatggaagaagagagaagaggaagcagctgaccctgcccagcctgcggctgtatgaggagcactgcaagccagagagagatggagctgagagtgatgccagcagctgtgaccccccaccagcccgggagccccccaccagccctggggccgcccccagccccctgcggctgcaccgggcccggggctag

SEQ ID NO: 22074 - DNA, 996 bp, synthetic construct
  misc_feature 1..996: note = Description of Artificial Sequence: Synthetic coding sequence
  source 1..996: mol_type = other DNA
atgacagagaggcctccttctgaggccgcccggagtgacccccagctggagggcagagatgctgctgaggcctccatggccccaccccacctggtgctgctgaatggagtggccaaggagaccagcagagctgctgctgctgagccccctgtgattgagctgggcgcccggggcggccctgggggcggccctgctgggggcggcggggccgcccgggacctgaagggcagagatgctgccacagctgaggcccggcaccgggtgcccaccacagagctgtgccggcccccaggccctgccccagccccagccccagcctctgtgacagctgagctgcctggagatggccgcatggtgcagctgagccccccagccctggccgccccagctgcccctggccgggccctgctgtacagcctgagccagcccctggccagcctgggcagcggcttcttcggggagccagatgccttccccatgttcaccaccaacaacagagtgaagagaagacccagcccctatgagatggagatcacagatggcccccacaccaaggtggtgcggcgcatcttcaccaacagccgggagcgctggaggcagcagaatgtgaatggagcctttgctgagctgaggaagctgatccccacccaccccccagacaagaagctgagcaagaatgagatcctgcggctggccatgaagtacatcaacttcctggccaagctgctgaatgaccaggaggaggagggcacccagagggccaagacaggcaaggaccctgtggtgggcgctgggggcggcggcggcggcggcggcggcggggcccccccagatgacctgctgcaggatgtgctgagccccaacagcagctgtggcagcagcctggatggagctgccagcccagacagctacacagaggagcccgcccccaagcacacagcccggagcctgcacccagccatgctgcctgctgctgatggagctggccccaggtag

SEQ ID NO: 22075 - DNA, 1002 bp, synthetic construct
  misc_feature 1..1002: note = Description of Artificial Sequence: Synthetic coding sequence
  source 1..1002: mol_type = other DNA
atgacagagaggcctccttctgaggccgcccggagtgacccccagctggagggcagagatgctgctgaggcctccatggccccaccccacctggtgctgctgaatggagtggccaaggagaccagcagagctgctgctgctgagccccctgtgattgagctgggcgcccggggcggccctgggggcggccctgctgggggcggcggggccgcccgggacctgaagggcagagatgctgccacagctgaggcccggcaccgggtgcccaccacagagctgtgccggcccccaggccctgccccagccccagccccagcctctgtgacagctgagctgcctggagatggccgcatggtgcagctgagccccccagccctggccgccccagctgcccctggccgggccctgctgtacagcctgagccagcccctggccagcctgggcagccacagcggcttcttcggggagccagatgccttccccatgttcaccaccaacaacagagtgaagagaagacccagcccctatgagatggagatcacagatggcccccacaccaaggtggtgcggcgcatcttcaccaacagccgggagcgctggaggcagcagaatgtgaatggagcctttgctgagctgaggaagctgatccccacccaccccccagacaagaagctgagcaagaatgagatcctgcggctggccatgaagtacatcaacttcctggccaagctgctgaatgaccaggaggaggagggcacccagagggccaagacaggcaaggaccctgtggtgggcgctgggggcggcggcggcggcggcggcggcggggcccccccagatgacctgctgcaggatgtgctgagccccaacagcagctgtggcagcagcctggatggagctgccagcccagacagctacacagaggagcccgcccccaagcacacagcccggagcctgcacccagccatgctgcctgctgctgatggagctggccccaggtag

SEQ ID NO: 22076 - DNA, 996 bp, synthetic construct; identical to SEQ ID NO: 22074
  misc_feature 1..996: note = Description of Artificial Sequence: Synthetic coding sequence
  source 1..996: mol_type = other DNA

SEQ ID NO: 22077 - DNA, 993 bp, synthetic construct
  misc_feature 1..993: note = Description of Artificial Sequence: Synthetic coding sequence
  source 1..993: mol_type = other DNA
atggagcacctgggcccccaccacctgcaccctggccacgccgagcccatcagctttggaattgaccagatcctgaacagcccagaccagggcggctgcatgggccctgccagccggctgcaggatggagaatatggcctgggctgcctggtgggcggggcctacacctatggaggcggcggcagcgctgctgccaccggggccggcggggccggggcctacggcaccggcggccctgggggccctgggggccctgctgggggcggcggggcctgcagcatgggccccctgaccggcagctacaacgtgaacatggccctggccggcggccctggccctgggggcggcggcggcagcagcggcggggccggggccctgtctgctgctggggtcatccgggtgcctgcccaccggcccctggccggggctgtggcccacccccagcccctggccaccggcctgcccaccgtgcccagcgtgcctgccatgcctggggtgaacaacctgaccggcctgaccttcccctggatggagagcaacagacgctacaccaaggaccgcttcaccggccacccctaccagaacagaacaccacccaagaagaagaagcccaggaccagcttcacccggctgcagatctgtgagctggagaagcgcttccaccggcagaagtacctggccagcgctgagcgggccgccctggccaaggccctgaagatgacagatgcccaggtgaagacctggttccagaacagaaggaccaagtggaggcggcagacagctgaggagcgggaggccgagcggcagcaggccaaccgcatcctgctgcagctgcagcaggaggccttccagaagagcctggcccagcccctgcctgctgaccccctgtgtgtgcacaacagcagcctgtttgccctgcagaacctgcagccctggagcgatgacagcaccaagatcacctctgtgacctctgtggccagcgcctgtgagtag

SEQ ID NO: 22078 - DNA, 774 bp, synthetic construct
  misc_feature 1..774: note = Description of Artificial Sequence: Synthetic coding sequence
  source 1..774: mol_type = other DNA
atggagcacctgggcccccaccacctgcaccctggccacgccgagcccatcagctttggaattgaccagatcctgaacagcccagaccagggcggctgcatgggccctgccagccggctgcaggatggagaatatggcctgggctgcctggtgggcggggcctacacctatggaggcggcggcagcgctgctgccaccggggccggcggggccggggcctacggcaccggcggccctgggggccctgggggccctgctgggggcggcggggcctgcagcatgggccccctgaccggcagctacaacgtgaacatggccctggccggcggccctggccctgggggcggcggcggcagcagcggcggggccggggccctgtctgctgctggggtcatccgggtgcctgcccaccggcccctggccggggctgtggcccacccccagcccctggccaccggcctgcccaccgtgcccagcgtgcctgccatgcctggggtgaacaacctgaccggcctgaccttcccctggatggagagcaacagacgctacaccaaggaccgcttcaccggccacccctaccagaacagaacaccacccaagaagaagaagcccaggaccagcttcacccggctgcagatctgtgagctggagaagcgcttccaccggcagaagtacctggccagcgctgagcgggccgccctggccaaggccctgaagatgacagatgcccaggtgaagacctggttccagaacagaaggaccaagtggaggtag

SEQ ID NO: 22079 - DNA, 345 bp, synthetic construct
  misc_feature 1..345: note = Description of Artificial Sequence: Synthetic coding sequence
  source 1..345: mol_type = other DNA
atggctgaatgtcccaccctgggggaggccgtgacagaccacccagaccggctgtgggcctgggagaagtttgtgtacctggatgagaagcagcacgcctggctgcccctgaccatcgagatcaaggaccggctgcagctgcgggtgctgctgcggcgggaggatgtggtgctgggccggcccatgacccccacccagatcggccccagcctgctgcccatcatgtggcagctgtacccagatggccgctaccgcagcagtgacagcagcttctggaggctggtgtaccacatcaagattgatggagtggaggacatgctgctggagctgctgcctgatgactag

SEQ ID NO: 22080 - DNA, 345 bp, synthetic construct; identical to SEQ ID NO: 22079
  misc_feature 1..345: note = Description of Artificial Sequence: Synthetic coding sequence
  source 1..345: mol_type = other DNA

SEQ ID NO: 22081 - DNA, 345 bp, synthetic construct; identical to SEQ ID NO: 22079
  misc_feature 1..345: note = Description of Artificial Sequence: Synthetic coding sequence
  source 1..345: mol_type = other DNA

SEQ ID NO: 22082 - DNA, 345 bp, synthetic construct; identical to SEQ ID NO: 22079
  misc_feature 1..345: note = Description of Artificial Sequence: Synthetic coding sequence
  source 1..345: mol_type = other DNA

SEQ ID NO: 22083 - DNA, 1407 bp, synthetic construct
  misc_feature 1..1407: note = Description of Artificial Sequence: Synthetic coding sequence
  source 1..1407: mol_type = other DNA
atggacagcctggccagcctggtgctgtgtggggtgtccctgctgctgtctggaacagtggagggcgccatggacctgatcctgatcaacagcctgcccctggtgtctgatgctgagaccagcctgacctgcatcgccagcggctggaggcctcatgagcccatcaccatcggccgggactttgaggccctgatgaaccagcaccaggaccccctggaggtgacccaggatgtgacccgggagtgggccaagaaggtggtgtggaagcgggagaaggccagcaagatcaatggagcctacttctgtgagggccgggtgcggggggaggccatccgcatccgcaccatgaagatgaggcagcaggccagcttcctgcctgccaccctgaccatgacagtggacaagggggacaacgtgaacatctccttcaagaaggtgctgatcaaggaggaggatgctgtgatctacaagaatggcagcttcatccacagcgtgcccaggcatgaggtgcctgacatcctggaggtgcacctgccccacgcccagccccaggatgctggggtgtacagcgcccgctacatcggcggcaacctcttcaccagcgccttcacccggctgattgtgagaagatgtgaggcccagaagtggggccctgagtgcaaccacctgtgcacagcctgcatgaacaacggggtgtgccatgaagatactggagagtgcatctgccccccaggcttcatgggccgcacctgtgagaaggcctgtgagctgcacaccttcggccgcacctgcaaggagcgctgcagcggccaggagggctgcaagagctatgtgttctgcctgcctgacccctacggctgcagctgtgccaccggctggaagggcctgcagtgcaatgaaggcatccagaggatgacccccaagatcgtggacctgcctgaccacatcgaggtgaacagcggcaagttcaaccccatctgcaaggccagcggctggcccctgcccaccaatgaggagatgaccctggtgaagccagatggcaccgtgctgcaccccaaggacttcaaccacacagaccacttctctgtggccatcttcaccatccaccgcatcctgcccccagacagcggcgtgtgggtgtgcagcgtgaacacagtggccggcatggtggagaagcccttcaacatctctgtgaaggtgctgcccaagcccctgaatgccccaaatgtgattgacaccggccacaactttgctgtgatcaacatcagcagcgagccctactttggagatggccccatcaagagcaagaagctgctgtacaagcctgtgaaccactatgaggcctggcagcacatccaggtgtccatggagaagcagaggctgaccaaggccaacagcgacatctag

SEQ ID NO: 22084 - DNA, 3375 bp, synthetic construct
  misc_feature 1..3375: note = Description of Artificial Sequence: Synthetic coding sequence
  source 1..3375: mol_type = other DNA
atggacagcctggccagcctggtgctgtgtggggtgtccctgctgctgtctggaacagtggagggcgccatggacctgatcctgatcaacagcctgcccctggtgtctgatgctgagaccagcctgacctgcatcgccagcggctggaggcctcatgagcccatcaccatcggccgggactttgaggccctgatgaaccagcaccaggaccccctggaggtgacccaggatgtgacccgggagtgggccaagaaggtggtgtggaagcgggagaaggccagcaagatcaatggagcctacttctgtgagggccgggtgcggggggaggccatccgcatccgcaccatgaagatgaggcagcaggccagcttcctgcctgccaccctgaccatgacagtggacaagggggacaacgtgaacatctccttcaagaaggtgctgatcaaggaggaggatgctgtgatctacaagaatggcagcttcatccacagcgtgcccaggcatgaggtgcctgacatcctggaggtgcacctgccccacgcccagccccaggatgctggggtgtacagcgcccgctacatcggcggcaacctcttcaccagcgccttcacccggctgattgtgagaagatgtgaggcccagaagtggggccctgagtgcaaccacctgtgcacagcctgcatgaacaacggggtgtgccatgaagatactggagagtgcatctgccccccaggcttcatgggccgcacctgtgagaaggcctgtgagctgcacaccttcggccgcacctgcaaggagcgctgcagcggccaggagggctgcaagagctatgtgttctgcctgcctgacccctacggctgcagctgtgccaccggctggaagggcctgcagtgcaatgaggcctgccaccctggcttctacggccctgactgcaagctgcgctgcagctgcaacaatggagagatgtgtgaccgcttccagggctgcctgtgcagccctggctggcagggcctgcagtgtgagcgggagggcatccagaggatgacccccaagatcgtggacctgcctgaccacatcgaggtgaacagcggcaagttcaaccccatctgcaaggccagcggctggcccctgcccaccaatgaggagatgaccctggtgaagccagatggcaccgtgctgcaccccaaggacttcaaccacacagaccacttctctgtggccatcttcaccatccaccgcatcctgcccccagattctggagtgtgggtgtgcagcgtgaacacagtggccggcatggtggagaagcccttcaacatctctgtgaaggtgctgcccaagcccctgaatgcccccaacgtcatcgacaccggccacaactttgctgtgatcaacatcagcagcgagccctactttggagatggccccatcaagagcaagaagctgctgtacaagcctgtgaaccactatgaggcctggcagcacatccaggtgaccaatgaaattgtgaccctgaactacctggagcccaggacagaatatgagctgtgtgtgcagctggtgagaagaggagagggcggggagggccaccctggccctgtgcggcgcttcaccacagccagcatcggcctgcccccaccccggggcctgaacctgctgcccaagagccagaccaccctgaacctgacctggcagcccatcttccccagcagtgaagatgacttctacgtggaggtggagcggcgctctgtgcagaagagtgaccagcagaacatcaaggtgcccggcaacctgacctctgtgctgctgaacaacctgcacccccgggagcagtatgtggtgcgggcccgggtgaacaccaaggcccagggcgagtggagcgaggacctgacagcctggaccctgagtgacatcctgcccccccagcctgagaacatcaagatcagcaacatcacccacagcagcgctgtgatctcctggaccatcctggatggctacagcatcagcagcatcaccatccgctacaaggtgcagggcaagaatgaagaccagcacgtggatgtgaagatcaagaatgccaccatcacccagtaccagctgaagggcctggagcctgagacagcctaccaggtggacatctttgctgagaacaacatcggcagcagcaacccagccttcagccatgagctggtgaccctgcctgagagccaggccccagctgacctgggcggcggcaagatgctgctgattgccatcctgggcagcgctggcatgacctgcctgactgtgctgctggccttcctgatcatcctgcagctgaagagggccaacgtgcagaggaggatggcccaggccttccagaatgtgcgggaggagcctgctgtgcagttcaacagcggcaccctggccctgaacaggaaggtgaagaacaacccagaccccaccatctaccctgtgctggactggaatgacatcaagttccaggacgtcatcggggagggcaactttggccaggtgctgaaggcccgcatcaagaaggatggcctgaggatggatgctgccatcaagaggatgaaggagtatgccagcaaggatgaccaccgggactttgctggggagctggaggtgctgtgcaagctgggccaccaccccaacatcatcaacctgctgggcgcctgtgagcaccggggctacctgtacctggccatcgagtatgcccctcatggcaacctgctggacttcctgaggaagagccgggtgctggagacagatcctgcctttgccatcgccaacagcacagccagcaccctgagcagccagcagctgctgcactttgctgctgatgtggcccggggcatggactacctgagccagaagcagttcatccaccgggacctggccgccaggaacatcctggtgggggagaactacgtggccaagattgctgactttggcctgagccggggccaggaggtgtatgtgaagaagaccatgggccgcctgcctgtgcgctggatggccatcgagagcctgaactacagcgtgtacaccaccaacagtgatgtgtggagctatggagtgctgctgtgggagatcgtgtccctgggcggcaccccctactgcggcatgacctgtgccgagctgtatgagaagctgccccagggctaccgcctggagaagcccctgaactgtgatgatgaggtgtatgacctgatgaggcagtgctggagggagaagccctatgaaagacccagctttgcccagatcctggtgtccctgaacaggatgctggaggagaggaagacctacgtgaacaccaccctgtatgagaagttcacctacgccggcatcgactgcagcgctgaggaggccgcctag

SEQ ID NO: 22085 - DNA, 3246 bp, synthetic construct
  misc_feature 1..3246: note = Description of Artificial Sequence: Synthetic coding sequence
  source 1..3246: mol_type = other DNA
atggacagcctggccagcctggtgctgtgtggggtgtccctgctgctgtctggaacagtggagggcgccatggacctgatcctgatcaacagcctgcccctggtgtctgatgctgagaccagcctgacctgcatcgccagcggctggaggcctcatgagcccatcaccatcggccgggactttgaggccctgatgaaccagcaccaggaccccctggaggtgacccaggatgtgacccgggagtgggccaagaaggtggtgtggaagcgggagaaggccagcaagatcaatggagcctacttctgtgagggccgggtgcggggggaggccatccgcatccgcaccatgaagatgaggcagcaggccagcttcctgcctgccaccctgaccatgacagtggacaagggggacaacgtgaacatctccttcaagaaggtgctgatcaaggaggaggatgctgtgatctacaagaatggcagcttcatccacagcgtgcccaggcatgaggtgcctgacatcctggaggtgcacctgccccacgcccagccccaggatgctggggtgtacagcgcccgctacatcggcggcaacctcttcaccagcgccttcacccggctgattgtgagaagatgtgaggcccagaagtggggccctgagtgcaaccacctgtgcacagcctgcatgaacaacggggtgtgccatgaagatactggagagtgcatctgccccccaggcttcatgggccgcacctgtgagaaggcctgtgagctgcacaccttcggccgcacctgcaaggagcgctgcagcggccaggagggctgcaagagctatgtgttctgcctgcctgacccctacggctgcagctgtgccaccggctggaagggcctgcagtgcaatgaaggcatccagaggatgacccccaagatcgtggacctgcctgaccacatcgaggtgaacagcggcaagttcaaccccatctgcaaggccagcggctggcccctgcccaccaatgaggagatgaccctggtgaagccagatggcaccgtgctgcaccccaaggacttcaaccacacagaccacttctctgtggccatcttcaccatccaccgcatcctgcccccagacagcggcgtgtgggtgtgcagcgtgaacacagtggccggcatggtggagaagcccttcaacatctctgtgaaggtgctgcccaagcccctgaatgccccaaatgtgattgacaccggccacaactttgctgtgatcaacatcagcagcgagccctactttggagatggccccatcaagagcaagaagctgctgtacaagcctgtgaaccactatgaggcctggcagcacatccaggtgaccaatgagatcgtgaccctgaactacctggagcccaggacagaatatgagctgtgtgtgcagctggtgcggcggggggagggcggggagggccaccctggccctgtgcggcgcttcaccacagccagcatcggcctgcccccaccccggggcctgaacctgctgcccaagagccagaccaccctgaacctgacctggcagcccatcttccccagcagtgaagatgacttctacgtggaggtggagaggagatctgtgcagaagagtgaccagcagaacatcaaggtgcccggcaacctgacctctgtgctgctgaacaacctgcacccccgggagcagtatgtggtgcgggcccgggtgaacaccaaggcccagggcgagtggagcgaggacctgacagcctggaccctgagtgacatcctgcccccccagcctgagaacatcaagatcagcaacatcacccacagcagcgctgtgatctcctggaccatcctggatggctacagcatcagcagcatcaccatccgctacaaggtgcagggcaagaatgaagaccagcacgtggatgtgaagatcaagaatgccaccatcacccagtaccagctgaagggcctggagcctgagacagcctaccaggtggacatctttgctgagaacaacatcggcagcagcaacccagccttcagccatgagctggtgaccctgcctgagagccaggccccagctgacctgggcggcggcaagatgctgctgattgccatcctgggcagcgctggcatgacctgcctgactgtgctgctggccttcctgatcatcctgcagctgaagagggccaacgtgcagaggaggatggcccaggccttccagaatgtgcgggaggagcctgctgtgcagttcaacagcggcaccctggccctgaacaggaaggtgaagaacaacccagaccccaccatctaccctgtgctggactggaatgacatcaagttccaggatgtgattggagagggcaactttggccaggtgctgaaggcccgcatcaagaaggatggcctgaggatggatgctgccatcaagaggatgaaggagtatgccagcaaggatgaccaccgggactttgctggggagctggaggtgctgtgcaagctgggccaccaccccaacatcatcaacctgctgggcgcctgtgagcaccggggctacctgtacctggccattgaatatgccccccacggcaacctgctggacttcctgaggaagagccgggtgctggagacagatcctgcctttgccatcgccaacagcacagccagcaccctgagcagccagcagctgctgcactttgctgctgatgtggcccggggcatggactacctgagccagaagcagttcatccaccgggacctggccgccaggaacatcctggtgggagaaaattatgtggccaagattgctgactttggcctgagccggggccaggaggtgtatgtgaagaagaccatgggccgcctgcctgtgcgctggatggccatcgagagcctgaactacagcgtgtacaccaccaacagtgatgtgtggagctatggagtgctgctgtgggagatcgtgtccctgggcggcaccccctactgcggcatgacctgtgccgagctgtatgagaagctgccccagggctaccgcctggagaagcccctgaactgtgatgatgaggtgtatgacctgatgaggcagtgctggagggagaagccctatgagcggcccagctttgcccagatcctggtgtccctgaacaggatgctggaggagaggaagacctacgtgaacaccaccctgtatgagaagttcacctacgccggcatcgactgcagcgctgaggaggccgcctag

SEQ ID NO: 22086 - DNA, 3375 bp, synthetic construct; identical to SEQ ID NO: 22084
  misc_feature 1..3375: note = Description of Artificial Sequence: Synthetic coding sequence
  source 1..3375: mol_type = other DNA

SEQ ID NO: 22087 - DNA, 2931 bp, synthetic construct
  misc_feature 1..2931: note = Description of Artificial Sequence: Synthetic coding sequence
  source 1..2931: mol_type = other DNA
atggacagcctggccagcctggtgctgtgtggggtgtccctgctgctgagcgccagcttcctgcctgccaccctgaccatgacagtggacaagggggacaacgtgaacatctccttcaagaaggtgctgatcaaggaggaggatgctgtgatctacaagaatggcagcttcatccacagcgtgcccaggcatgaggtgcctgacatcctggaggtgcacctgccccacgcccagccccaggatgctggggtgtacagcgcccgctacatcggcggcaacctcttcaccagcgccttcacccggctgattgtgagaagatgtgaggcccagaagtggggccctgagtgcaaccacctgtgcacagcctgcatgaacaacggggtgtgccatgaagatactggagagtgcatctgccccccaggcttcatgggccgcacctgtgagaaggcctgtgagctgcacaccttcggccgcacctgcaaggagcgctgcagcggccaggagggctgcaagagctatgtgttctgcctgcctgacccctacggctgcagctgtgccaccggctggaagggcctgcagtgcaatgaaggcatccagaggatgacccccaagatcgtggacctgcctgaccacatcgaggtgaacagcggcaagttcaaccccatctgcaaggccagcggctggcccctgcccaccaatgaggagatgaccctggtgaagccagatggcaccgtgctgcaccccaaggacttcaaccacacagaccacttctctgtggccatcttcaccatccaccgcatcctgcccccagacagcggcgtgtgggtgtgcagcgtgaacacagtggccggcatggtggagaagcccttcaacatctctgtgaaggtgctgcccaagcccctgaatgccccaaatgtgattgacaccggccacaactttgctgtgatcaacatcagcagcgagccctactttggagatggccccatcaagagcaagaagctgctgtacaagcctgtgaaccactatgaggcctggcagcacatccaggtgaccaatgagatcgtgaccctgaactacctggagcccaggacagaatatgagctgtgtgtgcagctggtgcggcggggggagggcggggagggccaccctggccctgtgcggcgcttcaccacagccagcatcggcctgcccccaccccggggcctgaacctgctgcccaagagccagaccaccctgaacctgacctggcagcccatcttccccagcagtgaagatgacttctacgtggaggtggagaggagatctgtgcagaagagtgaccagcagaacatcaaggtgcccggcaacctgacctctgtgctgctgaacaacctgcacccccgggagcagtatgtggtgcgggcccgggtgaacaccaaggcccagggcgagtggagcgaggacctgacagcctggaccctgagtgacatcctgcccccccagcctgagaacatcaagatcagcaacatcacccacagcagcgctgtgatctcctggaccatcctggatggctacagcatcagcagcatcaccatccgctacaaggtgcagggcaagaatgaagaccagcacgtggatgtgaagatcaagaatgccaccatcacccagtaccagctgaagggcctggagcctgagacagcctaccaggtggacatctttgctgagaacaacatcggcagcagcaacccagccttcagccatgagctggtgaccctgcctgagagccaggccccagctgacctgggcggcggcaagatgctgctgattgccatcctgggcagcgctggcatgacctgcctgactgtgctgctggccttcctgatcatcctgcagctgaagagggccaacgtgcagaggaggatggcccaggccttccagaaccgggaggagcctgctgtgcagttcaacagcggcaccctggccctgaacaggaaggtgaagaacaacccagaccccaccatctaccctgtgctggactggaatgacatcaagttccaggacgtcatcggggagggcaactttggccaggtgctgaaggcccgcatcaagaaggatggcctgaggatggatgctgccatcaagaggatgaaggagtatgccagcaaggatgaccaccgggactttgctggggagctggaggtgctgtgcaagctgggccaccaccccaacatcatcaacctgctgggcgcctgtgagcaccggggctacctgtacctggccatcgagtatgcccctcatggcaacctgctggacttcctgaggaagagccgggtgctggagacagatcctgcctttgccatcgccaacagcacagccagcaccctgagcagccagcagctgctgcactttgctgctgatgtggcccggggcatggactacctgagccagaagcagttcatccaccgggacctggccgccaggaacatcctggtgggggagaactacgtggccaagattgctgactttggcctgagccggggccaggaggtgtatgtgaagaagaccatgggccgcctgcctgtgcgctggatggccatcgagagcctgaactacagcgtgtacaccaccaacagtgatgtgtggagctatggagtgctgctgtgggagatcgtgtccctgggcggcaccccctactgcggcatgacctgtgccgagctgtatgagaagctgccccagggctaccgcctggagaagcccctgaactgtgatgatgaggtgtatgacctgatgaggcagtgctggagggagaagccctatgaaagacccagctttgcccagatcctggtgtccctgaacaggatgctggaggagaggaagacctacgtgaacaccaccctgtatgagaagttcacctacgccggcatcgactgcagcgctgaggaggccgcctag

SEQ ID NO: 22088 - DNA, 7884 bp, synthetic construct
  misc_feature 1..7884: note = Description of Artificial Sequence: Synthetic coding sequence
  source 1..7884: mol_type = other DNA
atggagaagctgcacggccacgtgtctgcccacccagacatcctgagcctggagaaccgctgcctggccatgctgcctgacctgcagcccctggagaagctgcaccagcacgtgtccacccacagcgacatcctgagcctgaagaaccagtgcctggccaccctgcctgacctgaagaccatggagaagccccacggctacgtgtctgcccacccagacatcctgagcctggagaaccagtgcctggccaccctgagtgacctgaagaccatggagaagccccacggccacgtgtctgcccacccagacatcctgagcctggagaaccgctgcctggccaccctgagcagcctgaagagcacagtgtctgccagccccctcttccagagcctgcagatcagccacatgacccaggccgacctgtacagagtgaacaacagcaactgcctgctgtctgagccccccagctggagggcccagcacttcagcaagggcctggacctgagcacctgccccatcgccctgaagagcatcagcgccacagaaacagcccaggaggccaccctgggccgctggtttgattctgaggagaagaagggagctgagacccagatgcccagctacagcctgagcctgggggaggaggaggaggtggaggacctggccgtgaagctgaccagcggggacagcgagagccaccctgagcccacagaccacgtgctgcaggagaagaagatggccctgctgagcctgctgtgcagcaccctggtgtctgaggtgaacatgaacaacaccagtgaccccaccctggccgccatctttgagatctgccgggagctggccctgctggagcctgagttcatcctgaaggccagcctgtatgcccggcagcagctgaatgtgagaaatgtggccaacaacatcctggccatcgccgccttcctgcctgcctgccggccccacctgcggcgctacttctgtgccatcgtgcagctgcccagcgactggatccaggtggccgagctgtaccagagcctggccgagggggacaagaacaagctggtgcccctgcctgcctgcctgaggacagccatgacagacaagtttgcccagtttgatgagtaccagctggccaagtacaaccccaggaagcaccgggccaagaggcacccccggcggccccccaggagccctggcatggagccccccttcagccaccgctgcttcccccgctacatcggcttcctgcgggaggagcagaggaagtttgagaaggccggggacacagtgtctgagaagaagaaccccccacgcttcaccctgaagaagctggtgcagaggctgcacatccacaagccagcccagcacgtgcaggccctgctgggctaccgctaccccagcaacctgcagctgttcagccgcagccggctgcccggcccctgggacagcagccgggccggcaagaggatgaagctgagcaggcctgagacctgggagcgggagctgagcctgcggggcaacaaggcctctgtgtgggaggagctgattgaaaatggcaagctgcccttcatggccatgctgaggaacctgtgcaacctgctgcgggtgggcatcagcagccgccaccacgagctgatcctgcagaggctgcagcacgccaagagcgtcatccacagccggcagttccccttccgcttcctgaatgcccatgatgccattgatgccctggaggcccagctgaggaaccaggccctgcccttccccagcaacatcaccctgatgaggcgcatcctgaccagaaatgagaagaaccggccccggcggcgcttcctgtgccacctgagccggcagcagctgaggatggccatgagaattcctgtgctgtatgagcagctgaagcgggagaagctgcgggtgcacaaggcccggcagtggaagtatgatggagagatgctgaaccgctaccggcaggccctggagacagctgtgaacctgtctgtgaagcacagcctgcccctgctgcccggccgcacagtgctggtgtacctgacagatgccaatgctgaccggctgtgccccaagagcaacccccagggcccccccctgaactatgccctgctgctgattggcatgatgatcaccagggctgagcaggtggatgtggtgctgtgtggcggggacaccctgaagacagctgtgctgaaggccgaggagggcatcctgaagacagccatcaagctgcaggcccaggtgcaggagtttgatgaaaatgatggctggagcctgaacaccttcggcaagtacctgctgagcctggccggccagagggtgcctgtggacagagtcatcctgctgggccagagcatggatgatggcatgatcaacgtggccaagcagctgtactggcagagggtgaacagcaagtgcctgtttgtgggcatcctgctgcggcgggtgcagtacctgagcacagacctgaaccccaatgatgtgaccctgagcggctgcacagatgccatcctgaagttcatcgccgagcacggggccagccacctgctggagcacgtgggccagatggacaagatcttcaagatccccccacctcctgggaagacaggagtgcagagcctgcggcccctggaggaggacacccccagccccctggcccctgtgtcccagcagggctggaggagcatccgcctcttcatcagcagcaccttccgggacatgcatggagagcgggacctgctgctgcggtctgtgctgcctgccctgcaggcccgggccgccccccaccgcatcagcctgcatggaattgacctgcgctggggcgtgacagaggaggagaccaggaggaaccggcagctggaggtgtgcctgggggaggtggagaatgcccagctgtttgtgggcatcctgggcagccgctatggctacatccccccatcctacaacctgcctgaccacccccacttccactgggcccagcagtaccccagcggccgctctgtgacagagatggaggtgatgcagttcctgaacagaaaccagaggctgcagcccagcgcccaggccctgatctacttccgggacagcagcttcctgagctctgtgcctgatgcctggaagagtgactttgtgtctgagagcgaggaggccgcccggcgcatcagcgagctgaagagctacctgagccggcagaagggcatcacctgccgccgctacccctgtgagtggggcggcgtggccgccggccggccctacgtgggcggcctggaggagtttggccagctggtgctgcaggatgtgtggaacatgatccagaagctgtacctgcagcccggggccctgctggagcagcctgtgtccatcccagatgatgacctggtgcaggccaccttccagcagctgcagaagccacccagccctgcccggccccggctgctgcaggacacagtgcagaggctgatgctgccccacggccgcctgagcctggtgacaggccagagcggccagggcaagacagccttcctggccagcctggtgtctgccctgcaggccccagatggagccaaggtggccagcctggtgttcttccacttcagcggggcccggccagaccagggcctggccctgaccctgctgcggcggctgtgcacctacctgcggggccagctgaaggagcccggggccctgcccagcacctaccgcagcctggtgtgggagctgcagcagaggctgctgcccaagtctgctgagagcctgcaccctggccagacccaggtgctgatcattgatggagctgaccggctggtggaccagaatggccagctgatcagtgactggatccccaagaagctgccccgctgtgtgcacctggtgctgtctgtgtccagtgatgctggcctgggggagaccctggagcagagccagggcgcccacgtgctggccctgggccccctggaggccagcgcccgggcccggctggtgcgggaggagctggccctgtatggcaagaggctggaggagagccccttcaacaaccagatgaggctgctgctggtgaagcgggagagcggccggcccctgtacctgcggctggtgacagaccacctgcggctcttcaccctgtatgagcaggtgtctgagcggctgcggaccctgcctgccaccgtgcccctgctgctgcagcacatcctgagcaccctggagaaggagcacggcccagatgtgctgccccaggccctgacagccctggaggtgaccaggagcggcctgactgtggaccagctgcacggcgtgctgtctgtgtggaggaccctgcccaagggcaccaagtcctgggaggaggccgtggccgccggcaacagcggggacccctaccccatgggcccctttgcctgcctggtgcagagcctgcggagcctgctgggggagggccccctggagaggcctggggcccggctgtgcctgcctgatggccccctgaggacagctgccaagcgctgctacggcaagaggcctggcctggaggacacagcccacatcctgattgctgcccagctgtggaagacctgtgatgctgatgccagcggcaccttccgcagctgccccccagaggccctgggggacctgccctaccacctgctgcagagcggcaacagaggcctgctgagcaagttcctgaccaacctgcacgtggtggccgcccacctggagctgggcctggtgtcccggctgctggaggcccacgccctgtatgccagctctgtgcccaaggaggagcagaagctgcctgaggctgatgtggccgtgttccgcaccttcctgcggcagcaggccagcatcctgagccagtacccccggctgctgccccagcaggccgccaaccagcccctggacagccccctgtgccaccaggccagcctgctgagccgccgctggcacctgcagcacaccctgcgctggctgaacaagcccaggaccatgaagaaccagcagagcagcagcctgagcctggccgtgagcagcagccccacagctgtggccttcagcaccaacggccagagagctgctgtgggcacagccaatggaacagtgtacctgctggacctgcggacctggcaggaggagaagtctgtggtgtctggctgtgatggcatcagcgcctgcctcttcctgagtgatgacaccctcttcctgacagcctttgatggcctgctggagctgtgggacctgcagcacggctgccgggtgctgcagaccaaggcccaccagtaccagatcaccggctgctgcctgagcccagactgccgcctgctggccaccgtgtgcctgggcggctgcctgaagctgtgggacacagtgcggggccagctggccttccagcacacctaccccaagagcctgaactgtgtggccttccaccctgagggccaggtgattgccaccggctcctgggccggcagcatctccttcttccaggtggatggcctgaaggtgaccaaggacctgggcgcccctggggccagcatccgcaccctggccttcaacgtgcctggaggagtggtggccgtgggccgcctggacagcatggtggagctgtgggcctggagggagggcgcccggctggccgccttccctgcccaccacggctttgtggccgccgccctcttcctgcatgctggctgccagctgctgacagctggggaggatggcaaggtgcaggtgtggagcggcagcctgggccggccccggggccacctgggcagcctgagcctgagccctgccctgtctgtggccctgagcccagatggagacagagtggccgtgggctacagagcagatggcatccgcatctacaagatcagcagcggcagccagggcgcccagggccaggccctggatgtggccgtgtctgccctggcctggctgagccccaaggtgctggtgtctggagcagaagatggcagcctgcagggctgggccctgaaggaatgttccctgcagagcctgtggctgctgagccgcttccagaagcctgtgctgggcctggccaccagccaggagctgctggccagcgccagcgaggacttcaccgtgcagctgtggccccggcagctgctgacccggccccacaaggccgaggacttcccctgtggcacagagctgcggggccacgagggccctgtgtcctgctgcagcttcagcacagatggcggcagcctggccaccggcggccgggacaggagcctgctgtgctgggatgtgaggacccccaagacccctgtgctgatccacagcttccctgcctgccaccgggactgggtgacaggctgtgcctggaccaaggacaacctgctgatcagctgcagcagtgatggctctgtgggcctgtgggaccctgagagcggccagaggctgggccagttcctgggccaccagagcgctgtgtctgctgtggccgctgtggaggagcacgtggtgtctgtgtccagagatggcaccctgaaggtgtgggaccaccagggcgtggagctgaccagcatcccagcccacagcggccccatcagccactgtgccgccgccatggagcccagggctgctggccagcccggcagcgagctgctggtggtgacagtgggcctggatggagccacccggctgtggcaccccctgctggtgtgccagacccacaccctgctgggccacagcggccctgtgcgggctgctgctgtgtctgagaccagcggcctgatgctgacagcctctgaagatggctctgtgcggctgtggcaggtgcccaaggaggctgatgacacctgcatccccaggagcagcgctgctgtgacagctgtggcctgggccccagatggctccatggctgtgtctggcaaccaggccggggagctgatcctgtggcaggaggccaaggctgtggccacagcccaggcccctggccacatcggggccctgatctggagcagcgcccacaccttctttgtgctgtctgcagatgagaagatcagcgagtggcaggtgaagctgaggaaaggaagtgcccctggcaacctgagcctgcacctgaaccgcatcctgcaggaggacctgggcgtgctgaccagcctggactgggccccagatggccacttcctgatcctggccaaggctgacctgaagctgctgtgcatgaagccaggagatgcccccagcgagatctggagcagctacacagagaaccccatgatcctgagcacccacaaggagtatggcatctttgtgctgcagcccaaggaccccggggtgctgtccttcctgcggcagaaggagagcggggagtttgaggagcggctgaactttgacatcaacctggagaaccccagcaggaccctcatcagcatcacccaggccaagccagagagcgagagcagcttcctgtgtgccagcagtgatggcatcctgtggaacctggccaagtgcagccctgagggggagtggaccactggaaacatgtggcagaagaaggccaacaccccagagacccagaccccaggcacagaccccagcacctgccgggagagtgatgcctccatggacagtgatgcctccatggattctgagcccaccccccacctgaagacccggcagaggaggaagatccacagcggctctgtgacagccctgcacgtgctgcctgagctgctggtgacagccagcaaggacagagatgtgaagctgtgggagcggcccagcatgcagctgctgggcctcttccgctgtgagggctctgtgtcctgcctggagccctggctgggcgccaacagcaccctgcagctggccgtgggagatgtgcagggcaatgtgtacttcctgaactgggagtag

SEQ ID NO: 22089 - DNA, 7860 bp, synthetic construct
  misc_feature 1..7860: note = Description of Artificial Sequence: Synthetic coding sequence
  source 1..7860: mol_type = other DNA
atggagaagctgcacggccacgtgtctgcccacccagacatcctgagcctggagaaccgctgcctggccatgctgcctgacctgcagcccctggagaagctgcaccagcacgtgtccacccacagcgacatcctgagcctgaagaaccagtgcctggccaccctgcctgacctgaagaccatggagaagccccacggctacgtgtctgcccacccagacatcctgagcctggagaaccagtgcctggccaccctgagtgacctgaagaccatggagaagccccacggccacgtgtctgcccacccagacatcctgagcctggagaaccgctgcctggccaccctgagcagcctgaagagcacagtgtctgccagccccctcttccagagcctgcagatcagccacatgacccaggccgacctgtacagagtgaacaacagcaactgcctgctgtctgagccccccagctggagggcccagcacttcagcaagggcctggacctgagcacctgccccatcgccctgaagagcatcagcgccacagaaacagcccaggaggccaccctgggccgctggtttgattctgaggagaagaagggagctgagacccagatgcccagctacagcctgagcctgggggaggaggaggaggtggaggacctggccgtgaagctgaccagcggggacagcgagagccaccctgagcccacagaccacgtgctgcaggagaagaagatggccctgctgagcctgctgtgcagcaccctggtgtctgaggtgaacatgaacaacaccagtgaccccaccctggccgccatctttgagatctgccgggagctggccctgctggagcctgagttcatcctgaaggccagcctgtatgcccggcagcagctgaatgtgagaaatgtggccaacaacatcctggccatcgccgccttcctgcctgcctgccggccccacctgcggcgctacttctgtgccatcgtgcagctgcccagcgactggatccaggtggccgagctgtaccagagcctggccgagggggacaagaacaagctggtgcccctgcctgcctgcctgaggacagccatgacagacaagtttgcccagtttgatgagtaccagctggccaagtacaaccccaggaagcaccgggccaagaggcacccccggcggccccccaggagccctggcatggagccccccttcagccaccgctgcttcccccgctacatcggcttcctgcgggaggagcagaggaagtttgagaaggccggggacacagtgtctgagaagaagaaccccccacgcttcaccctgaagaagctggtgcagaggctgcacatccacaagccagcccagcacgtgcaggccctgctgggctaccgctaccccagcaacctgcagctgttcagccgcagccggctgcccggcccctgggacagcagccgggccggcaagaggatgaagctgagcaggcctgagacctgggagcgggagctgagcctgcggggcaacaaggcctctgtgtgggaggagctgattgaaaatggcaagctgcccttcatggccatgctgaggaacctgtgcaacctgctgcgggtgggcatcagcagccgccaccacgagctgatcctgcagaggctgcagcacgccaagagcgtcatccacagccggcagttccccttccgcttcctgaatgcccatgatgccattgatgccctggaggcccagctgaggaaccaggccctgcccttccccagcaacatcaccctgatgaggcgcatcctgaccagaaatgagaagaaccggccccggcggcgcttcctgtgccacctgagccggcagcagctgaggatggccatgagaattcctgtgctgtatgagcagctgaagcgggagaagctgcgggtgcacaaggcccggcagtggaagtatgatggagagatgctgaaccgctaccggcaggccctggagacagctgtgaacctgtctgtgaagcacagcctgcccctgctgcccggccgcacagtgctggtgtacctgacagatgccaatgctgaccggctgtgccccaagagcaacccccagggcccccccctgaactatgccctgctgctgattggcatgatgatcaccagggctgagcaggtggatgtggtgctgtgtggcggggacaccctgaagacagctgtgctgaaggccgaggagggcatcctgaagacagccatcaagctgcaggcccaggtgcaggagtttgatgaaaatgatggctggagcctgaacaccttcggcaagtacctgctgagcctggccggccagagggtgcctgtggacagagtcatcctgctgggccagagcatggatgatggcatgatcaacgtggccaagcagctgtactggcagagggtgaacagcaagtgcctgtttgtgggcatcctgctgcggcgggtgcagtacctgagcacagacctgaaccccaatgatgtgaccctgagcggctgcacagatgccatcctgaagttcatcgccgagcacggggccagccacctgctggagcacgtgggccagatggacaagatcttcaagatccccccacctcctgggaagacaggagtgcagagcctgcggcccctggaggaggacacccccagccccctggcccctgtgtcccagcagggctggaggagcatccgcctcttcatcagcagcaccttccgggacatgcatggagagcgggacctgctgctgcggtctgtgctgcctgccctgcaggcccgggccgccccccaccgcatcagcctgcatggaattgacctgcgctggggcgtgacagaggaggagaccaggaggaaccggcagctggaggtgtgcctgggggaggtggagaatgcccagctgtttgtgggcatcctgggcagccgctatggctacatccccccatcctacaacctgcctgaccacccccacttccactgggcccagcagtaccccagcggccgctctgtgacagagatggaggtgatgcagttcctgaacagaaaccagaggctgcagcccagcgcccaggccctgatctacttccgggacagcagcttcctgagctctgtgcctgatgcctggaagagtgactttgtgtctgagagcgaggaggccgcccggcgcatcagcgagctgaagagctacctgagccggcagaagggcatcacctgccgccgctacccctgtgagtggggcggcgtggccgccggccggccctacgtgggcggcctggaggagtttggccagctggtgctgcaggatgtgtggaacatgatccagaagctgtacctgcagcccggggccctgctggagcagcctgtgtccatcccagatgatgacctggtgcaggccaccttccagcagctgcagaagccacccagccctgcccggccccggctgctgcaggacacagtgcagaggctgatgctgccccacggccgcctgagcctggtgacaggccagagcggccagggcaagacagccttcctggccagcctggtgtctgccctgcaggccccagatggagccaaggtggccagcctggtgttcttccacttcagcggggcccggccagaccagggcctggccctgaccctgctgcggcggctgtgcacctacctgcggggccagctgaaggagcccggggccctgcccagcacctaccgcagcctggtgtgggagctgcagcagaggctgctgcccaagtctgctgagagcctgcaccctggccagacccaggtgctgatcattgatggagctgaccggctggtggaccagaatggccagctgatcagtgactggatccccaagaagctgccccgctgtgtgcacctggtgctgtctgtgtccagtgatgctggcctgggggagaccctggagcagagccagggcgcccacgtgctggccctgggccccctggaggccagcgcccgggcccggctggtgcgggaggagctggccctgtatggcaagaggctggaggagagccccttcaacaaccagatgaggctgctgctggtgaagcgggagagcggccggcccctgtacctgcggctggtgacagaccacctgcggctcttcaccctgtatgagcaggtgtctgagcggctgcggaccctgcctgccaccgtgcccctgctgctgcagcacatcctgagcaccctggagaaggagcacggcccagatgtgctgccccaggccctgacagccctggaggtgaccaggagcggcctgactgtggaccagctgcacggcgtgctgtctgtgtggaggaccctgcccaagggcaccaagtcctgggaggaggccgtggccgccggcaacagcggggacccctaccccatgggcccctttgcctgcctggtgcagagcctgcggagcctgctgggggagggccccctggagaggcctggggcccggctgtgcctgcctgatggccccctgaggacagctgccaagcgctgctacggcaagaggcctggcctggaggacacagcccacatcctgattgctgcccagctgtggaagacctgtgatgctgatgccagcggcaccttccgcagctgccccccagaggccctgggggacctgccctaccacctgctgcagagcggcaacagaggcctgctgagcaagttcctgaccaacctgcacgtggtggccgcccacctggagctgggcctggtgtcccggctgctggaggcccacgccctgtatgccagctctgtgcccaaggaggagcagaagctgcctgaggctgatgtggccgtgttccgcaccttcctgcggcagcaggccagcatcctgagccagtacccccggctgctgccccagcaggccgccaaccagcccctggacagccccctgtgccaccaggccagcctgctgagccgccgctggcacctgcagcacaccctgcgctggctgaacaagcccaggaccatgaagaaccagcagagcagcagcctgagcctggccgtgagcagcagccccacagctgtggccttcagcaccaacggccagagagctgctgtgggcacagccaatggaacagtgtacctgctggacctgcggacctggcaggaggagaagtctgtggtgtctggctgtgatggcatcagcgcctgcctcttcctgagtgatgacaccctcttcctgacagcctttgatggcctgctggagctgtgggacctgcagcacggctgccgggtgctgcagaccaaggcccaccagtaccagatcaccggctgctgcctgagcccagactgccgcctgctggccaccgtgtgcctgggcggctgcctgaagctgtgggacacagtgcggggccagctggccttccagcacacctaccccaagagcctgaactgtgtggccttccaccctgagggccaggtgattgccaccggctcctgggccggcagcatctccttcttccaggtggatggcctgaaggtgaccaaggacctgggcgcccctggggccagcatccgcaccctggccttcaacgtgcctggaggagtggtggccgtgggccgcctggacagcatggtggagctgtgggcctggagggagggcgcccggctggccgccttccctgcccaccacggctttgtggccgccgccctcttcctgcatgctggctgccagctgctgacagctggggaggatggcaaggtgcaggtgtggagcggcagcctgggccggccccggggccacctgggcagcctgagcctgagccctgccctgtctgtggccctgagcccagatggagacagagtggccgtgggctacagagcagatggcatccgcatctacaagatcagcagcggcagccagggcgcccagggccaggccctggatgtggccgtgtctgccctggcctggctgagccccaaggtgctggtgtctggagcagaagatggcagcctgcagggctgggccctgaaggaatgttccctgcagagcctgtggctgctgagccgcttccagaagcctgtgctgggcctggccaccagccaggagctgctggccagcgccagcgaggacttcaccgtgcagctgtggccccggcagctgctgacccggccccacaaggccgaggacttcccctgtggcacagagctgcggggccacgagggccctgtgtcctgctgcagcttcagcacagatggcggcagcctggccaccggcggccgggacaggagcctgctgtgctgggatgtgaggacccccaagacccctgtgctgatccacagcttccctgcctgccaccgggactgggtgacaggctgtgcctggaccaaggacaacctgctgatcagctgcagcagtgatggctctgtgggcctgtgggaccctgagagcggccagaggctgggccagttcctgggccaccagagcgctgtgtctgctgtggccgctgtggaggagcacgtggtgtctgtgtccagagatggcaccctgaaggtgtgggaccaccagggcgtggagctgaccagcatcccagcccacagcggccccatcagccactgtgccgccgccatggagcccagggctgctggccagcccggcagcgagctgctggtggtgacagtgggcctggatggagccacccggctgtggcaccccctgctggtgtgccagacccacaccctgctgggccacagcggccctgtgcgggctgctgctgtgtctgagaccagcggcctgatgctgacagcctctgaagatggctctgtgcggctgtggcaggtgcccaaggaggctgatgacacctgcatccccaggagcagcgctgctgtgacagctgtggcctgggccccagatggctccatggctgtgtctggcaaccaggccggggagctgatcctgtggcaggaggccaaggctgtggccacagcccaggcccctggccacatcggggccctgatctggagcagcgcccacaccttctttgtgctgtctgcagatgagaagatcagcgagtggcaggtgaagctgaggaaaggaagtgcccctggcaacctgagcctgcacctgaaccgcatcctgcaggaggacctgggcgtgctgaccagcctggactgggccccagatggccacttcctgatcctggccaaggctgacctgaagctgctgtgcatgaagccaggagatgcccccagcgagatctggagcagctacacagagaaccccatgatcctgagcacccacaaggagtatggcatctttgtgctgcagcccaaggaccccggggtgctgtccttcctgcggcagaaggagagcggggagtttgaggagcggctgaactttgacatcaacctggagaaccccagcaggaccctcatcagcatcacccaggccaagccagagagcgccctgatgggcagctatggcacctggcccaatgctgcccagaaggaaaatggcccccaggtgacctgtggcaggaagaagaacaccccagagacccagaccccaggcacagaccccagcacctgccgggagagtgatgcctccatggacagtgatgcctccatggattctgagcccaccccccacctgaagacccggcagaggaggaagatccacagcggctctgtgacagccctgcacgtgctgcctgagctgctggtgacagccagcaaggacagagatgtgaagctgtgggagcggcccagcatgcagctgctgggcctcttccgctgtgagggctctgtgtcctgcctggagccctggctgggcgccaacagcaccctgcagctggccgtgggagatgtgcagggcaatgtgtacttcctgaactgggagtag

SEQ ID NO: 22090 - DNA, 2031 bp, synthetic construct
  misc_feature 1..2031: note = Description of Artificial Sequence: Synthetic coding sequence
  source 1..2031: mol_type = other DNA
atgaagaaccagcagagcagcagcctgagcctggccgtgagcagcagccccacagctgtggccttcagcaccaacggccagagagctgctgtgggcacagccaatggaacagtgtacctgctggacctgcggacctggcaggaggagaagtctgtggtgtctggctgtgatggcatcagcgcctgcctcttcctgagtgatgacaccctcttcctgacagcctttgatggcctgctggagctgtgggacctgcagcacggctgccgggtgctgcagaccaaggcccaccagtaccagatcaccggctgctgcctgagcccagactgccgcctgctggccaccgtgtgcctgggcggctgcctgaagctgtgggacacagtgcggggccagctggccttccagcacacctaccccaagagcctgaactgtgtggccttccaccctgagggccaggtgattgccaccggctcctgggccggcagcatctccttcttccaggtggatggcctgaaggtgaccaaggacctgggcgcccctggggccagcatccgcaccctggccttcaacgtgcctggaggagtggtggccgtgggccgcctggacagcatggtggagctgtgggcctggagggagggcgcccggctggccgccttccctgcccaccacggctttgtggccgccgccctcttcctgcatgctggctgccagctgctgacagctggggaggatggcaaggtgcaggtgtggagcggcagcctgggccggccccggggccacctgggcagcctgagcctgagccctgccctgtctgtggccctgagcccagatggagacagagtggccgtgggctacagagcagatggcatccgcatctacaagatcagcagcggcagccagggcgcccagggccaggccctggatgtggccgtgtctgccctggcctggctgagccccaaggtgctggtgtctggagcagaagatggcagcctgcagggctgggccctgaaggaatgttccctgcagagcctgtggctgctgagccgcttccagaagcctgtgctgggcctggccaccagccaggagctgctggccagcgccagcgaggacttcaccgtgcagctgtggccccggcagctgctgacccggccccacaaggccgaggacttcccctgtggcacagagctgcggggccacgagggccctgtgtcctgctgcagcttcagcacagatggcggcagcctggccaccggcggccgggacaggagcctgctgtgctgggatgtgaggacccccaagacccctgtgctgatccacagcttccctgcctgccaccgggactgggtgacaggctgtgcctggaccaaggacaacctgctgatcagctgcagcagtgatggctctgtgggcctgtgggaccctgagagcggccagaggctgggccagttcctgggccaccagagcgctgtgtctgctgtggccgctgtggaggagcacgtggtgtctgtgtccagagatggcaccctgaaggtgtgggaccaccagggcgtggagctgaccagcatcccagcccacagcggccccatcagccactgtgccgccgccatggagcccagggctgctggccagcccggcagcgagctgctggtggtgacagtgggcctggatggagccacccggctgtggcaccccctgctggtgtgccagacccacaccctgctgggccacagcggccctgtgcgggctgctgctgtgtctgagaccagcggcctgatgctgacagcctctgaagatggctctgtgcggctgtggcaggtgcccaaggaggctgatgacacctgcatccccaggagcagcgctgctgtgacagctgtggcctgggccccagatggctccatggctgtgtctggcaaccaggccggggagctgatcctgtggcaggaggccaaggctgtggccacagcccagagcagccctgagcccaacagcactggaggcctgcggggagctgacaagagcggcctgggcagctag

SEQ ID NO: 22091 - DNA, 501 bp, synthetic construct
  misc_feature 1..501: note = Description of Artificial Sequence: Synthetic coding sequence
  source 1..501: mol_type = other DNA
atggagaagctgcacggccacgtgtctgcccacccagacatcctgagcctggagaaccgctgcctggccatgctgcctgacctgcagcccctggagaagctgcaccagcacgtgtccacccacagcgacatcctgagcctgaagaaccagtgcctggccaccctgcctgacctgaagaccatggagaagccccacggctacgtgtctgcccacccagacatcctgagcctggagaaccagtgcctggccaccctgagtgacctgaagaccatggagaagccccacggccacgtgtctgcccacccagacatcctgagcctggagaaccgctgcctggccaccctgagcagcctgaagagcacagtgtctgccagccccctcttccagagcctgcagatcagccacatgacccaggccgacctgtacagagtgaacaacagcaactgcctgctgtctgagccccccagctggagggcccagcacttcagcaagggcctgtag

SEQ ID NO: 22092 - DNA, 1260 bp, synthetic construct
  misc_feature 1..1260: note = Description of Artificial Sequence: Synthetic coding sequence
  source 1..1260: mol_type = other DNA
atggctgaagatgtgtcctctgctgcccccagcccccggggctgtgctgatggaagagatgctgaccccacagaggagcagatggccgagacagaaagaaatgatgaggagcagtttgagtgccaggagctgctggagtgccaggtgcaggtgggcgcccctgaggaggaggaggaggaggaggaggatgctggcctggtggccgaggccgaggccgtggccgccggctggatgctggacttcctgtgcctgagcctgtgccgggccttcagagatggccgctctgaggacttccggaggaccaggaacagcgctgaggccatcatccacggcctgagcagcctgacagcctgccagctgcggaccatctacatctgccagttcctgaccagaattgctgctgggaagaccctggatgcccagtttgaaaatgatgagcgcatcacccccctggagagcgccctgatgatctggggcagcattgagaaggagcatgacaagctgcacgaggagatccagaacctgatcaagatccaggccatcgctgtgtgcatggagaatggaaacttcaaggaggccgaggaggtgtttgagcgcatctttggagaccccaacagccacatgcccttcaagagcaagctgctgatgatcatcagccagaaggacaccttccacagcttcttccagcacttctcctacaaccacatgatggagaagatcaagagctatgtgaactacgtgctgtctgagaagagcagcaccttcctgatgaaggccgccgccaaggtggtggagagcaagaggaccaggaccatcaccagccaggacaagcccagcggaaatgatgtggagatggagacagaggccaacctggacaccaggaagaggagccacaagaacctcttcctgagcaagctgcagcacggcacccagcagcaggacctgaacaagaaggagcggcgggtgggcaccccccagagcaccaagaagaagaaggagagcagaagagccacagagagccgcatccctgtgtccaagagccagcctgtgaccccagagaagcaccgggccaggaagaggcaggcctggctgtgggaggaggacaagaacctgcggtctggagtgaggaagtacggggagggcaactggagcaagatcctgctgcactacaagttcaacaacagaacatctgtgatgctgaaggaccgctggaggaccatgaagaagctgaagctgatcagcagtgacagcgaggactag

SEQ ID NO: 22093 - DNA, 1320 bp, synthetic construct
  misc_feature 1..1320: note = Description of Artificial Sequence: Synthetic coding sequence
  source 1..1320: mol_type = other DNA
atggctgaagatgtgtcctctgctgcccccagcccccggggctgtgctgatggaagagatgctgaccccacagaggagcagatggccgagacagaaagaaatgatgaggagcagtttgagtgccaggagctgctggagtgccaggtgcaggtgggcgcccctgaggaggaggaggaggaggaggaggatgctggcctggtggccgaggccgaggccgtggccgccggctggatgctggacttcctgtgcctgagcctgtgccgggccttcagagatggccgctctgaggacttccggaggaccaggaacagcgctgaggccatcatccacggcctgagcagcctgacagcctgccagctgcggaccatctacatctgccagttcctgaccagaattgctgctgggaagaccctggatgcccagtttgaaaatgatgagcgcatcacccccctggagagcgccctgatgatctggggcagcattgagaaggagcatgacaagctgcacgaggagatccagaacctgatcaagatccaggccatcgctgtgtgcatggagaatggaaacttcaaggaggccgaggaggtgtttgagcgcatctttggagaccccaacagccacatgcccttcaagagcaagctgctgatgatcatcagccagaaggacaccttccacagcttcttccagcacttctcctacaaccacatgatggagaagatcaagagctatgtgaactacgtgctgtctgagaagagcagcaccttcctgatgaaggccgccgccaaggtggtggagagcaagaggaccaggaccatcaccagccaggacaagcccagcggaaatgatgtggagatggagacagaggccaacctggacaccaggaagtctgtgtctgacaagcagagcgctgtgacagagagcagcgagggcaccgtgtccctgctgcggagccacaagaacctcttcctgagcaagctgcagcacggcacccagcagcaggacctgaacaagaaggagcggcgggtgggcaccccccagagcaccaagaagaagaaggagagcagaagagccacagagagccgcatccctgtgtccaagagccagcctgtgaccccagagaagcaccgggccaggaagaggcaggcctggctgtgggaggaggacaagaacctgcggtctggagtgaggaagtacggggagggcaactggagcaagatcctgctgcactacaagttcaacaacagaacatctgtgatgctgaaggaccgctggaggaccatgaagaagctgaagctgatcagcagtgacagcgaggactag

SEQ ID NO: 22094 - DNA, 153 bp, synthetic construct
  misc_feature 1..153: note = Description of Artificial Sequence: Synthetic coding sequence
  source 1..153: mol_type = other DNA
atcttcagcatcatccacggcctgagcagcctgacagcctgccagctgcggaccatctacatctgccagttcctgaccagaattgctgctgggaagaccctggatgcccagtttgaaaatgatgagcgcatcacccccctggagagcgcctag

SEQ ID NO: 22095 - DNA, 1503 bp, synthetic construct
  misc_feature 1..1503: note = Description of Artificial Sequence: Synthetic coding sequence
  source 1..1503: mol_type = other DNA
atggccggcggcggcggcagcagtgatggcagcggccgggctgctggaagaagagccagccgcagcagcggccgggcccggcggggcagacatgagcccggcctgggcggccctgctgagagaggagctggggaggcccggctggaggaggccgtgaaccgctgggtgctgaagttctacttccacgaggccctgcgggccttccggggcagccgctatggagacttccggcagatccgggacatcatgcaggccctgctggtgcggcccctgggcaaggagcacacagtgtcccggctgctgcgggtgatgcagtgcctgagccgcatcgaggagggggagaacctggactgcagctttgacatggaggccgagctgacccccctggagagcgccatcaacgtgctggagatgatcaagacagagttcaccctgacagaggccgtggtggagagcagcaggaagctggtgaaggaggccgctgtgatcatctgcatcaagaacaaggagtttgagaaggccagcaagatcctgaagaagcacatgagcaaggaccccaccacccagaagctgagaaatgacctgctgaacatcatccgggagaagaacctggcccaccctgtgatccagaacttctcctatgagaccttccagcagaagatgctgcgcttcctggagagccacctggatgatgctgagccctacctgctgaccatggccaagaaggccctgaagtctgagagcgctgccagcagcacaggcaaggaggacaagcagcctgcccctggccctgtggagaagccaccccgggagcccgcccggcagctgagaaatccacccaccaccatcggcatgatgaccctgaaggccgccttcaagaccctgagcggggcccaggacagcgaggccgcctttgccaagctggaccagaaggacctggtgctgcccacccaggccctgcctgccagccctgccctgaagaacaagaggcccaggaaggatgaaaatgaatcttctgccccagcagatggagagggcggcagcgagctgcagcccaagaacaagaggatgaccatcagccggctggtgctggaggaggacagccagagcacagagcccagcgctggcctgaacagcagccaggaggccgccagcgccccacccagcaagcccaccgtgctgaaccagcccctgcctggagagaagaaccccaaggtgcccaagggcaagtggaacagcagcaatggagtggaggagaaggagacctgggtggaggaggatgagctgttccaggtgcaggccgccccagatgaggacagcaccaccaacatcaccaagaagcagaagtggacagtggaggagagcgagtgggtgaaggccggcgtgcagaagtatggagagggcaactgggccgccatcagcaagaactacccctttgtgaacagaacagctgtgatgatcaaggaccgctggaggaccatgaagaggctgggcatgaactag

SEQ ID NO: 22096 - DNA, 1200 bp, synthetic construct
  misc_feature 1..1200: note = Description of Artificial Sequence: Synthetic coding sequence
  source 1..1200: mol_type = other DNA
atggccgaggccatggacctgggcaaggaccccaacggccccacccacagcagcaccctgtttgtgagagatgatggcagctccatgtccttctacgtgcggcccagccctgccaagaggcggctgagcaccctcatcctgcacggcggcggcaccgtgtgccgggtgcaggagcctggagctgtgctgctggcccagcctggagaggccctggccgaggccagcggggacttcatcagcacccagtacatcctggactgtgtggagagaaatgaaaggctggagctggaggcctaccgcctgggccctgccagcgctgctgacaccggcagcgaggccaagccaggggccctggccgagggcgctgctgagcctgagccccagagacatgctggccgcatcgccttcacagatgctgatgatgtggccatcctgacctacgtgaaggaaaatgcccggagccccagctctgtgactggaaatgccctgtggaaggccatggagaagagcagcctgacccagcacagctggcagagcctgaaggaccgctacctgaagcacctgcggggccaggagcacaagtacctgctgggagatgcccctgtgagccccagcagccagaagctgaagaggaaggccgaggaggaccctgaggccgctgacagcggggagccccagaacaagaggaccccagacctgcctgaggaggagtatgtgaaggaggagatccaggagaatgaggaggccgtgaagaagatgctggtggaggccacccgggagtttgaggaggtggtggtggatgagagccccccagactttgagatccacatcaccatgtgtgatgatgacccccccaccccagaagaagattctgagacccagccagatgaggaggaggaggaggaggaggagaaggtgtcccagcctgaggtgggcgccgccatcaagatcatccggcagctgatggagaagttcaacctggacctgagcacagtgacccaggccttcctgaagaacagcggggagctggaggccaccagcgccttcctggccagcggccagagagcagatggctaccccatctggagccggcaggatgacatcgacctgcagaaggatgatgaggacacccgggaggccctggtgaagaagtttggagcccagaatgtggcccggcgcatcgagttcaggaagaagtag

SEQ ID NO: 22097 - DNA, 12735 bp, synthetic construct
  misc_feature 1..12735: note = Description of Artificial Sequence: Synthetic coding sequence
  source 1..12735: mol_type = other DNA
atgatgcctgcccagtatgccctgaccagcagcctggtgctgctggtgctgctgagcacagcccgggccggccccttcagcagccgcagcaatgtgaccctgcctgccccccggcccccaccccagcccggcggccacacagtgggcgctggggtgggcagccccagcagccagctgtatgagcacacagtggagggcggggagaagcaggtggtgttcacccaccgcatcaacctgccccccagcacaggctgcggctgccccccaggcacagagccccctgtgctggccagcgaggtgcaggccctgcgggtgcggctggagatcctggaggagctggtgaagggcctgaaggagcagtgcaccggcggctgctgcccagccagcgcccaggccggcaccggccagacagatgtgaggaccctgtgcagcctgcacggcgtgtttgacctgagccgctgcacctgcagctgtgagcccggctggggcggccccacctgcagcgaccccacagatgctgagatcccccccagcagcccccccagcgccagcggcagctgcccagatgactgcaatgaccagggccgctgtgtgcggggccgctgtgtgtgcttccctggctacacaggccccagctgtggctggcccagctgccctggggactgccagggccggggccgctgtgtgcagggcgtgtgtgtgtgcagagctggcttcagcggccctgactgcagccagaggagctgcccccggggctgcagccagaggggccgctgtgagggcggccgctgtgtgtgtgaccccggctacacaggagatgactgtggcatgaggagctgcccccggggctgcagccagaggggccgctgtgaaaatggccgctgtgtgtgcaaccctggctacaccggggaggactgtggggtgcgcagctgcccccggggctgcagccagaggggccgctgcaaggatggccgctgtgtgtgtgaccccggctacacaggagaggactgtggcaccaggagctgcccctgggactgtggggagggcggccgctgtgtggatggccgctgtgtgtgctggccaggctacaccggggaggactgcagcaccaggacctgcccccgggactgccggggccggggccgctgtgaagatggagagtgcatctgtgacaccggctacagcggagatgactgtggggtgcgcagctgccctggggactgcaaccagaggggccgctgtgaagatggccgctgtgtgtgctggccaggctacacaggaacagactgtggcagccgggcctgcccccgggactgccggggccggggccgctgtgaaaatggagtgtgtgtgtgcaatgccggctacagcggggaggactgtggggtgcgcagctgccctggggactgccggggccggggccgctgtgagagcggccgctgcatgtgctggccaggctacacaggccgggactgtggcacccgggcctgccctggggactgccggggccggggccgctgtgtggatggccgctgtgtgtgcaaccctggcttcaccggggaggactgtggcagccgccgctgccctggggactgccggggccacggcctgtgtgaagatggagtgtgtgtgtgtgatgctggctacagcggggaggactgcagcaccaggagctgccctgggggctgccggggccggggccagtgcctggatggccgctgtgtgtgtgaagatggctacagcggggaggactgtggggtgcggcagtgccccaatgactgcagccagcacggcgtgtgccaggatggagtgtgcatctgctgggagggctacgtgtctgaggactgcagcatccgcacctgccccagcaactgccacggccggggccgctgtgaggagggccgctgcctgtgtgaccccggctacacaggccccacctgtgccaccaggatgtgcccagctgactgccggggccggggccgctgtgtgcagggcgtgtgcctgtgccacgtgggctatggaggagaggactgtggccaggaggagcccccagccagcgcctgccctgggggctgcggcccccgggagctgtgccgggccggccagtgtgtgtgtgtggagggcttccggggccctgactgtgccatccagacctgccctggggactgccggggccgcggggagtgccatgatggcagctgtgtgtgcaaggatggctatgctggggaggactgtggggaggaggtgcccaccatcgagggcatgaggatgcacctgctggaggagaccaccgtgaggacagagtggaccccagcccctggccctgtggatgcctatgagatccagttcatccccaccacagaaggagccagcccccccttcaccgcccgggtgcccagcagcgccagcgcctatgaccagaggggcctggcccctggccaggagtaccaggtgacagtgcgggccctgcggggcacctcctggggcctgcctgccagcaagaccatcaccaccatgattgatggcccccaggacctgcgggtggtggccgtgacccccaccaccctggagctgggctggctgcggccccaggccgaggtggacagatttgtggtgtcctatgtgtctgctggcaaccagagggtgcggctggaggtgcccccagaggctgatggcaccctgctgacagacctgatgcctggggtggagtatgtggtgacagtgacagctgagcggggccgggctgtgtcctacccagcctctgtgcgggccaacacaggcagcagccccctgggcctgctgggcaccacagatgagcccccaccttctggccccagcaccacccagggcgcccaggcccccctgctgcagcagaggccccaggagctgggggagctgcgggtgctgggcagagatgagaccggccgcctgcgggtggtgtggacagcccagcctgacacctttgcctacttccagctgaggatgagggtgcctgagggccctggggcccacgaggaggtgctgcctggagatgtgcggcaggccctggtgcccccacctcctcctggcaccccctatgagctgagcctgcatggagtgcccccaggcggcaagcccagcgaccccatcatctaccagggcatcatggacaaggatgaggagaagccaggcaagagcagcggccccccccggctgggggagctgactgtgacagacaggaccagtgacagcctgctgctgcgctggacagtgcctgagggggagtttgacagctttgtgatccagtacaaggacagagatggccagccccaggtggtgcctgtggagggcccccagaggtctgctgtgatcaccagcctggaccccggcaggaagtacaagtttgtgctgtatggctttgtgggcaagaagagacatggccccctggtggccgaggccaagatcctgccccagagcgaccccagccctggcaccccaccccacctgggcaacctgtgggtgacagaccccaccccagacagcctgcacctgtcctggacagtgcctgagggccagtttgacaccttcatggtgcagtacagagacagagatggccggccccaggtggtgcctgtggagggccctgagaggagctttgtggtgagcagcctggaccctgaccacaagtaccgcttcaccctgtttggcatcgccaacaagaagagatatggccccctgacagcagatggcaccacagcccctgagaggaaggaggagccccccaggcctgagttcctggagcagcccctgctgggggagctgactgtgactggagtgaccccagacagcctgcggctgtcctggacagtggcccagggcccctttgacagcttcatggtgcagtacaaggatgcccagggccagccccaggccgtgcctgtggccggagatgaaaatgaggtgacagtgcccggcctggaccctgacaggaagtacaagatgaacctgtatggcctgcggggccggcagagggtgggccctgagagcgtggtggccaagacagccccccaggaggatgtggatgagacccccagccccacagagctgggcacagaggcccctgagagccctgaggagcccctgctgggggagctgactgtgacaggcagcagcccagacagcctgagcctcttctggacagtgccccagggcagctttgacagcttcaccgtgcagtacaaggacagagatggccggcccagggctgtgcgggtgggcggcaaggagagcgaggtgacagtgggcggcctggagcccggccacaagtacaagatgcacctgtatggcctgcacgagggccagagggtgggccctgtgtctgctgtgggcgtgacagccccccagcaggaggagaccccaccagccacagagagccccctggagccccggctgggggagctgactgtgacagatgtgacccccaacagcgtgggcctgtcctggacagtgcctgagggccagtttgacagcttcatcgtgcagtacaaggacaaggatggccagccccaggtggtgcctgtggccgctgaccagcgggaggtgacagtgtacaacctggagcctgagaggaagtacaagatgaacatgtatggcctgcatgatggccagaggatgggccccctgtctgtggtgattgtgacagcccccctgcccccagccccagccacagaggccagcaagccacccctggagccccggctgggggagctgactgtgacagacatcaccccagacagcgtgggcctgtcctggacagtgcctgagggggagtttgacagctttgtggtgcagtacaaggacagagatggccagccccaggtggtgcctgtggccgctgaccagcgggaggtgaccatcccagacctggagcccagcaggaagtacaagttcctgctgtttggcatccaggacggcaagagaagaagccctgtgtctgtggaggccaagacagtggcccggggagatgccagccctggggccccaccccggctgggggagctgtgggtgacagaccccaccccagacagcctgcggctgtcctggacagtgcctgagggccagtttgacagctttgtggtgcagttcaaggacaaggatggcccccaggtggtgcctgtggagggccacgagaggtctgtgacagtgacccccctggatgctggcaggaagtaccgcttcctgctgtatggcctgctgggcaagaagagacatggccccctgacagcagatggcaccacagaggcccggagcgccatggatgacaccggcaccaagaggcctcccaagccccggctgggggaggagctgcaggtgaccaccgtgacccagaacagcgtgggcctgtcctggacagtgcctgagggccagtttgacagctttgtggtgcagtacaaggacagagatggccagccccaggtggtgcctgtggagggcagcctgcgggaggtgtctgtgcccggcctggaccctgcccaccgctacaagctgctgctgtatggcctgcaccacggcaagagggtgggccccatctctgctgtggccatcacagctggccgggaggagacagaaacagagaccacagcccccaccccaccagcccctgagccccacctgggggagctgactgtggaggaggccaccagccacaccctgcacctgtcctggatggtgacagaaggagaatttgacagctttgagatccagtacacagacagagatggccagctgcagatggtgagaattggaggagacagaaatgacatcaccctgagcggcctggagagtgaccaccgctacctggtgaccctgtatggcttcagtgatggcaagcacgtgggccctgtgcacgtggaggccctgactgtgcctgaggaggagaagcccagcgagcccccaacagccaccccagagccccccatcaagccccggctgggggagctgactgtgacagatgccaccccagacagcctgagcctgtcctggacagtgcctgagggccagtttgaccacttcctggtgcagtacagaaatggagatggccagcccaaggctgtgcgggtgcccggccacgaggagggcgtgaccatcagcggcctggagccagaccacaagtacaagatgaacctgtatggcttccatggaggccagaggatgggccctgtgtctgtggtgggcgtgacagctgctgaggaggagacccccagccccacagagcccagcatggaggcccctgagcctgctgaggagcccctgctgggggagctgactgtgacaggcagcagcccagacagcctgagcctgtcctggacagtgccccagggccgctttgacagcttcaccgtgcagtacaaggacagagatggccggccccaggtggtgcgggtgggcggggaggagagcgaggtgacagtgggcggcctggagcccggcaggaagtacaagatgcacctgtatggcctgcacgagggccggcgggtgggccctgtgtctgctgtgggcgtgacagcccctgaggaggagagcccagatgcccccctggccaagctgcggctgggccagatgacagtgcgggacatcaccagtgacagcctgagcctgtcctggacagtgcctgagggccagtttgaccacttcctggtgcagttcaagaatggagatggccagcccaaggctgtgcgggtgcccggccatgaagatggagtgaccatcagcggcctggagccagaccacaagtacaagatgaacctgtatggcttccacggcggccagagggtgggccctgtgtctgctgtgggcctgacagcccctgggaaggatgaggagatggccccagccagcacagagccccccaccccagagccccccatcaagccccggctggaggagctgactgtgacagatgccaccccagacagcctgagcctgtcctggacagtgcctgagggccagtttgaccacttcctggtgcagtacaagaatggagatggccagcccaaggccaccagggtgcccggccatgaagatagagtgaccatcagcggcctggagccagacaacaagtacaagatgaacctgtatggcttccatggaggccagagggtgggccctgtgtctgccatcggcgtgacagctgctgaggaggagacccccagccccacagagcccagcatggaggcccctgagcccccagaggagcccctgctgggggagctgactgtgacaggcagcagcccagacagcctgagcctgtcctggacagtgccccagggccgctttgacagcttcaccgtgcagtacaaggacagagatggccggccccaggtggtgcgggtgggcggggaggagagcgaggtgacagtgggcggcctggagcccggcaggaagtacaagatgcacctgtatggcctgcacgagggccggcgggtgggccctgtgtccacagtgggcgtgacagccccccaggaggatgtggatgagacccccagccccacagagcccggcacagaggcccctggccccccagaggagcccctgctgggggagctgactgtgacaggcagcagcccagacagcctgagcctgtcctggacagtgccccagggccgctttgacagcttcaccgtgcagtacaaggacagagatggccggccccaggccgtgcgggtgggcggccaggagagcaaggtgacagtgcggggcctggagcccggcaggaagtacaagatgcacctgtatggcctgcacgagggccgccgcctgggccctgtgtctgctgtgggcgtgacagaagatgaggccgagaccacccaggccgtgcccaccatgaccccagagccccccatcaagccccggctgggggagctgaccatgacagatgccaccccagacagcctgagcctgtcctggacagtgcctgagggccagtttgaccacttcctggtgcagtacagaaatggagatggccagcccaaggctgtgcgggtgcccggccatgaagatggagtgaccatcagcggcctggagccagaccacaagtacaagatgaacctgtatggcttccacggcggccagagggtgggccccatctctgtgattggagtgacagctgctgaggaggagacccccagccccacagagctgagcacagaggcccctgagcccccagaggagcccctgctgggggagctgactgtgacaggcagcagcccagacagcctgagcctgtcctggaccatcccccagggccactttgacagcttcaccgtgcagtacaaggacagagatggccggccccaggtgatgagggtgcggggggaggagagcgaggtgacagtgggcggcctggagcccggcaggaagtacaagatgcacctgtatggcctgcacgagggcagaagagtgggccctgtgtccacagtgggcgtgacagccccagaagatgaggccgagaccacccaggccgtgcccaccaccaccccagagccccccaacaagccccggctgggggagctgactgtgacagatgccaccccagacagcctgagcctgtcctggatggtgcctgagggccagtttgaccacttcctggtgcagtacagaaatggagatggccagcccaaggtggtgcgggtgcccggccatgaagatggagtgaccatcagcggcctggagccagaccacaagtacaagatgaacctgtatggcttccacggcggccagagggtgggccccatctctgtgattggagtgacagctgctgaggaggagaccccagcccccacagagcccagcacagaggcccctgagcccccagaggagcccctgctgggggagctgactgtgacaggcagcagcccagacagcctgagcctgtcctggaccatcccccagggccgctttgacagcttcaccgtgcagtacaaggacagagatggccggccccaggtggtgcgggtgcggggggaggagagcgaggtgacagtgggcggcctggagcccggctgcaagtacaagatgcacctgtatggcctgcacgagggccagagggtgggccctgtgtctgctgtgggcgtgacagcccccaaggatgaggccgagaccacccaggccgtgcccaccatgaccccagagccccccatcaagccccggctgggggagctgactgtgacagatgccaccccagacagcctgagcctgtcctggatggtgcctgagggccagtttgaccacttcctggtgcagtacagaaatggagatggccagcccaaggctgtgcgggtgcccggccatgaagatggagtgaccatcagcggcctggagccagaccacaagtacaagatgaacctgtatggcttccacggcggccagagggtgggccctgtgtctgccatcggcgtgacagaggaggagacccccagccccacagagcccagcacagaggcccctgaggcccctgaggagcccctgctgggggagctgactgtgacaggcagcagcccagacagcctgagcctgtcctggacagtgccccagggccgctttgacagcttcaccgtgcagtacaaggacagagatggccagccccaggtggtgcgggtgcggggggaggagagcgaggtgacagtgggcggcctggagcccggcaggaagtacaagatgcacctgtatggcctgcacgagggccagagggtgggccctgtgtccacagtgggcatcacagcccccctgcccacccccctgcctgtggagccccggctgggggagctggccgtggccgctgtgaccagtgacagcgtgggcctgtcctggacagtggcccagggcccctttgacagcttcctggtgcagtacagagatgcccagggccagccccaggccgtgcctgtgtctggggacctgcgggctgtggccgtgtctggcctggaccctgccaggaagtacaagttcctgctgtttggcctgcagaatggcaagagacatggccctgtgcctgtggaggccaggacagccccagacaccaagcccagcccccggctgggggagctgactgtgacagatgccaccccagacagcgtgggcctgtcctggacagtgcctgagggggagtttgacagctttgtggtgcagtacaaggacaaggatggccgcctgcaggtggtgcctgtggccgccaaccagcgggaggtgacagtgcagggcctggagcccagcaggaagtaccgcttcctgctgtatggcctgagcggcaggaagaggctgggccccatctctgctgacagcaccacagcccccctggagaaggagctgcccccccacctgggggagctgactgtggccgaggagaccagcagcagcctgcggctgtcctggacagtggcccagggcccctttgacagctttgtggtgcagtacagagacacagatggccagcccagggctgtgcctgtggccgctgaccagaggacagtgacagtggaggacctggagcccgggaagaagtacaagttcctgctgtatggcctgctgggcggcaagaggctgggccctgtgtctgccctgggcatgacagcccctgaggaggacaccccagcccctgagctggcccctgaggcccctgagcccccagaggagccccggctgggcgtgctgactgtgacagacaccaccccagacagcatgaggctgtcctggagcgtggcccagggcccctttgacagctttgtggtgcagtatgaggacaccaacggccagccccaggccctgctggtggatggagaccagagcaagatcctgatcagcggcctggagcccagcaccccctaccgcttcctgctgtatggcctgcacgagggcaagaggctgggccccctgtctgctgagggcaccaccggcctggccccagctggccagaccagcgaggagagccggccccggctgagccagctgtctgtgacagatgtgaccaccagcagcctgcggctgaactgggaggcccctcctggggcctttgacagcttcctgctgcgctttggagtgcccagccccagcaccctggagccccacccccggcccctgctgcagcgggagctgatggtgcccggcaccaggcacagcgctgtgctgcgggacctgcggagcggcaccctgtacagcctgaccctgtatggcctgcggggcccccacaaggctgacagcatccagggcacagcccggaccctgagccctgtgctggagagcccccgggacctgcagttcagcgagatccgggagaccagcgccaaggtgaactggatgcccccacccagcagagctgacagcttcaaggtgtcctaccagctggctgatggaggagagccccagagcgtgcaggtggatggccaggcccggacccagaagctgcagggcctcatccctggggcccgctatgaggtgacagtggtgtctgtgcggggctttgaggagagcgagcccctgaccggcttcctgaccaccgtgcctgatggccccacccagctgcgggccctgaacctgacagagggctttgctgtgctgcactggaagccaccccagaaccctgtggacacctatgatgtgcaggtgacagcccctggggccccacccctgcaggccgagaccccaggcagcgctgtggactaccccctgcatgacctggtgctgcacaccaactacacagccaccgtgcggggcctgcggggccccaacctgaccagccctgccagcatcaccttcaccaccggcctggaggccccccgggacctggaggccaaggaggtgacccccaggacagccctgctgacctggacagagccccctgtgcggcctgctggctacctgctgtccttccacacccctgggggccagaaccaggagatcctgctgcccggcggcatcaccagccaccagctgctgggcctcttccccagcaccagctacaatgcccggctgcaggccatgtggggccagagcctgctgccccctgtgtccaccagcttcaccactggaggcctgcgcatccccttcccccgggactgtggggaggagatgcagaatggagctggggccagcaggaccagcaccatcttcctgaatggaaaccgggagcggcccctgaatgtgttctgtgacatggagacagatggcggcggctggctggtgttccagaggaggatggatggccagacagacttctggagggactgggaggactatgcccacggctttggaaacatctctggagagttctggctgggcaatgaggccctgcacagcctgacccaggccggggactacagcatgagggtggacctgcgggctggagatgaggccgtgtttgcccagtatgacagcttccacgtggacagcgctgctgagtactaccgcctgcacctggagggctaccatggaacagctggggacagcatgagctaccacagcggcagcgtcttcagcgcccgggaccgggaccccaacagcctgctgatcagctgtgctgtgtcctacagaggagcctggtggtacagaaactgccactacgccaacctgaatggcctgtatggcagcacagtggaccaccagggcgtgtcctggtaccactggaagggctttgagttctctgtgcccttcacagagatgaagctgcggcccaggaacttccgcagccctgctgggggcggctag

SEQ ID NO: 22098 - DNA, 12729 bp, synthetic construct
  misc_feature 1..12729: note = Description of Artificial Sequence: Synthetic coding sequence
  source 1..12729: mol_type = other DNA
atgatgcctgcccagtatgccctgaccagcagcctggtgctgctggtgctgctgagcacagcccgggccggccccttcagcagccgcagcaatgtgaccctgcctgccccccggcccccaccccagcccggcggccacacagtgggcgctggggtgggcagccccagcagccagctgtatgagcacacagtggagggcggggagaagcaggtggtgttcacccaccgcatcaacctgccccccagcacaggctgcggctgccccccaggcacagagccccctgtgctggccagcgaggtgcaggccctgcgggtgcggctggagatcctggaggagctggtgaagggcctgaaggagcagtgcaccggcggctgctgcccagccagcgcccaggccggcaccggccagacagatgtgaggaccctgtgcagcctgcacggcgtgtttgacctgagccgctgcacctgcagctgtgagcccggctggggcggccccacctgcagcgaccccacagatgctgagatcccccccagcagcccccccagcgccagcggcagctgcccagatgactgcaatgaccagggccgctgtgtgcggggccgctgtgtgtgcttccctggctacacaggccccagctgtggctggcccagctgccctggggactgccagggccggggccgctgtgtgcagggcgtgtgtgtgtgcagagctggcttcagcggccctgactgcagccagaggagctgcccccggggctgcagccagaggggccgctgtgagggcggccgctgtgtgtgtgaccccggctacacaggagatgactgtggcatgaggagctgcccccggggctgcagccagaggggccgctgtgaaaatggccgctgtgtgtgcaaccctggctacaccggggaggactgtggggtgcgcagctgcccccggggctgcagccagaggggccgctgcaaggatggccgctgtgtgtgtgaccccggctacacaggagaggactgtggcaccaggagctgcccctgggactgtggggagggcggccgctgtgtggatggccgctgtgtgtgctggccaggctacaccggggaggactgcagcaccaggacctgcccccgggactgccggggccggggccgctgtgaagatggagagtgcatctgtgacaccggctacagcggagatgactgtggggtgcgcagctgccctggggactgcaaccagaggggccgctgtgaagatggccgctgtgtgtgctggccaggctacacaggaacagactgtggcagccgggcctgcccccgggactgccggggccggggccgctgtgaaaatggagtgtgtgtgtgcaatgccggctacagcggggaggactgtggggtgcgcagctgccctggggactgccggggccggggccgctgtgagagcggccgctgcatgtgctggccaggctacacaggccgggactgtggcacccgggcctgccctggggactgccggggccggggccgctgtgtggatggccgctgtgtgtgcaaccctggcttcaccggggaggactgtggcagccgccgctgccctggggactgccggggccacggcctgtgtgaagatggagtgtgtgtgtgtgatgctggctacagcggggaggactgcagcaccaggagctgccctgggggctgccggggccggggccagtgcctggatggccgctgtgtgtgtgaagatggctacagcggggaggactgtggggtgcggcagtgccccaatgactgcagccagcacggcgtgtgccaggatggagtgtgcatctgctgggagggctacgtgtctgaggactgcagcatccgcacctgccccagcaactgccacggccggggccgctgtgaggagggccgctgcctgtgtgaccccggctacacaggccccacctgtgccaccaggatgtgcccagctgactgccggggccggggccgctgtgtgcagggcgtgtgcctgtgccacgtgggctatggaggagaggactgtggccaggaggagcccccagccagcgcctgccctgggggctgcggcccccgggagctgtgccgggccggccagtgtgtgtgtgtggagggcttccggggccctgactgtgccatccagacctgccctggggactgccggggccgcggggagtgccatgatggcagctgtgtgtgcaaggatggctatgctggggaggactgtggggaggaggtgcccaccatcgagggcatgaggatgcacctgctggaggagaccaccgtgaggacagagtggaccccagcccctggccctgtggatgcctatgagatccagttcatccccaccacagaaggagccagcccccccttcaccgcccgggtgcccagcagcgccagcgcctatgaccagaggggcctggcccctggccaggagtaccaggtgacagtgcgggccctgcggggcacctcctggggcctgcctgccagcaagaccatcaccaccatgattgatggcccccaggacctgcgggtggtggccgtgacccccaccaccctggagctgggctggctgcggccccaggccgaggtggacagatttgtggtgtcctatgtgtctgctggcaaccagagggtgcggctggaggtgcccccagaggctgatggcaccctgctgacagacctgatgcctggggtggagtatgtggtgacagtgacagctgagcggggccgggctgtgtcctacccagcctctgtgcgggccaacacaggcagcagccccctgggcctgctgggcaccacagatgagcccccaccttctggccccagcaccacccagggcgcccaggcccccctgctgcagcagaggccccaggagctgggggagctgcgggtgctgggcagagatgagaccggccgcctgcgggtggtgtggacagcccagcctgacacctttgcctacttccagctgaggatgagggtgcctgagggccctggggcccacgaggaggtgctgcctggagatgtgcggcaggccctggtgcccccacctcctcctggcaccccctatgagctgagcctgcatggagtgcccccaggcggcaagcccagcgaccccatcatctaccagggcatcatggacaaggatgaggagaagccaggcaagagcagcggccccccccggctgggggagctgactgtgacagacaggaccagtgacagcctgctgctgcgctggacagtgcctgagggggagtttgacagctttgtgatccagtacaaggacagagatggccagccccaggtggtgcctgtggagggcccccagaggtctgctgtgatcaccagcctggaccccggcaggaagtacaagtttgtgctgtatggctttgtgggcaagaagagacatggccccctggtggccgaggccaagatcctgccccagagcgaccccagccctggcaccccaccccacctgggcaacctgtgggtgacagaccccaccccagacagcctgcacctgtcctggacagtgcctgagggccagtttgacaccttcatggtgcagtacagagacagagatggccggccccaggtggtgcctgtggagggccctgagaggagctttgtggtgagcagcctggaccctgaccacaagtaccgcttcaccctgtttggcatcgccaacaagaagagatatggccccctgacagcagatggcaccacagcccctgagaggaaggaggagccccccaggcctgagttcctggagcagcccctgctgggggagctgactgtgactggagtgaccccagacagcctgcggctgtcctggacagtggcccagggcccctttgacagcttcatggtgcagtacaaggatgcccagggccagccccaggccgtgcctgtggccggagatgaaaatgaggtgacagtgcccggcctggaccctgacaggaagtacaagatgaacctgtatggcctgcggggccggcagagggtgggccctgagagcgtggtggccaagacagccccccaggaggatgtggatgagacccccagccccacagagctgggcacagaggcccctgagagccctgaggagcccctgctgggggagctgactgtgacaggcagcagcccagacagcctgagcctcttctggacagtgccccagggcagctttgacagcttcaccgtgcagtacaaggacagagatggccggcccagggctgtgcgggtgggcggcaaggagagcgaggtgacagtgggcggcctggagcccggccacaagtacaagatgcacctgtatggcctgcacgagggccagagggtgggccctgtgtctgctgtgggcgtgacagccccccagcaggaggagaccccaccagccacagagagccccctggagccccggctgggggagctgactgtgacagatgtgacccccaacagcgtgggcctgtcctggacagtgcctgagggccagtttgacagcttcatcgtgcagtacaaggacaaggatggccagccccaggtggtgcctgtggccgctgaccagcgggaggtgacagtgtacaacctggagcctgagaggaagtacaagatgaacatgtatggcctgcatgatggccagaggatgggccccctgtctgtggtgattgtgacagcccccctgcccccagccccagccacagaggccagcaagccacccctggagccccggctgggggagctgactgtgacagacatcaccccagacagcgtgggcctgtcctggacagtgcctgagggggagtttgacagctttgtggtgcagtacaaggacagagatggccagccccaggtggtgcctgtggccgctgaccagcgggaggtgaccatcccagacctggagcccagcaggaagtacaagttcctgctgtttggcatccaggacggcaagagaagaagccctgtgtctgtggaggccaagacagtggcccggggagatgccagccctggggccccaccccggctgggggagctgtgggtgacagaccccaccccagacagcctgcggctgtcctggacagtgcctgagggccagtttgacagctttgtggtgcagttcaaggacaaggatggcccccaggtggtgcctgtggagggccacgagaggtctgtgacagtgacccccctggatgctggcaggaagtaccgcttcctgctgtatggcctgctgggcaagaagagacatggccccctgacagcagatggcaccacagaggcccggagcgccatggatgacaccggcaccaagaggcctcccaagccccggctgggggaggagctgcaggtgaccaccgtgacccagaacagcgtgggcctgtcctggacagtgcctgagggccagtttgacagctttgtggtgcagtacaaggacagagatggccagccccaggtggtgcctgtggagggcagcctgcgggaggtgtctgtgcccggcctggaccctgcccaccgctacaagctgctgctgtatggcctgcaccacggcaagagggtgggccccatctctgctgtggccatcacagctggccgggaggagacagaaacagagaccacagcccccaccccaccagcccctgagccccacctgggggagctgactgtggaggaggccaccagccacaccctgcacctgtcctggatggtgacagaaggagaatttgacagctttgagatccagtacacagacagagatggccagctgcagatggtgagaattggaggagacagaaatgacatcaccctgagcggcctggagagtgaccaccgctacctggtgaccctgtatggcttcagtgatggcaagcacgtgggccctgtgcacgtggaggccctgactgtgcctgaggaggagaagcccagcgagcccccaacagccaccccagagccccccatcaagccccggctgggggagctgactgtgacagatgccaccccagacagcctgagcctgtcctggacagtgcctgagggccagtttgaccacttcctggtgcagtacagaaatggagatggccagcccaaggctgtgcgggtgcccggccacgaggagggcgtgaccatcagcggcctggagccagaccacaagtacaagatgaacctgtatggcttccatggaggccagaggatgggccctgtgtctgtggtgggcgtgacagctgctgaggaggagacccccagccccacagagcccagcatggaggcccctgagcctgctgaggagcccctgctgggggagctgactgtgacaggcagcagcccagacagcctgagcctgtcctggacagtgccccagggccgctttgacagcttcaccgtgcagtacaaggacagagatggccggccccaggtggtgcgggtgggcggggaggagagcgaggtgacagtgggcggcctggagcccggcaggaagtacaagatgcacctgtatggcctgcacgagggccggcgggtgggccctgtgtctgctgtgggcgtgacagcccctgaggaggagagcccagatgcccccctggccaagctgcggctgggccagatgacagtgcgggacatcaccagtgacagcctgagcctgtcctggacagtgcctgagggccagtttgaccacttcctggtgcagttcaagaatggagatggccagcccaaggctgtgcgggtgcccggccatgaagatggagtgaccatcagcggcctggagccagaccacaagtacaagatgaacctgtatggcttccacggcggccagagggtgggccctgtgtctgctgtgggcctgacagcccctgggaaggatgaggagatggccccagccagcacagagccccccaccccagagccccccatcaagccccggctggaggagctgactgtgacagatgccaccccagacagcctgagcctgtcctggacagtgcctgagggccagtttgaccacttcctggtgcagtacaagaatggagatggccagcccaaggccaccagggtgcccggccatgaagatagagtgaccatcagcggcctggagccagacaacaagtacaagatgaacctgtatggcttccatggaggccagagggtgggccctgtgtctgccatcggcgtgacagctgctgaggaggagacccccagccccacagagcccagcatggaggcccctgagcccccagaggagcccctgctgggggagctgactgtgacaggcagcagcccagacagcctgagcctgtcctggacagtgccccagggccgctttgacagcttcaccgtgcagtacaaggacagagatggccggccccaggtggtgcgggtgggcggggaggagagcgaggtgacagtgggcggcctggagcccggcaggaagtacaagatgcacctgtatggcctgcacgagggccggcgggtgggccctgtgtccacagtgggcgtgacagccccccaggaggatgtggatgagacccccagccccacagagcccggcacagaggcccctggccccccagaggagcccctgctgggggagctgactgtgacaggcagcagcccagacagcctgagcctgtcctggacagtgccccagggccgctttgacagcttcaccgtgcagtacaaggacagagatggccggccccaggccgtgcgggtgggcggccaggagagcaaggtgacagtgcggggcctggagcccggcaggaagtacaagatgcacctgtatggcctgcacgagggccgccgcctgggccctgtgtctgctgtgggcgtgacagaagatgaggccgagaccacccaggccgtgcccaccatgaccccagagccccccatcaagccccggctgggggagctgaccatgacagatgccaccccagacagcctgagcctgtcctggacagtgcctgagggccagtttgaccacttcctggtgcagtacagaaatggagatggccagcccaaggctgtgcgggtgcccggccatgaagatggagtgaccatcagcggcctggagccagaccacaagtacaagatgaacctgtatggcttccacggcggccagagggtgggccccatctctgtgattggagtgacagctgctgaggaggagacccccagccccacagagctgagcacagaggcccctgagcccccagaggagcccctgctgggggagctgactgtgacaggcagcagcccagacagcctgagcctgtcctggaccatcccccagggccactttgacagcttcaccgtgcagtacaaggacagagatggccggccccaggtgatgagggtgcggggggaggagagcgaggtgacagtgggcggcctggagcccggcaggaagtacaagatgcacctgtatggcctgcacgagggcagaagagtgggccctgtgtccacagtgggcgtgacagaagatgaggccgagaccacccaggccgtgcccaccaccaccccagagccccccaacaagccccggctgggggagctgactgtgacagatgccaccccagacagcctgagcctgtcctggatggtgcctgagggccagtttgaccacttcctggtgcagtacagaaatggagatggccagcccaaggtggtgcgggtgcccggccatgaagatggagtgaccatcagcggcctggagccagaccacaagtacaagatgaacctgtatggcttccacggcggccagagggtgggccccatctctgtgattggagtgacagctgctgaggaggagaccccagcccccacagagcccagcacagaggcccctgagcccccagaggagcccctgctgggggagctgactgtgacaggcagcagcccagacagcctgagcctgtcctggaccatcccccagggccgctttgacagcttcaccgtgcagtacaaggacagagatggccggccccaggtggtgcgggtgcggggggaggagagcgaggtgacagtgggcggcctggagcccggctgcaagtacaagatgcacctgtatggcctgcacgagggccagagggtgggccctgtgtctgctgtgggcgtgacagcccccaaggatgaggccgagaccacccaggccgtgcccaccatgaccccagagccccccatcaagccccggctgggggagctgactgtgacagatgccaccccagacagcctgagcctgtcctggatggtgcctgagggccagtttgaccacttcctggtgcagtacagaaatggagatggccagcccaaggctgtgcgggtgcccggccatgaagatggagtgaccatcagcggcctggagccagaccacaagtacaagatgaacctgtatggcttccacggcggccagagggtgggccctgtgtctgccatcggcgtgacagaggaggagacccccagccccacagagcccagcacagaggcccctgaggcccctgaggagcccctgctgggggagctgactgtgacaggcagcagcccagacagcctgagcctgtcctggacagtgccccagggccgctttgacagcttcaccgtgcagtacaaggacagagatggccagccccaggtggtgcgggtgcggggggaggagagcgaggtgacagtgggcggcctggagcccggcaggaagtacaagatgcacctgtatggcctgcacgagggccagagggtgggccctgtgtccacagtgggcatcacagcccccctgcccacccccctgcctgtggagccccggctgggggagctggccgtggccgctgtgaccagtgacagcgtgggcctgtcctggacagtggcccagggcccctttgacagcttcctggtgcagtacagagatgcccagggccagccccaggccgtgcctgtgtctggggacctgcgggctgtggccgtgtctggcctggaccctgccaggaagtacaagttcctgctgtttggcctgcagaatggcaagagacatggccctgtgcctgtggaggccaggacagccccagacaccaagcccagcccccggctgggggagctgactgtgacagatgccaccccagacagcgtgggcctgtcctggacagtgcctgagggggagtttgacagctttgtggtgcagtacaaggacaaggatggccgcctgcaggtggtgcctgtggccgccaaccagcgggaggtgacagtgcagggcctggagcccagcaggaagtaccgcttcctgctgtatggcctgagcggcaggaagaggctgggccccatctctgctgacagcaccacagcccccctggagaaggagctgcccccccacctgggggagctgactgtggccgaggagaccagcagcagcctgcggctgtcctggacagtggcccagggcccctttgacagctttgtggtgcagtacagagacacagatggccagcccagggctgtgcctgtggccgctgaccagaggacagtgacagtggaggacctggagcccgggaagaagtacaagttcctgctgtatggcctgctgggcggcaagaggctgggccctgtgtctgccctgggcatgacagcccctgaggaggacaccccagcccctgagctggcccctgaggcccctgagcccccagaggagccccggctgggcgtgctgactgtgacagacaccaccccagacagcatgaggctgtcctggagcgtggcccagggcccctttgacagctttgtggtgcagtatgaggacaccaacggccagccccaggccctgctggtggatggagaccagagcaagatcctgatcagcggcctggagcccagcaccccctaccgcttcctgctgtatggcctgcacgagggcaagaggctgggccccctgtctgctgagggcaccaccggcctggccccagctggccagaccagcgaggagagccggccccggctgagccagctgtctgtgacagatgtgaccaccagcagcctgcggctgaactgggaggcccctcctggggcctttgacagcttcctgctgcgctttggagtgcccagccccagcaccctggagccccacccccggcccctgctgcagcgggagctgatggtgcccggcaccaggcacagcgctgtgctgcgggacctgcggagcggcaccctgtacagcctgaccctgtatggcctgcggggcccccacaaggctgacagcatccagggcacagcccggaccctgagccctgtgctggagagcccccgggacctgcagttcagcgagatccgggagaccagcgccaaggtgaactggatgcccccacccagcagagctgacagcttcaaggtgtcctaccagctggctgatggaggagagccccagagcgtgcaggtggatggccaggcccggacccagaagctgcagggcctcatccctggggcccgctatgaggtgacagtggtgtctgtgcggggctttgaggagagcgagcccctgaccggcttcctgaccaccgtgcctgatggccccacccagctgcgggccctgaacctgacagagggctttgctgtgctgcactggaagccaccccagaaccctgtggacacctatgatgtgcaggtgacagcccctggggccccacccctgcaggccgagaccccaggcagcgctgtggactaccccctgcatgacctggtgctgcacaccaactacacagccaccgtgcggggcctgcggggccccaacctgaccagccctgccagcatcaccttcaccaccggcctggaggccccccgggacctggaggccaaggaggtgacccccaggacagccctgctgacctggacagagccccctgtgcggcctgctggctacctgctgtccttccacacccctgggggccagaaccaggagatcctgctgcccggcggcatcaccagccaccagctgctgggcctcttccccagcaccagctacaatgcccggctgcaggccatgtggggccagagcctgctgccccctgtgtccaccagcttcaccactggaggcctgcgcatccccttcccccgggactgtggggaggagatgcagaatggagctggggccagcaggaccagcaccatcttcctgaatggaaaccgggagcggcccctgaatgtgttctgtgacatggagacagatggcggcggctggctggtgttccagaggaggatggatggccagacagacttctggagggactgggaggactatgcccacggctttggaaacatctctggagagttctggctgggcaatgaggccctgcacagcctgacccaggccggggactacagcatgagggtggacctgcgggctggagatgaggccgtgtttgcccagtatgacagcttccacgtggacagcgctgctgagtactaccgcctgcacctggagggctaccatggaacagctggggacagcatgagctaccacagcggcagcgtcttcagcgcccgggaccgggaccccaacagcctgctgatcagctgtgctgtgtcctacagaggagcctggtggtacagaaactgccactacgccaacctgaatggcctgtatggcagcacagtggaccaccagggcgtgtcctggtaccactggaagggctttgagttctctgtgcccttcacagagatgaagctgcggcccaggaacttccgcagccctgctgggggcggctag

SEQ ID NO: 22099 - DNA, 2022 bp, synthetic construct
  misc_feature 1..2022: note = Description of Artificial Sequence: Synthetic coding sequence
  source 1..2022: mol_type = other DNA
atgaggctgtcctggagcgtggcccagggcccctttgacagctttgtggtgcagtatgaggacaccaacggccagccccaggccctgctggtggatggagaccagagcaagatcctgatcagcggcctggagcccagcaccccctaccgcttcctgctgtatggcctgcacgagggcaagaggctgggccccctgtctgctgagggcaccaccggcctggccccagctggccagaccagcgaggagagccggccccggctgagccagctgtctgtgacagatgtgaccaccagcagcctgcggctgaactgggaggcccctcctggggcctttgacagcttcctgctgcgcttcggcgtgcccagccccagcaccctggagccccacccccggcccctgctgcagcgggagctgatggtgcccggcaccaggcacagcgctgtgctgcgggacctgcggagcggcaccctgtacagcctgaccctgtatggcctgcggggcccccacaaggctgacagcatccagggcacagcccggaccctgagccctgtgctggagagcccccgggacctgcagttcagcgagatccgggagaccagcgccaaggtgaactggatgcccccacccagcagagctgacagcttcaaggtgtcctaccagctggctgatggaggagagccccagagcgtgcaggtggatggccaggcccggacccagaagctgcagggcctcatccctggggcccgctatgaggtgacagtggtgtctgtgcggggctttgaggagagcgagcccctgaccggcttcctgaccaccgtgcctgatggccccacccagctgcgggccctgaacctgacagagggctttgctgtgctgcactggaagccaccccagaaccctgtggacacctatgatgtgcaggtgacagcccctggggccccacccctgcaggccgagaccccaggcagcgctgtggactaccccctgcatgacctggtgctgcacaccaactacacagccaccgtgcggggcctgcggggccccaacctgaccagccctgccagcatcaccttcaccaccggcctggaggccccccgggacctggaggccaaggaggtgacccccaggacagccctgctgacctggacagagccccctgtgcggcctgctggctacctgctgtccttccacaccccaggcggccagaaccaggagatcctgctgcccggcggcatcaccagccaccagctgctgggcctcttccccagcaccagctacaatgcccggctgcaggccatgtggggccagagcctgctgccccctgtgtccaccagcttcaccaccggcggcctgcgcatccccttcccccgggactgtggggaggagatgcagaatggagctggggccagcaggaccagcaccatcttcctgaatggaaaccgggagcggcccctgaatgtgttctgtgacatggagacagatggcggcggctggctggtgttccagaggaggatggatggccagacagacttctggagggactgggaggactatgcccacggcttcggcaacatcagcggggagttctggctgggcaatgaggccctgcacagcctgacccaggccggggactacagcatgagggtggacctgcgggctggagatgaagctgtgtttgcccagtatgacagcttccacgtggacagcgctgctgagtactaccgcctgcacctggagggctaccacggcacagctggggacagcatgagctaccacagcggctctgtgttcagcgcccgggaccgggaccccaacagcctgctgatcagctgtgctgtgtcctacagaggagcctggtggtacagaaactgccactacgccaacctgaatggcctgtatggcagcacagtggaccaccagggcgtgtcctggtaccactggaagggctttgagttctctgtgcccttcacagagatgaagctgcggcccaggaacttccgcagccctgctgggggcggctag

SEQ ID NO: 22100 - DNA, 954 bp, synthetic construct
  misc_feature 1..954: note = Description of Artificial Sequence: Synthetic coding sequence
  source 1..954: mol_type = other DNA
atggccaagaaccccccagagaactgtgaggactgccacatcctgaatgctgaggccttcaagagcaagaagatctgcaagagcctgaagatctgtggcctggtgtttggcatcctggccctgaccctcatcgtgctcttctggggcagcaagcacttctggccagaggtgcccaagaaggcctatgacatggagcacaccttctacagcaatggagagaagaagaagatctacatggagattgatcctgtgaccaggacagagatcttccgctctggaaatggaacagatgagaccctggaggtgcatgacttcaagaatggctacacaggcatctactttgtgggcctgcagaagtgcttcatcaagacccagatcaaggtgattcctgagttcagcgagcctgaggaggagattgatgaaaatgaggagatcaccaccaccttctttgagcagagcgtcatctgggtgcctgctgagaagcccatcgagaacagagacttcctgaagaacagcaagatcctggagatctgtgacaacgtgaccatgtactggatcaaccccaccctcatctctgtgtctgagctgcaggactttgaggaggagggggaggacctgcacttccctgccaatgagaagaagggcatcgagcagaatgagcagtgggtggtgccccaggtgaaggtggagaagaccaggcatgcccggcaggccagcgaggaggagctgcccatcaatgactacacagaaaatggaattgaatttgaccccatgctggatgagcggggctactgctgcatctactgccggcggggcaaccgctactgcagaagagtgtgtgagcccctgctgggctactacccctacccctactgctaccagggcggccgggtcatctgcagggtcatcatgccctgcaactggtgggtggccaggatgctgggccgggtgtag

SEQ ID NO: 22101 - DNA, 1356 bp, synthetic construct
  misc_feature 1..1356: note = Description of Artificial Sequence: Synthetic coding sequence
  source 1..1356: mol_type = other DNA
atggccacccccctggtggccggccctgctgccctgcgctttgctgctgctgcctcctggcaggtggtgcggggccgctgtgtggagcacttcccccgggtgctggagttcctgcggagcctgcgggctgtggcccctggcctggtgcgctaccgccaccacgagcggctgtgcatgggcctgaaggccaaggtggtggtggagctgatcctgcagggccggccctgggcccaggtgctgaaggccctgaaccaccacttccctgagagcggccccatcgtgcgggaccccaaggccaccaagcaggacctgaggaagatcctggaggcccaggagaccttctaccagcaggtgaagcagctgtctgaggcccctgtggacctggccagcaagctgcaggagctggagcaggagtatggagagcccttcctggccgccatggagaagctgctgtttgagtacctgtgccagctggagaaggccctgcccaccccccaggcccagcagctgcaggatgtgctgtcctggatgcagcccggggtgtccatcaccagcagcctggcctggaggcagtatggagtggacatgggctggctgctgcctgagtgcagcgtgacagacagcgtgaacctggccgagcccatggagcagaaccccccccagcagcagaggctggccctgcacaaccccctgcccaaggccaagccaggcacccacctgccccagggccccagcagcaggacccaccctgagcccctggccggccgccacttcaacctggcccccctgggcagaagaagagtgcagagccagtgggccagcacccggggcggccacaaggagcggcccaccgtgatgctgttccccttcaggaacctgggcagccccacccaggtgatcagcaagccagagagcaaggaggagcacgccatctacacagctgacctggccatgggcacccgggccgccagcacaggcaagagcaagagcccctgccagaccctgggcggccgggccctgaaggagaaccctgtggacctgcctgccacagagcagaaggagaactgcctggactgctacatggaccccctgcggctgagcctgctgcccccccgggccaggaagcctgtgtgcccccccagcctgtgcagcagcgtcatcaccatcggggacctggtgctggacagtgatgaggaggagaatggccagggcgagggcaaggagagcctggagaactaccagaagaccaagtttgacaccctcatccccaccctgtgtgagtacctgccccccagcggccacggggccatccctgtgagcagctgtgactgccgggacagcagccggcccctgtag

SEQ ID NO: 22102 - DNA, 1065 bp, synthetic construct
  misc_feature 1..1065: note = Description of Artificial Sequence: Synthetic coding sequence
  source 1..1065: mol_type = other DNA
atggccacccccctggtggccggccctgctgccctgcgctttgctgctgctgcctcctggcaggtggtgcggggccgctgtgtggagcacttcccccgggtgctggagttcctgcggagcctgcgggctgtggcccctggcctggtgcgctaccgccaccacgagcggctgtgcatgggcctgaaggccaaggtggtggtggagctgatcctgcagggccggccctgggcccaggtgctgaaggccctgaaccaccacttccctgagagcggccccatcgtgcgggaccccaaggccaccaagcaggacctgaggaagatcctggaggcccaggagaccttctaccagcaggtgaagcagctgtctgaggcccctgtggacctggccagcaagctgcaggagctggagcaggagtatggagagcccttcctggccgccatggagaagctgctgtttgagtacctgtgccagctggagaaggccctgcccaccccccaggcccagcagctgcaggatgtgctgtcctggatgcagcccggggtgtccatcaccagcagcctggcctggaggcagtatggagtggacatgggctggctgctgcctgagtgcagcgtgacagacagcgtgaacctggccgagcccatggagcagaaccccccccagcagcagaggctggccctgcacaaccccctgcccaaggccaagccaggcacccacctgccccagggccccagcagcaggacccaccctgagcccctggccggccgccacttcaacctggcccccctgggcagaagaagagtgcagagccagtgggccagcacccggggcggccacaaggagcggcccaccgtgatgctgttccccttcaggaacctgggcagccccacccaggtgatcagcaagccagagagcaaggaggagcacgccatctacacagctgacctggccatgggcacccgggccgccagcacaggcaagagcaagagcccctgccagaccctgggcggccgggccctgaaggagaaccctgtggacctgcctgccacagagcagaaggagtag

SEQ ID NO: 22103 - DNA, 423 bp, synthetic construct
  misc_feature 1..423: note = Description of Artificial Sequence: Synthetic coding sequence
  source 1..423: mol_type = other DNA
atggagcagaaccccccccagcagcagaggctggccctgcacaaccccctgcccaaggccaagccaggcacccacctgccccagggccccagcagcaggacccaccctgagcccctggccggccgccacttcaacctggcccccctgggcagaagaagagtgcagagccagtgggccagcacccggggcggccacaaggagcggcccaccgtgatgctgttccccttcaggaacctgggcagccccacccaggtgatcagcaagccagagagcaaggaggagcacgccatctacacagctgacctggccatgggcacccgggccgccagcacaggcaagagcaagagcccctgccagaccctgggcggccgggccctgaaggagaaccctgtggacctgcctgccacagagcagaaggagtag

SEQ ID NO: 22104 - DNA, 1251 bp, synthetic construct
  misc_feature 1..1251: note = Description of Artificial Sequence: Synthetic coding sequence
  source 1..1251: mol_type = other DNA
atggccacccccctggtggccggccctgctgccctgcgctttgctgctgctgcctcctggcaggtggtgcggggccgctgtgtggagcacttcccccgggtgctggagttcctgcggagcctgcgggctgtggcccctggcctggtgcgctaccgccaccacgagcggctgtgcatgggcctgaaggccaagaccaagcaggacctgaggaagatcctggaggcccaggagaccttctaccagcaggtgaagcagctgtctgaggcccctgtggacctggccagcaagctgcaggagctggagcaggagtatggagagcccttcctggccgccatggagaagctgctgtttgagtacctgtgccagctggagaaggccctgcccaccccccaggcccagcagctgcaggatgtgctgtcctggatgcagcccggggtgtccatcaccagcagcctggcctggaggcagtatggagtggacatgggctggctgctgcctgaatgttctgtgacagattctgtgaacctggccgagcccatggagcagaaccccccccagcagcagaggctggccctgcacaaccccctgcccaaggccaagccaggcacccacctgccccagggccccagcagcaggacccaccctgagcccctggccggccgccacttcaacctggcccccctgggcagaagaagagtgcagagccagtgggccagcacccggggcggccacaaggagcggcccaccgtgatgctgttccccttcaggaacctgggcagccccacccaggtgatcagcaagccagagagcaaggaggagcacgccatctacacagctgacctggccatgggcaccagggctgccagcacaggcaagagcaagagcccctgccagaccctgggcggccgggccctgaaggaaaatcctgtggacctgcctgccacagagcagaaggagaactgcctggactgctacatggaccccctgcggctgagcctgctgcccccccgggccaggaagcctgtgtgcccccccagcctgtgcagcagcgtcatcaccatcggggacctggtgctggacagtgatgaggaggagaatggccagggcgagggcaaggagagcctggagaactaccagaagaccaagtttgacaccctcatccccaccctgtgtgagtacctgcccccatctggccatggagccatccctgtgagcagctgtgactgccgggacagcagccggcccctgtag

SEQ ID NO: 22105 - DNA, 3498 bp, synthetic construct
  misc_feature 1..3498: note = Description of Artificial Sequence: Synthetic coding sequence
  source 1..3498: mol_type = other DNA
atggagcaggacaggaccaaccacgtggagggcaaccggctgagccccttcctgatccccagcccccccatctgccagacagagcccctggccaccaagctgcagaatggcagccccctgcctgagcgggcccaccctgaggtgaatggagacaccaagtggcacagcttcaagagctactacggcatcccctgcatgaagggcagccagaacagccgggtgtccccagacttcacccaggagagccggggctacagcaagtgcctgcagaatggaggcatcaagaggacagtgtctgagcccagcctgagcggcctgctgcagatcaagaagctgaagcaggaccagaaggccaatggagagaggaggaactttggagtgtcccaggagagaaatcctggagagagcagccagcccaacgtgtctgacctgagtgacaagaaggagagcgtgtcctctgtggcccaggagaatgctgtgaaggacttcaccagcttcagcacccacaactgcagcggcccagaaaatcctgagctgcagatcctgaatgagcaggagggcaagagcgccaactaccatgacaagaacatcgtgctgctgaagaacaaggctgtgctgatgcccaatggagccaccgtgtctgccagctctgtggagcacacccacggggagctgctggagaagaccctgagccagtactacccagactgtgtgtccattgctgtgcagaagaccaccagccacatcaatgccatcaacagccaggccaccaatgagctgagctgtgagatcacccaccccagccacaccagcggccagatcaacagcgcccagaccagcaacagcgagctgccccccaagccagctgctgtggtgtctgaggcctgtgatgctgatgatgctgacaatgccagcaagctggccgccatgctgaacacctgcagcttccagaagccagagcagctgcagcagcagaagtctgtgtttgagatctgccccagccctgctgagaacaacatccagggcaccaccaagctggccagcggggaggagttctgcagcggcagcagcagcaacctgcaggcccctgggggcagcagcgagcgctacctgaagcagaatgagatgaatggagcctacttcaagcagagctctgtgttcaccaaggacagcttcagcgccaccaccaccccacctccacccagccagctgctgctgagccccccaccacccctgccccaggtgccccagctgcccagcgagggcaagagcaccctgaatggaggagtgctggaggagcaccaccactaccccaaccagagcaacaccaccctgctgcgggaggtgaagattgagggcaagccagaggccccacccagccagagccccaaccccagcacccacgtgtgcagccccagccccatgctgtctgagcggccccagaacaactgtgtgaacagaaatgacatccagacagctggcaccatgacagtgcccctgtgcagcgagaagacccggcccatgtctgagcacctgaagcacaacccccccatcttcggcagcagcggggagctgcaggacaactgccagcagctgatgaggaacaaggagcaggagatcctgaagggccgggacaaggagcagacccgggacctggtgccccccacccagcactacctgaagccaggctggattgagctgaaggccccccgcttccaccaggccgagagccacctgaagagaaatgaggccagcctgcccagcatcctgcagtaccagcccaacctgagcaaccagatgaccagcaagcagtacacaggcaacagcaacatgcctgggggcctgccccggcaggcctacacccagaagaccacccagctggagcacaagagccagatgtaccaggtggagatgaaccagggccagagccagggcaccgtggaccagcacctgcagttccagaagcccagccaccaggtgcacttcagcaagacagaccacctgcccaaggcccacgtgcagagcctgtgtggcacccgcttccacttccagcagagagctgacagccagacagagaagctgatgagccctgtgctgaagcagcacctgaaccagcaggccagcgagacagagcccttcagcaacagccacctgctgcagcacaagccccacaagcaggccgcccagacccagcccagccagagcagccacctgccccagaaccagcagcagcagcagaagctgcagatcaagaacaaggaggagatcctgcagaccttcccccacccccagagcaacaatgaccagcagcgggagggcagcttcttcggccagaccaaggtggaggagtgcttccacggggagaaccagtacagcaagagcagcgagtttgagacccacaacgtgcagatgggcctggaggaggtgcagaacatcaacagaagaaacagcccctacagccagaccatgaagagcagcgcctgcaagatccaggtgtcctgcagcaacaacacccacctggtgtctgagaacaaggagcagaccacccaccctgagctgtttgctggcaacaagacccagaacctgcaccacatgcagtacttccccaacaacgtcatccccaagcaggacctgctgcaccgctgcttccaggagcaggagcagaagagccagcaggcctctgtgctgcagggctacaagaacagaaaccaggacatgagcggccagcaggccgcccagctggcccagcagcgctacctgatccacaaccacgccaacgtgtttcctgtgcctgaccagggcggcagccacacccagaccccaccccagaaggacacccagaagcacgccgccctgcgctggcacctgctgcagaagcaggagcagcagcagacccagcagccccagacagagagctgccacagccagatgcaccggcccatcaaggtggagcccggctgcaagccccacgcctgcatgcacacagcccccccagagaacaagacctggaagaaggtgaccaagcaggagaaccccccagccagctgtgacaacgtgcagcagaagagcatcatcgagaccatggagcagcacctgaagcagttccacgccaagagcctgtttgaccacaaggccctgaccctgaagagccagaagcaggtgaaggtggagatgagcggccctgtgacagtgctgacccggcagaccacagctgctgagctggacagccacaccccagccctggagcagcagaccaccagcagcgagaagacccccaccaagaggacagctgcctctgtgctgaacaacttcatcgagagccccagcaagctgctggacacccccatcaagaacctgctggacacccctgtgaagacccagtatgacttccccagctgccgctgtgtgggcaagtgccagaagtgcacagagacccacggcgtgtacccagagctggccaacctgagcagtgacatgggcttctccttcttcttctag

SEQ ID NO: 22106 - DNA, 6009 bp, synthetic construct
  misc_feature 1..6009: note = Description of Artificial Sequence: Synthetic coding sequence
  source 1..6009: mol_type = other DNA
atggagcaggacaggaccaaccacgtggagggcaaccggctgagccccttcctgatccccagcccccccatctgccagacagagcccctggccaccaagctgcagaatggcagccccctgcctgagcgggcccaccctgaggtgaatggagacaccaagtggcacagcttcaagagctactacggcatcccctgcatgaagggcagccagaacagccgggtgtccccagacttcacccaggagagccggggctacagcaagtgcctgcagaatggaggcatcaagaggacagtgtctgagcccagcctgagcggcctgctgcagatcaagaagctgaagcaggaccagaaggccaatggagagaggaggaactttggagtgtcccaggagagaaatcctggagagagcagccagcccaacgtgtctgacctgagtgacaagaaggagagcgtgtcctctgtggcccaggagaatgctgtgaaggacttcaccagcttcagcacccacaactgcagcggcccagaaaatcctgagctgcagatcctgaatgagcaggagggcaagagcgccaactaccatgacaagaacatcgtgctgctgaagaacaaggctgtgctgatgcccaatggagccaccgtgtctgccagctctgtggagcacacccacggggagctgctggagaagaccctgagccagtactacccagactgtgtgtccattgctgtgcagaagaccaccagccacatcaatgccatcaacagccaggccaccaatgagctgagctgtgagatcacccaccccagccacaccagcggccagatcaacagcgcccagaccagcaacagcgagctgccccccaagccagctgctgtggtgtctgaggcctgtgatgctgatgatgctgacaatgccagcaagctggccgccatgctgaacacctgcagcttccagaagccagagcagctgcagcagcagaagtctgtgtttgagatctgccccagccctgctgagaacaacatccagggcaccaccaagctggccagcggggaggagttctgcagcggcagcagcagcaacctgcaggcccctgggggcagcagcgagcgctacctgaagcagaatgagatgaatggagcctacttcaagcagagctctgtgttcaccaaggacagcttcagcgccaccaccaccccacctccacccagccagctgctgctgagccccccaccacccctgccccaggtgccccagctgcccagcgagggcaagagcaccctgaatggaggagtgctggaggagcaccaccactaccccaaccagagcaacaccaccctgctgcgggaggtgaagattgagggcaagccagaggccccacccagccagagccccaaccccagcacccacgtgtgcagccccagccccatgctgtctgagcggccccagaacaactgtgtgaacagaaatgacatccagacagctggcaccatgacagtgcccctgtgcagcgagaagacccggcccatgtctgagcacctgaagcacaacccccccatcttcggcagcagcggggagctgcaggacaactgccagcagctgatgaggaacaaggagcaggagatcctgaagggccgggacaaggagcagacccgggacctggtgccccccacccagcactacctgaagccaggctggattgagctgaaggccccccgcttccaccaggccgagagccacctgaagagaaatgaggccagcctgcccagcatcctgcagtaccagcccaacctgagcaaccagatgaccagcaagcagtacacaggcaacagcaacatgcctgggggcctgccccggcaggcctacacccagaagaccacccagctggagcacaagagccagatgtaccaggtggagatgaaccagggccagagccagggcaccgtggaccagcacctgcagttccagaagcccagccaccaggtgcacttcagcaagacagaccacctgcccaaggcccacgtgcagagcctgtgtggcacccgcttccacttccagcagagagctgacagccagacagagaagctgatgagccctgtgctgaagcagcacctgaaccagcaggccagcgagacagagcccttcagcaacagccacctgctgcagcacaagccccacaagcaggccgcccagacccagcccagccagagcagccacctgccccagaaccagcagcagcagcagaagctgcagatcaagaacaaggaggagatcctgcagaccttcccccacccccagagcaacaatgaccagcagcgggagggcagcttcttcggccagaccaaggtggaggagtgcttccacggggagaaccagtacagcaagagcagcgagtttgagacccacaacgtgcagatgggcctggaggaggtgcagaacatcaacagaagaaacagcccctacagccagaccatgaagagcagcgcctgcaagatccaggtgtcctgcagcaacaacacccacctggtgtctgagaacaaggagcagaccacccaccctgagctgtttgctggcaacaagacccagaacctgcaccacatgcagtacttccccaacaacgtcatccccaagcaggacctgctgcaccgctgcttccaggagcaggagcagaagagccagcaggcctctgtgctgcagggctacaagaacagaaaccaggacatgagcggccagcaggccgcccagctggcccagcagcgctacctgatccacaaccacgccaacgtgtttcctgtgcctgaccagggcggcagccacacccagaccccaccccagaaggacacccagaagcacgccgccctgcgctggcacctgctgcagaagcaggagcagcagcagacccagcagccccagacagagagctgccacagccagatgcaccggcccatcaaggtggagcccggctgcaagccccacgcctgcatgcacacagcccccccagagaacaagacctggaagaaggtgaccaagcaggagaaccccccagccagctgtgacaacgtgcagcagaagagcatcatcgagaccatggagcagcacctgaagcagttccacgccaagagcctgtttgaccacaaggccctgaccctgaagagccagaagcaggtgaaggtggagatgagcggccctgtgacagtgctgacccggcagaccacagctgctgagctggacagccacaccccagccctggagcagcagaccaccagcagcgagaagacccccaccaagaggacagctgcctctgtgctgaacaacttcatcgagagccccagcaagctgctggacacccccatcaagaacctgctggacacccctgtgaagacccagtatgacttccccagctgccgctgtgtggagcagatcatcgagaaggatgagggccccttctacacccacctgggcgccggccccaacgtggccgccatccgggagatcatggaggagcgcttcggccagaagggcaaggccatcagaattgaaagagtcatctacacaggcaaggagggcaagagcagccagggctgccccatcgccaagtgggtggtgagaagaagcagcagcgaggagaagctgctgtgcctggtgcgggagagagctggccacacctgtgaggccgccgtcatcgtcatcctgatcctggtgtgggagggcatccccctgagcctggccgacaagctgtacagcgagctgacagagaccctgaggaaatatggcaccctgaccaacagaagatgtgccctgaatgaggagaggacctgtgcctgccagggcctggaccctgagacctgtggggccagcttctcctttggctgctcctggagcatgtactacaacggctgcaagtttgcccggagcaagatccccaggaagttcaagctgctgggagatgaccccaaggaggaggagaagctggagagccacctgcagaacctgagcaccctgatggcccccacctacaagaagctggccccagatgcctacaacaaccagattgaatatgagcaccgggccccagaatgtcggctgggcctgaaggagggccggcccttctctggagtgacagcctgcctggacttctgtgcccacgcccaccgggacctgcacaacatgcagaatggcagcaccctggtgtgcaccctgacccgggaggacaaccgggagtttggaggcaagccagaagatgagcagctgcacgtgctgcccctgtacaaggtgtctgatgtggatgaatttggatctgtggaggcccaggaggagaagaagaggtctggggccatccaggtgctgagcagcttccggaggaaggtgaggatgctggccgagcctgtgaagacctgccggcagaggaagctggaggccaagaaggctgctgctgagaagctgagcagcctggagaacagcagcaacaagaatgagaaggagaagagcgcccccagcaggaccaagcagacagaaaatgccagccaggccaagcagctggccgagctgctgcggctgagcggccctgtgatgcagcagagccagcagccccagcccctgcagaagcagcccccccagccccagcagcagcagaggccccagcagcagcagccccaccacccccagacagagagcgtgaacagctacagcgccagcggcagcaccaacccctacatgagaagacccaaccctgtgagcccctaccccaacagcagccacaccagtgacatctacggcagcaccagccccatgaacttctacagcaccagcagccaggccgccggcagctacctgaacagcagcaaccccatgaacccctacccaggcctgctgaaccagaacacccagtaccccagctaccagtgcaatggaaacctgtctgtggacaactgcagcccctacctgggcagctacagcccccagagccagcccatggacctgtaccgctaccccagccaggaccccctgagcaagctgagcctgccccccatccacaccctgtaccagcccaggtttggaaacagccagagcttcaccagcaagtacctgggctacggcaaccagaacatgcagggagatggcttcagcagctgcaccatccggcccaacgtgcaccacgtgggcaagctgcccccctaccccacccatgagatggatggccacttcatgggcgccaccagccggctgccccccaacctgagcaaccccaacatggactacaagaatggagagcaccacagccccagccacatcatccacaactacagcgctgcccctggcatgttcaacagcagcctgcacgccctgcacctgcagaacaaggaaaatgacatgctgagccacacagccaacggcctgagcaagatgctgcctgccctgaaccacgacagaacagcctgtgtgcagggcggcctgcacaagctgagtgatgccaacggccaggagaagcagcccctggccctggtgcagggcgtggccagcggggctgaagataatgatgaggtgtggagcgacagcgagcagagcttcctggaccctgacattggaggagtggccgtggcccccacccacggcagcatcctgattgaatgtgccaagcgggagctgcacgccaccacccccctgaagaaccccaacagaaaccaccccacccgcatcagcctggtgttctaccagcacaagtccatgaatgagcccaagcacggcctggccctgtgggaggccaagatggccgagaaggcccgggagaaggaggaggagtgtgagaagtatggccctgactatgtgccccagaagagccacggcaagaaggtgaagcgggagcctgctgagccccatgagaccagcgagcccacctacctgcgcttcatcaagagcctggccgagaggaccatgtctgtgaccacagacagcacagtgaccaccagcccctatgccttcaccagggtgacaggcccctacaaccgctacatctag

SEQ ID NO: 22107 - DNA, 3498 bp, synthetic construct; identical to SEQ ID NO: 22105
  misc_feature 1..3498: note = Description of Artificial Sequence: Synthetic coding sequence
  source 1..3498: mol_type = other DNA

SEQ ID NO: 22108 - DNA, 333 bp, synthetic construct
  misc_feature 1..333: note = Description of Artificial Sequence: Synthetic coding sequence
  source 1..333: mol_type = other DNA
atggagcaggacaggaccaaccacgtggagggcaaccggctgagccccttcctgatccccagcccccccatctgccagacagagcccctggccaccaagctgcagaatggcagccccctgcctgagcgggcccaccctgaggtgaatggagacaccaagtggcacagcttcaagagctactacggcatcccctgcatgaagggcagccagaacagccgggtgtccccagacttcacccaggagagccggggctacagcaagtgcctgcagaatggaggcatcaagaggacagtgtctgagcccagcctgagcggcctgctgcagatcaagtag

SEQ ID NO: 22109 - DNA, 1914 bp, synthetic construct
  misc_feature 1..1914: note = Description of Artificial Sequence: Synthetic coding sequence
  source 1..1914: mol_type = other DNA
atggagcaggacaggaccaaccacgtggagggcaaccggctgagccccttcctgatccccagcccccccatctgccagacagagcccctggccaccaagctgcagaatggcagccccctgcctgagcgggcccaccctgaggtgaatggagacaccaagtggcacagcttcaagagctactacggcatcccctgcatgaagggcagccagaacagccgggtgtccccagacttcacccaggagagccggggctacagcaagtgcctgcagaatggaggcatcaagaggacagtgtctgagcccagcctgagcggcctgctgcagatcaagaagctgaagcaggaccagaaggccaatggagagaggaggaactttggagtgtcccaggagagaaatcctggagagagcagccagcccaacgtgtctgacctgagtgacaagaaggagagcgtgtcctctgtggcccaggagaatgctgtgaaggacttcaccagcttcagcacccacaactgcagcggcccagaaaatcctgagctgcagatcctgaatgagcaggagggcaagagcgccaactaccatgacaagaacatcgtgctgctgaagaacaaggctgtgctgatgcccaatggagccaccgtgtctgccagctctgtggagcacacccacggggagctgctggagaagaccctgagccagtactacccagactgtgtgtccattgctgtgcagaagaccaccagccacatcaatgccatcaacagccaggccaccaatgagctgagctgtgagatcacccaccccagccacaccagcggccagatcaacagcgcccagaccagcaacagcgagctgccccccaagccagctgctgtggtgtctgaggcctgtgatgctgatgatgctgacaatgccagcaagctggccgccatgctgaacacctgcagcttccagaagccagagcagctgcagcagcagaagtctgtgtttgagatctgccccagccctgctgagaacaacatccagggcaccaccaagctggccagcggggaggagttctgcagcggcagcagcagcaacctgcaggcccctgggggcagcagcgagcgctacctgaagcagaatgagatgaatggagcctacttcaagcagagctctgtgttcaccaaggacagcttcagcgccaccaccaccccacctccacccagccagctgctgctgagccccccaccacccctgccccaggtgccccagctgcccagcgagggcaagagcaccctgaatggaggagtgctggaggagcaccaccactaccccaaccagagcaacaccaccctgctgcgggaggtgaagattgagggcaagccagaggccccacccagccagagccccaaccccagcacccacgtgtgcagccccagccccatgctgtctgagcggccccagaacaactgtgtgaacagaaatgacatccagacagctggcaccatgacagtgcccctgtgcagcgagaagacccggcccatgtctgagcacctgaagcacaacccccccatcttcggcagcagcggggagctgcaggacaactgccagcagctgatgaggaacaaggagcaggagatcctgaagggccgggacaaggagcagacccgggacctggtgccccccacccagcactacctgaagccaggctggattgagctgaaggccccccgcttccaccaggccgagagccacctgaagagaaatgaggccagcctgcccagcatcctgcagtaccagcccaacctgagcaaccagatgaccagcaagcagtacacaggcaacagcaacatgcctgggggcctgccccggcaggcctacacccagaagaccacccagctgagcaccagccacaagtgcaccaagctgaagtag

SEQ ID NO: 22110 - DNA, 6009 bp, synthetic construct; identical to SEQ ID NO: 22106
  misc_feature 1..6009: note = Description of Artificial Sequence: Synthetic coding sequence
  source 1..6009: mol_type = other DNA

SEQ ID NO: 22111 - DNA, 3585 bp, synthetic construct
  misc_feature 1..3585: note = Description of Artificial Sequence: Synthetic coding sequence
  source 1..3585: mol_type = other DNA
atggagcaggacaggaccaaccacgtggagggcaaccggctgagccccttcctgatccccagcccccccatctgccagacagagcccctggccaccaagctgcagaatggcagccccctgcctgagcgggcccaccctgaggtgaatggagacaccaagtggcacagcttcaagagctactacggcatcccctgcatgaagggcagccagaacagccgggtgtccccagacttcacccaggagagccggggctacagcaagtgcctgcagaatggaggcatcaagaggacagtgtctgagcccagcctgagcggcctgctgcagatcaagaagctgaagcaggaccagaaggccaatggagagaggaggaactttggagtgtcccaggagagaaatcctggagagagcagccagcccaacgtgtctgacctgagtgacaagaaggagagcgtgtcctctgtggcccaggagaatgctgtgaaggacttcaccagcttcagcacccacaactgcagcggcccagaaaatcctgagctgcagatcctgaatgagcaggagggcaagagcgccaactaccatgacaagaacatcgtgctgctgaagaacaaggctgtgctgatgcccaatggagccaccgtgtctgccagctctgtggagcacacccacggggagctgctggagaagaccctgagccagtactacccagactgtgtgtccattgctgtgcagaagaccaccagccacatcaatgccatcaacagccaggccaccaatgagctgagctgtgagatcacccaccccagccacaccagcggccagatcaacagcgcccagaccagcaacagcgagctgccccccaagccagctgctgtggtgtctgaggcctgtgatgctgatgatgctgacaatgccagcaagctggccgccatgctgaacacctgcagcttccagaagccagagcagctgcagcagcagaagtctgtgtttgagatctgccccagccctgctgagaacaacatccagggcaccaccaagctggccagcggggaggagttctgcagcggcagcagcagcaacctgcaggcccctgggggcagcagcgagcgctacctgaagcagaatgagatgaatggagcctacttcaagcagagctctgtgttcaccaaggacagcttcagcgccaccaccaccccacctccacccagccagctgctgctgagccccccaccacccctgccccaggtgccccagctgcccagcgagggcaagagcaccctgaatggaggagtgctggaggagcaccaccactaccccaaccagagcaacaccaccctgctgcgggaggtgaagattgagggcaagccagaggccccacccagccagagccccaaccccagcacccacgtgtgcagccccagccccatgctgtctgagcggccccagaacaactgtgtgaacagaaatgacatccagacagctggcaccatgacagtgcccctgtgcagcgagaagacccggcccatgtctgagcacctgaagcacaacccccccatcttcggcagcagcggggagctgcaggacaactgccagcagctgatgaggaacaaggagcaggagatcctgaagggccgggacaaggagcagacccgggacctggtgccccccacccagcactacctgaagccaggctggattgagctgaaggccccccgcttccaccaggccgagagccacctgaagagaaatgaggccagcctgcccagcatcctgcagtaccagcccaacctgagcaaccagatgaccagcaagcagtacacaggcaacagcaacatgcctgggggcctgccccggcaggcctacacccagaagaccacccagctggagcacaagagccagatgtaccaggtggagatgaaccagggccagagccagggcaccgtggaccagcacctgcagttccagaagcccagccaccaggtgcacttcagcaagacagaccacctgcccaaggcccacgtgcagagcctgtgtggcacccgcttccacttccagcagagagctgacagccagacagagaagctgatgagccctgtgctgaagcagcacctgaaccagcaggccagcgagacagagcccttcagcaacagccacctgctgcagcacaagccccacaagcaggccgcccagacccagcccagccagagcagccacctgccccagaaccagcagcagcagcagaagctgcagatcaagaacaaggaggagatcctgcagaccttcccccacccccagagcaacaatgaccagcagcgggagggcagcttcttcggccagaccaaggtggaggagtgcttccacggggagaaccagtacagcaagagcagcgagtttgagacccacaacgtgcagatgggcctggaggaggtgcagaacatcaacagaagaaacagcccctacagccagaccatgaagagcagcgcctgcaagatccaggtgtcctgcagcaacaacacccacctggtgtctgagaacaaggagcagaccacccaccctgagctgtttgctggcaacaagacccagaacctgcaccacatgcagtacttccccaacaacgtcatccccaagcaggacctgctgcaccgctgcttccaggagcaggagcagaagagccagcaggcctctgtgctgcagggctacaagaacagaaaccaggacatgagcggccagcaggccgcccagctggcccagcagcgctacctgatccacaaccacgccaacgtgtttcctgtgcctgaccagggcggcagccacacccagaccccaccccagaaggacacccagaagcacgccgccctgcgctggcacctgctgcagaagcaggagcagcagcagacccagcagccccagacagagagctgccacagccagatgcaccggcccatcaaggtggagcccggctgcaagccccacgcctgcatgcacacagcccccccagagaacaagacctggaagaaggtgaccaagcaggagaaccccccagccagctgtgacaacgtgcagcagaagagcatcatcgagaccatggagcagcacctgaagcagttccacgccaagagcctgtttgaccacaaggccctgaccctgaagagccagaagcaggtgaaggtggagatgagcggccctgtgacagtgctgacccggcagaccacagctgctgagctggacagccacaccccagccctggagcagcagaccaccagcagcgagaagacccccaccaagaggacagctgcctctgtgctgaacaacttcatcgagagccccagcaagctgctggacacccccatcaagaacctgctggacacccctgtgaagacccagtatgacttccccagctgccgctgtgtgggcctggaccggcgggtgaagctgctgggcctgaaggagagcagcatcctggtgaagaaggccaaggtgctgagagatgtgctgctgctgagcggctggtttgctgaggccgctgtgaagaggagctactgtgtgtggtgtggcagcgagctggccacccctgtgcggctgcagtag

SEQ ID NO: 22112 - DNA, 6072 bp, synthetic construct
  misc_feature 1..6072: note = Description of Artificial Sequence: Synthetic coding sequence
  source 1..6072: mol_type = other DNA
atgatccaggaggagcagatccagctggagggcagcctggtggatggccctgaggccagcctgatggagcaggacaggaccaaccacgtggagggcaaccggctgagccccttcctgatccccagcccccccatctgccagacagagcccctggccaccaagctgcagaatggcagccccctgcctgagcgggcccaccctgaggtgaatggagacaccaagtggcacagcttcaagagctactacggcatcccctgcatgaagggcagccagaacagccgggtgtccccagacttcacccaggagagccggggctacagcaagtgcctgcagaatggaggcatcaagaggacagtgtctgagcccagcctgagcggcctgctgcagatcaagaagctgaagcaggaccagaaggccaacggggagaggaggaactttggagtgtcccaggagaggaaccctggagagagcagccagcccaacgtgtctgacctgagtgacaagaaggagagcgtgtcctctgtggcccaggagaatgctgtgaaggacttcaccagcttcagcacccacaactgcagcggccctgagaaccctgagctgcagatcctgaatgagcaggagggcaagagcgccaactaccatgacaagaacatcgtgctgctgaagaacaaggctgtgctgatgcccaacggggccaccgtgtctgccagctctgtggagcacacccatggagagctgctggagaagaccctgagccagtactacccagactgtgtgtccattgctgtgcagaagaccaccagccacatcaatgccatcaacagccaggccaccaatgagctgagctgtgagatcacccaccccagccacaccagcggccagatcaacagcgcccagaccagcaacagcgagctgccccccaagccagctgctgtggtgtctgaggcctgtgatgctgatgatgctgacaatgccagcaagctggccgccatgctgaacacctgcagcttccagaagccagagcagctgcagcagcagaagtctgtgtttgagatctgccccagccctgctgagaacaacatccagggcaccaccaagctggccagcggggaggagttctgcagcggcagcagcagcaacctgcaggcccctgggggcagcagcgagcgctacctgaagcagaatgagatgaatggagcctacttcaagcagagcagcgtcttcaccaaggacagcttcagcgccaccaccaccccacctccacccagccagctgctgctgagccccccaccacccctgccccaggtgccccagctgcccagcgagggcaagagcaccctgaatggaggagtgctggaggagcaccaccactaccccaaccagagcaacaccaccctgctgcgggaggtgaagattgagggcaagccagaggccccacccagccagagccccaaccccagcacccacgtgtgcagccccagccccatgctgtctgagcggccccagaacaactgtgtgaacagaaatgacatccagacagctggcaccatgacagtgcccctgtgcagcgagaagacccggcccatgtctgagcacctgaagcacaacccccccatcttcggcagcagtggagagctgcaggacaactgccagcagctgatgaggaacaaggagcaggagatcctgaagggccgggacaaggagcagacccgggacctggtgccccccacccagcactacctgaagccaggctggattgagctgaaggccccccgcttccaccaggccgagagccacctgaagagaaatgaggccagcctgcccagcatcctgcagtaccagcccaacctgagcaaccagatgaccagcaagcagtacacaggcaacagcaacatgcctgggggcctgccccggcaggcctacacccagaagaccacccagctggagcacaagagccagatgtaccaggtggagatgaaccagggccagagccagggcaccgtggaccagcacctgcagttccagaagcccagccaccaggtgcacttcagcaagacagaccacctgcccaaggcccacgtgcagagcctgtgtggcacccgcttccacttccagcagagagctgacagccagacagagaagctgatgagccctgtgctgaagcagcacctgaaccagcaggccagcgagacagagcccttcagcaacagccacctgctgcagcacaagccccacaagcaggccgcccagacccagcccagccagagcagccacctgccccagaaccagcagcagcagcagaagctgcagatcaagaacaaggaggagatcctgcagaccttcccccacccccagagcaacaatgaccagcagcgggagggcagcttcttcggccagaccaaggtggaggagtgcttccatggagagaaccagtacagcaagagcagcgagtttgagacccacaacgtgcagatgggcctggaggaggtgcagaacatcaacagaagaaacagcccctacagccagaccatgaagagcagcgcctgcaagatccaggtgtcctgcagcaacaacacccacctggtgtctgagaacaaggagcagaccacccaccctgagctgtttgctggcaacaagacccagaacctgcaccacatgcagtacttccccaacaacgtcatccccaagcaggacctgctgcaccgctgcttccaggagcaggagcagaagagccagcaggcctctgtgctgcagggctacaagaacagaaaccaggacatgagcggccagcaggccgcccagctggcccagcagcgctacctgatccacaaccacgccaacgtgtttcctgtgcctgaccagggcggcagccacacccagaccccaccccagaaggacacccagaagcatgctgccctgcgctggcacctgctgcagaagcaggagcagcagcagacccagcagccccagacagagagctgccacagccagatgcaccggcccatcaaggtggagcccggctgcaagccccacgcctgcatgcacacagcccctcctgagaacaagacctggaagaaggtgaccaagcaggagaaccccccagccagctgtgacaacgtgcagcagaagagcatcatcgagaccatggagcagcacctgaagcagttccacgccaagagcctgtttgaccacaaggccctgaccctgaagagccagaagcaggtgaaggtggagatgagcggccctgtgacagtgctgacccggcagaccacagctgctgagctggacagccacaccccagccctggagcagcagaccaccagcagcgagaagacccccaccaagaggacagctgcctctgtgctgaacaacttcatcgagagccccagcaagctgctggacacccccatcaagaacctgctggacacccctgtgaagacccagtatgacttccccagctgccgctgtgtggagcagatcatcgagaaggatgagggccccttctacacccacctgggcgccggccccaacgtggccgccatccgggagatcatggaggagagatttggccagaagggcaaggccatccgcatcgagagggtcatctacaccgggaaggagggcaagagcagccagggctgccccatcgccaagtgggtggtgcggcgcagcagcagcgaggagaagctgctgtgcctggtgcgggagcgggccggccacacctgtgaggccgctgtgattgtcatcctgatcctggtgtgggagggcatccccctgagcctggccgacaagctgtacagcgagctgacagagaccctgaggaaatatggcaccctgaccaacagaagatgtgccctgaatgaggagaggacctgtgcctgccagggcctggaccctgagacctgtggggccagcttctcctttggctgctcctggagcatgtactacaacggctgcaagtttgcccggagcaagatccccaggaagttcaagctgctgggagatgaccccaaggaggaggagaagctggagagccacctgcagaacctgagcaccctgatggcccccacctacaagaagctggccccagatgcctacaacaaccagatcgagtatgagcaccgggcccctgagtgccgcctgggcctgaaggagggccggcccttcagcggcgtgacagcctgcctggacttctgtgcccacgcccaccgggacctgcacaacatgcagaatggcagcaccctggtgtgcaccctgacccgggaggacaaccgggagtttggaggcaagccagaagatgagcagctgcacgtgctgcccctgtacaaggtgtctgatgtggatgaatttggatctgtggaggcccaggaggagaagaagaggtctggggccatccaggtgctgagcagcttccggaggaaggtgaggatgctggccgagcctgtgaagacctgccggcagaggaagctggaggccaagaaggctgctgctgagaagctgagcagcctggagaacagcagcaacaagaatgagaaggagaagagcgcccccagcaggaccaagcagacagaaaatgccagccaggccaagcagctggccgagctgctgcggctgagcggccctgtgatgcagcagagccagcagccccagcccctgcagaagcagcccccccagccccagcagcagcagaggccccagcagcagcagccccaccacccccagacagaatctgtgaacagctacagcgccagcggcagcaccaacccctacatgaggcggcccaaccctgtgagcccctaccccaacagcagccacaccagtgacatctacggcagcaccagccccatgaacttctacagcaccagcagccaggccgccggcagctacctgaacagcagcaaccccatgaacccctacccaggcctgctgaaccagaacacccagtaccccagctaccagtgcaatggaaacctgtctgtggacaactgcagcccctacctgggcagctacagcccccagagccagcccatggacctgtaccgctaccccagccaggaccccctgagcaagctgagcctgccccccatccacaccctgtaccagccccgcttcggcaacagccagagcttcaccagcaagtacctgggctacggcaaccagaacatgcagggagatggcttcagcagctgcaccatccggcccaacgtgcaccacgtgggcaagctgcccccctaccccacccatgagatggatggccacttcatgggcgccaccagccggctgccccccaacctgagcaaccccaacatggactacaagaatggagagcaccacagccccagccacatcatccacaactacagcgctgcccctggcatgttcaacagcagcctgcacgccctgcacctgcagaacaaggaaaatgacatgctgagccacacagccaacggcctgagcaagatgctgcctgccctgaaccacgacagaacagcctgtgtgcagggcggcctgcacaagctgagtgatgccaacggccaggagaagcagcccctggccctggtgcagggcgtggccagcggggctgaggacaatgatgaggtgtggagcgacagcgagcagagcttcctggaccctgacatcggcggcgtggccgtggcccccacccacggcagcatcctgattgaatgtgccaagcgggagctgcacgccaccacccccctgaagaaccccaacagaaaccaccccacccgcatcagcctggtgttctaccagcacaagtccatgaatgagcccaagcacggcctggccctgtgggaggccaagatggccgagaaggcccgggagaaggaggaggagtgtgagaagtatggccctgactatgtgccccagaagagccacggcaagaaggtgaagcgggagcctgctgagccccatgagaccagcgagcccacctacctgcgcttcatcaagagcctggccgagaggaccatgtctgtgaccacagacagcacagtgaccaccagcccctatgccttcaccagggtgacaggcccctacaaccgctacatctag

SEQ ID NO: 22113 - DNA, 615 bp, synthetic construct
  misc_feature 1..615: note = Description of Artificial Sequence: Synthetic coding sequence
  source 1..615: mol_type = other DNA
atggtgtgtggcggctttgcctgcagcaagaactgcctgtgtgccctgaacctgctgtacaccctggtgtccctgctgctgattggaattgctgcctggggcattggatttggcctcatcagcagcctgcgggtggtgggcgtggtgattgctgtgggcatcttcctgttcctgattgccctggtgggcctgattggagctgtgaagcaccaccaggtgctgctcttcttctacatgatcatcctgctgctggtgttcatcgtgcagttctctgtgtcctgtgcctgcctggccctgaaccaggagcagcagggccagctgctggaggtgggctggaacaacacagccagcgccagaaatgacatccagaggaacctgaactgctgcggcttccgctctgtgaaccccaatgacacctgcctggccagctgtgtgaagagtgaccacagctgcagcccctgtgcccccatcatcggggagtatgctggggaggtgctgcgctttgtgggcggcatcggcctcttcttctccttcacagagatcctgggcgtgtggctgacctaccgctacagaaaccagaaggacccccgggccaaccccagcgccttcctgtag

SEQ ID NO: 22114 - DNA, 738 bp, synthetic construct
  misc_feature 1..738: note = Description of Artificial Sequence: Synthetic coding sequence
  source 1..738: mol_type = other DNA
atggccagccccagccggcggctgcagaccaagcctgtgatcacctgcttcaagtctgtgctgctgatctacaccttcatcttctggatcactggagtcatcctgctggccgtgggcatctggggcaaggtgtccctggagaactacttcagcctgctgaatgagaaggccaccaacgtgccctttgtgctgattgccactggaacagtcatcatcctgctgggcaccttcggctgctttgccacctgccgggccagcgcctggatgctgaagctgtatgccatgttcctgaccctggtgttcctggtggagctggtggccgccatcgtgggctttgtgttcagacatgagatcaagaacagcttcaagaacaactatgagaaggccctgaagcagtacaacagcactggagactaccgcagccatgctgtggacaagatccagaacaccctgcactgctgcggcgtgacagactacagagactggacagacaccaactactacagcgagaagggcttccccaagagctgctgcaagctggaggactgcaccccccagagagatgctgacaaggtgaacaatgaaggctgcttcatcaaggtgatgaccatcattgaaagtgagatgggcgtggtggccggcatcagctttggagtggcctgcttccagctgattggcatcttcctggcctactgcctgagccgggccatcaccaacaaccagtatgagatcgtgtag

SEQ ID NO: 22115 - DNA, 684 bp, synthetic construct
  misc_feature 1..684: note = Description of Artificial Sequence: Synthetic coding sequence
  source 1..684: mol_type = other DNA
atggccagccccagccggcggctgcagaccaagcctgtgatcacctgcttcaagtctgtgctgctgatctacaccttcatcttctggatcactggagtcatcctgctggccgtgggcatctggggcaaggtgtccctggagaactacttcagcctgctgaatgagaaggccaccttcggctgctttgccacctgccgggccagcgcctggatgctgaagctgtatgccatgttcctgaccctggtgttcctggtggagctggtggccgccatcgtgggctttgtgttcagacatgagatcaagaacagcttcaagaacaactatgagaaggccctgaagcagtacaacagcactggagactaccgcagccatgctgtggacaagatccagaacaccctgcactgctgcggcgtgacagactacagagactggacagacaccaactactacagcgagaagggcttccccaagagctgctgcaagctggaggactgcaccccccagagagatgctgacaaggtgaacaatgaaggctgcttcatcaaggtgatgaccatcattgaaagtgagatgggcgtggtggccggcatcagctttggagtggcctgcttccagctgattggcatcttcctggcctactgcctgagccgggccatcaccaacaaccagtatgagatcgtgtag

SEQ ID NO: 22116 - DNA, 669 bp, synthetic construct
  misc_feature 1..669: note = Description of Artificial Sequence: Synthetic coding sequence
  source 1..669: mol_type = other DNA
atggagaggaagggcagcgctgctggggccaagggcaaccccagccccccagctgctggggagggccagaggcctcctccacccctgtgtgtgcctgggggcggcggcggggccccagcccggggccaggtgggcgctgctgctgagcctgctgagctgatcagaagagcccacgagttcaagagccagggcgcccagtgctacaaggacaagaagttccgggaggccatcggcaagtaccaccgggccctgctggagctgaagggcctgctgcccccacctggagagcgggagcgggacagcaggcctgccagccctgctggggccctgaagccaggccgcctgtctgaggagcagagcaagacagtggaggccatcgagattgactgctacaacagcctggccgcctgcctgctgcaggccgagctggtgaactatgaaagagtgaaggagtactgcctgaaggtgctgaagaaggagggggagaacttcaaggccctgtaccgcagcggcgtggccttctaccacctgggggactatgacaaggccctgtactacctgaaggaggcccggacccagcagcccacagacaccaacgtcatccgctacatccagctgacagagatgaagctgagccgctgcagccagcgggagaaggaggccatgtag

SEQ ID NO: 22117 - DNA, 258 bp, synthetic construct
  misc_feature 1..258: note = Description of Artificial Sequence: Synthetic coding sequence
  source 1..258: mol_type = other DNA
atggtgaagcagatcgagagcaagacagccttccaggaggccctggatgctgctggggacaagctggtggtggtggacttcagcgccacctggtgtggcccctgcaagatgatcaagcccttcttccatgatgtggcctctgaatgtgaggtgaagtgcatgcccaccttccagttcttcaagaagggccagaaggtgggggagttcagcggggccaacaaggagaagctggaggccaccatcaatgagctggtgtag

SEQ ID NO: 22118 - DNA, 318 bp, synthetic construct
  misc_feature 1..318: note = Description of Artificial Sequence: Synthetic coding sequence
  source 1..318: mol_type = other DNA
atggtgaagcagatcgagagcaagacagccttccaggaggccctggatgctgctggggacaagctggtggtggtggacttcagcgccacctggtgtggcccctgcaagatgatcaagcccttcttccacagcctgtctgagaagtacagcaatgtcatcttcctggaggtggatgtggatgactgccaggatgtggcctctgaatgtgaggtgaagtgcatgcccaccttccagttcttcaagaagggccagaaggtgggggagttcagcggggccaacaaggagaagctggaggccaccatcaatgagctggtgtag

SEQ ID NO: 22119 - DNA, 1176 bp, synthetic construct
  misc_feature 1..1176: note = Description of Artificial Sequence: Synthetic coding sequence
  source 1..1176: mol_type = other DNA
atggtgatgttcaagaagatcaagagctttgaggtggtgttcaatgaccctgagaaggtgtatggcagcggggagaaggtggccggccgggtcatcgtggaggtgtgtgaggtgaccagggtgaaggctgtgcgcatcctggcctgtggggtggccaaggtgctgtggatgcagggcagccagcagtgcaagcagaccagcgagtacctgcgctatgaggacaccctgctgctggaggaccagcccactggagaaaatgagatggtgatcatgaggcctggcaacaagtatgagtacaagtttggatttgagctgccccagggccccctgggcaccagcttcaagggcaagtatggctgtgtggactactgggtgaaggccttcctggaccggcccagccagcccacccaggagaccaagaagaactttgaggtggtggacctggtggatgtgaacaccccagacctgatggcccctgtgtctgccaagaaggagaagaaggtgtcctgcatgttcatcccagatggccgggtgtctgtgtctgccagaattgacaggaagggcttctgtgaaggagatgagatcagcatccatgctgactttgagaacacctgcagccgcatcgtggtgcccaaggccgccatcgtggcccggcacacctacctggccaacggccagaccaaggtgctgacccagaagctgagctctgtgcggggcaaccacatcatcagcggcacctgtgcctcctggaggggcaagagcctgcgggtgcagaagatccggcccagcatcctgggctgcaacatcctgcgggtggagtacagcctgctgatctacgtgtctgtgcccggcagcaagaaggtgatcctggacctgcccctggtgattggcagccgcagcggcctgagcagcaggaccagctccatggccagcaggaccagcagcgagatgtcctgggtggacctgaacatcccagacaccccagaggccccaccctgctacatggatgtgattcctgaggaccaccggctggagagccccaccacccccctgctggatgacatggatggcagccaggacagccccatcttcatgtatgcccctgagttcaagttcatgcccccacccacctacacagaggtggacccctgcatcctgaacaacaacgtgcagtag

SEQ ID NO: 22120 - DNA, 1494 bp, synthetic construct
  misc_feature 1..1494: note = Description of Artificial Sequence: Synthetic coding sequence
  source 1..1494: mol_type = other DNA
atgaatggacctgaggacctgcccaagagctatgactatgacctgatcatcatcggcggcggcagcggcggcctggccgccgccaaggaggccgcccagtatggcaagaaggtgatggtgctggactttgtgacccccacccccctgggcacccgctggggcctgggcggcacctgtgtgaatgtgggctgcatccccaagaagctgatgcaccaggccgccctgctgggccaggccctgcaggacagcaggaactacggctggaaggtggaggagaccgtgaagcatgactgggacaggatgattgaggccgtgcagaaccacatcggcagcctgaactggggctacagagtggccctgcgggagaagaaggtggtgtatgaaaatgcctacggccagttcatcggcccccaccgcatcaaggccaccaacaacaagggcaaggagaagatctacagcgctgagcgcttcctgattgccactggagagcggccccgctacctgggcatccctggggacaaggagtactgcatcagcagtgatgacctcttcagcctgccctactgccctgggaagaccctggtggtgggcgccagctatgtggccctggagtgtgccggcttcctggccggcatcggcctggatgtgacagtgatggtgcgcagcatcctgctgcggggctttgaccaggacatggccaacaagatcggggagcacatggaggagcacggcatcaagttcatccggcagtttgtgcccatcaaggtggagcagattgaagctggcaccccaggccgcctgcgggtggtggcccagagcaccaacagcgaggagatcatcgagggggagtacaacacagtgatgctggccatcggcagagatgcctgcaccaggaagattggcctggagaccgtgggcgtgaagatcaatgagaagacaggcaagatccctgtgacagatgaggagcagaccaacgtgccctacatctatgccatcggggacatcctggaggacaaggtggagctgacccctgtggccatccaggccggccgcctgctggcccagaggctgtatgccggcagcacagtgaagtgtgactatgaaaatgtgcccaccaccgtcttcacccccctggagtatggagcctgtggcctgtctgaggagaaggctgtggagaagtttggagaagaaaatattgaggtgtaccacagctacttctggcccctggagtggaccatccccagccgggacaacaacaagtgctacgccaagatcatctgcaacaccaaggacaatgaaagagtggtgggcttccacgtgctgggccccaatgctggggaggtgacccagggctttgctgctgccctgaagtgtggcctgaccaagaagcagctggacagcaccatcggcatccaccctgtgtgtgccgaggtgttcaccaccctgtctgtgaccaagaggtctggggccagcatcctgcaggccggctgctag

SEQ ID NO: 22121 - DNA, 1746 bp, synthetic construct
  misc_feature 1..1746: note = Description of Artificial Sequence: Synthetic coding sequence
  source 1..1746: mol_type = other DNA
atgcagcaggtgatgctgacctgcaagggcgtgaacagaggacatgctgtgcctgctggccctggcaggaagccccggccccggcgcagcagccggctgctggccggggagaagcacctgaccaggtctgccctgctgctgtgccacacagaagatggccgggccctggagggcaccctgtctgagctggccgctgagacagacctgcctgtggtgtttgtgaagcagaggaagattggaggccacggccccaccctgaaggcctaccaggagggccgcctgcagaagctgctgaagatgaatggacctgaggacctgcccaagagctatgactatgacctgatcatcattggaggcggcagcggcggcctggccgccgccaaggaggccgcccagtatggcaagaaggtgatggtgctggactttgtgacccccacccccctgggcacccgctggggcctgggcggcacctgtgtgaatgtgggctgcatccccaagaagctgatgcaccaggccgccctgctgggccaggccctgcaggacagcagaaattatggctggaaggtggaggagaccgtgaagcatgactgggacaggatgattgaagctgtgcagaaccacatcggcagcctgaactggggctacagagtggccctgcgggagaagaaggtggtgtatgaaaatgcctacggccagttcatcggcccccaccgcatcaaggccaccaacaacaagggcaaggagaagatctacagcgctgagcgcttcctgattgccaccggggagcggccccgctacctgggcatccctggggacaaggagtactgcatcagcagtgatgacctcttcagcctgccctactgccctgggaagaccctggtggtgggcgccagctatgtggccctggagtgtgccggcttcctggccggcatcggcctggatgtgacagtgatggtgcgcagcatcctgctgcggggctttgaccaggacatggccaacaagattggagagcacatggaggagcacggcatcaagttcatccggcagtttgtgcccatcaaggtggagcagatcgaggccggcaccccaggccgcctgcgggtggtggcccagagcaccaacagcgaggagatcattgaaggagagtacaacacagtgatgctggccatcggcagagatgcctgcaccaggaagattggcctggagaccgtgggcgtgaagatcaatgagaagacaggcaagatccctgtgacagatgaggagcagaccaacgtgccctacatctatgccatcggggacatcctggaggacaaggtggagctgacccctgtggccatccaggccggccgcctgctggcccagaggctgtatgccggcagcacagtgaagtgtgactatgaaaatgtgcccaccaccgtcttcacccccctggagtatggagcctgtggcctgtctgaggagaaggctgtggagaagtttggagaggagaacatcgaggtgtaccacagctacttctggcccctggagtggaccatccccagccgggacaacaacaagtgctacgccaagatcatctgcaacaccaaggacaatgaaagagtggtgggcttccacgtgctgggccccaatgctggggaggtgacccagggctttgctgctgccctgaagtgtggcctgaccaagaagcagctggacagcaccatcggcatccaccctgtgtgtgccgagttcttctccttcatctag

SEQ ID NO: 22122 - DNA, 1650 bp, synthetic construct
  misc_feature 1..1650: note = Description of Artificial Sequence: Synthetic coding sequence
  source 1..1650: mol_type = other DNA
atgagctgtgaagatggccgggccctggagggcaccctgtctgagctggccgctgagacagacctgcctgtggtgtttgtgaagcagaggaagattggaggccacggccccaccctgaaggcctaccaggagggccgcctgcagaagctgctgaagatgaatggacctgaggacctgcccaagagctatgactatgacctgatcatcatcggcggcggcagcggcggcctggccgccgccaaggaggccgcccagtatggcaagaaggtgatggtgctggactttgtgacccccacccccctgggcacccgctggggcctgggcggcacctgtgtgaatgtgggctgcatccccaagaagctgatgcaccaggccgccctgctgggccaggccctgcaggacagcaggaactacggctggaaggtggaggagaccgtgaagcatgactgggacaggatgattgaggccgtgcagaaccacatcggcagcctgaactggggctacagagtggccctgcgggagaagaaggtggtgtatgaaaatgcctacggccagttcatcggcccccaccgcatcaaggccaccaacaacaagggcaaggagaagatctacagcgctgagcgcttcctgattgccactggagagcggccccgctacctgggcatccctggggacaaggagtactgcatcagcagtgatgacctcttcagcctgccctactgccctgggaagaccctggtggtgggcgccagctatgtggccctggagtgtgccggcttcctggccggcatcggcctggatgtgacagtgatggtgcgcagcatcctgctgcggggctttgaccaggacatggccaacaagatcggggagcacatggaggagcacggcatcaagttcatccggcagtttgtgcccatcaaggtggagcagattgaagctggcaccccaggccgcctgcgggtggtggcccagagcaccaacagcgaggagatcatcgagggggagtacaacacagtgatgctggccatcggcagagatgcctgcaccaggaagattggcctggagaccgtgggcgtgaagatcaatgagaagacaggcaagatccctgtgacagatgaggagcagaccaacgtgccctacatctatgccatcggggacatcctggaggacaaggtggagctgacccctgtggccatccaggccggccgcctgctggcccagaggctgtatgccggcagcacagtgaagtgtgactatgaaaatgtgcccaccaccgtcttcacccccctggagtatggagcctgtggcctgtctgaggagaaggctgtggagaagtttggagaagaaaatattgaggtgtaccacagctacttctggcccctggagtggaccatccccagccgggacaacaacaagtgctacgccaagatcatctgcaacaccaaggacaatgaaagagtggtgggcttccacgtgctgggccccaatgctggggaggtgacccagggctttgctgctgccctgaagtgtggcctgaccaagaagcagctggacagcaccatcggcatccaccctgtgtgtgccgaggtgttcaccaccctgtctgtgaccaagaggtctggggccagcatcctgcaggccggctgctag

SEQ ID NO: 22123 - DNA, 1626 bp, synthetic construct
  misc_feature 1..1626: note = Description of Artificial Sequence: Synthetic coding sequence
  source 1..1626: mol_type = other DNA
atgctgagccggctggtgctgaacagctgggcccaggccatcatccggcccaggcctcccaaggtgctgggcctgcaggtgaccaccttcagcgaggcctaccaggagggccgcctgcagaagctgctgaagatgaatggacctgaggacctgcccaagagctatgactatgacctgatcatcatcggcggcggcagcggcggcctggccgccgccaaggaggccgcccagtatggcaagaaggtgatggtgctggactttgtgacccccacccccctgggcacccgctggggcctgggcggcacctgtgtgaatgtgggctgcatccccaagaagctgatgcaccaggccgccctgctgggccaggccctgcaggacagcaggaactacggctggaaggtggaggagaccgtgaagcatgactgggacaggatgattgaggccgtgcagaaccacatcggcagcctgaactggggctacagagtggccctgcgggagaagaaggtggtgtatgaaaatgcctacggccagttcatcggcccccaccgcatcaaggccaccaacaacaagggcaaggagaagatctacagcgctgagcgcttcctgattgccactggagagcggccccgctacctgggcatccctggggacaaggagtactgcatcagcagtgatgacctcttcagcctgccctactgccctgggaagaccctggtggtgggcgccagctatgtggccctggagtgtgccggcttcctggccggcatcggcctggatgtgacagtgatggtgcgcagcatcctgctgcggggctttgaccaggacatggccaacaagatcggggagcacatggaggagcacggcatcaagttcatccggcagtttgtgcccatcaaggtggagcagattgaagctggcaccccaggccgcctgcgggtggtggcccagagcaccaacagcgaggagatcatcgagggggagtacaacacagtgatgctggccatcggcagagatgcctgcaccaggaagattggcctggagaccgtgggcgtgaagatcaatgagaagacaggcaagatccctgtgacagatgaggagcagaccaacgtgccctacatctatgccatcggggacatcctggaggacaaggtggagctgacccctgtggccatccaggccggccgcctgctggcccagaggctgtatgccggcagcacagtgaagtgtgactatgaaaatgtgcccaccaccgtcttcacccccctggagtatggagcctgtggcctgtctgaggagaaggctgtggagaagtttggagaagaaaatattgaggtgtaccacagctacttctggcccctggagtggaccatccccagccgggacaacaacaagtgctacgccaagatcatctgcaacaccaaggacaatgaaagagtggtgggcttccacgtgctgggccccaatgctggggaggtgacccagggctttgctgctgccctgaagtgtggcctgaccaagaagcagctggacagcaccatcggcatccaccctgtgtgtgccgaggtgttcaccaccctgtctgtgaccaagaggtctggggccagcatcctgcaggccggctgctag

SEQ ID NO: 22124 - DNA, 1839 bp, synthetic construct
  misc_feature 1..1839: note = Description of Artificial Sequence: Synthetic coding sequence
  source 1..1839: mol_type = other DNA
atgcctgtggatgactactggctgtgcctgcctgccagctgtgcccggccctttgtgcagacagtgcgggtggtgcagagctgcccccactgctgctggttccctggggtgctgcccagcgtgcctgagcccctgaggatgcctgccatgctgcccaccggcagccacagcgctgtgctgccccccagccactgcagcacagccccacccagcaccagccaggagcccagcagcagcgctgaccccaagctgtgcctgagcccccccaccagtgacagccggcaggagagaaatgtgcagtttggcctggcctaccaggagggccgcctgcagaagctgctgaagatgaatggacctgaggacctgcccaagagctatgactatgacctgatcatcattggaggcggcagcggcggcctggccgccgccaaggaggccgcccagtatggcaagaaggtgatggtgctggactttgtgacccccacccccctgggcacccgctggggcctgggcggcacctgtgtgaatgtgggctgcatccccaagaagctgatgcaccaggccgccctgctgggccaggccctgcaggacagcagaaattatggctggaaggtggaggagaccgtgaagcatgactgggacaggatgattgaagctgtgcagaaccacatcggcagcctgaactggggctacagagtggccctgcgggagaagaaggtggtgtatgaaaatgcctacggccagttcatcggcccccaccgcatcaaggccaccaacaacaagggcaaggagaagatctacagcgctgagcgcttcctgattgccaccggggagcggccccgctacctgggcatccctggggacaaggagtactgcatcagcagtgatgacctcttcagcctgccctactgccctgggaagaccctggtggtgggcgccagctatgtggccctggagtgtgccggcttcctggccggcatcggcctggatgtgacagtgatggtgcgcagcatcctgctgcggggctttgaccaggacatggccaacaagattggagagcacatggaggagcacggcatcaagttcatccggcagtttgtgcccatcaaggtggagcagatcgaggccggcaccccaggccgcctgcgggtggtggcccagagcaccaacagcgaggagatcattgaaggagagtacaacacagtgatgctggccatcggcagagatgcctgcaccaggaagattggcctggagaccgtgggcgtgaagatcaatgagaagacaggcaagatccctgtgacagatgaggagcagaccaacgtgccctacatctatgccatcggggacatcctggaggacaaggtggagctgacccctgtggccatccaggccggccgcctgctggcccagaggctgtatgccggcagcacagtgaagtgtgactatgaaaatgtgcccaccaccgtcttcacccccctggagtatggagcctgtggcctgtctgaggagaaggctgtggagaagtttggagaggagaacatcgaggtgtaccacagctacttctggcccctggagtggaccatccccagccgggacaacaacaagtgctacgccaagatcatctgcaacaccaaggacaatgaaagagtggtgggcttccacgtgctgggccccaatgctggggaggtgacccagggctttgctgctgccctgaagtgtggcctgaccaagaagcagctggacagcaccatcggcatccaccctgtgtgtgccgaggtgttcaccaccctgtctgtgaccaagaggtctggggccagcatcctgcaggccggctgctag

SEQ ID NO: 22125 - DNA, 1944 bp, synthetic construct
  misc_feature 1..1944: note = Description of Artificial Sequence: Synthetic coding sequence
  source 1..1944: mol_type = other DNA
atgggctgtgccgagggcaaggctgtggccgccgccgcccccacagagctgcagaccaagggcaagaatggagatggaagaagaagaagtgccaaggaccaccaccctgggaagaccctgcctgagaacccagctggcttcaccagcacagccacagctgacagccgggccctgctgcaggcctacattgatggccacagcgtggtgatcttcagccgcagcacctgcacccgctgcacagaggtgaagaagctgttcaagagcctgtgtgtgccctactttgtgctggagctggaccagacagaagatggccgggccctggagggcaccctgtctgagctggccgctgagacagacctgcctgtggtgtttgtgaagcagaggaagattggaggccacggccccaccctgaaggcctaccaggagggccgcctgcagaagctgctgaagatgaatggacctgaggacctgcccaagagctatgactatgacctgatcatcatcggcggcggcagcggcggcctggccgccgccaaggaggccgcccagtatggcaagaaggtgatggtgctggactttgtgacccccacccccctgggcacccgctggggcctgggcggcacctgtgtgaatgtgggctgcatccccaagaagctgatgcaccaggccgccctgctgggccaggccctgcaggacagcaggaactacggctggaaggtggaggagaccgtgaagcatgactgggacaggatgattgaggccgtgcagaaccacatcggcagcctgaactggggctacagagtggccctgcgggagaagaaggtggtgtatgaaaatgcctacggccagttcatcggcccccaccgcatcaaggccaccaacaacaagggcaaggagaagatctacagcgctgagcgcttcctgattgccactggagagcggccccgctacctgggcatccctggggacaaggagtactgcatcagcagtgatgacctcttcagcctgccctactgccctgggaagaccctggtggtgggcgccagctatgtggccctggagtgtgccggcttcctggccggcatcggcctggatgtgacagtgatggtgcgcagcatcctgctgcggggctttgaccaggacatggccaacaagatcggggagcacatggaggagcacggcatcaagttcatccggcagtttgtgcccatcaaggtggagcagattgaagctggcaccccaggccgcctgcgggtggtggcccagagcaccaacagcgaggagatcatcgagggggagtacaacacagtgatgctggccatcggcagagatgcctgcaccaggaagattggcctggagaccgtgggcgtgaagatcaatgagaagacaggcaagatccctgtgacagatgaggagcagaccaacgtgccctacatctatgccatcggggacatcctggaggacaaggtggagctgacccctgtggccatccaggccggccgcctgctggcccagaggctgtatgccggcagcacagtgaagtgtgactatgaaaatgtgcccaccaccgtcttcacccccctggagtatggagcctgtggcctgtctgaggagaaggctgtggagaagtttggagaagaaaatattgaggtgtaccacagctacttctggcccctggagtggaccatccccagccgggacaacaacaagtgctacgccaagatcatctgcaacaccaaggacaatgaaagagtggtgggcttccacgtgctgggccccaatgctggggaggtgacccagggctttgctgctgccctgaagtgtggcctgaccaagaagcagctggacagcaccatcggcatccaccctgtgtgtgccgaggtgttcaccaccctgtctgtgaccaagaggtctggggccagcatcctgcaggccggctgctag

SEQ ID NO: 22126 - DNA, 1494 bp, synthetic construct
  misc_feature 1..1494: note = Description of Artificial Sequence: Synthetic coding sequence
  source 1..1494: mol_type = other DNA
atgaatggacctgaggacctgcccaagagctatgactatgacctgatcatcatcggcggcggcagcggcggcctggccgccgccaaggaggccgcccagtatggcaagaaggtgatggtgctggactttgtgacccccacccccctgggcacccgctggggcctgggcggcacctgtgtgaatgtgggctgcatccccaagaagctgatgcaccaggccgccctgctgggccaggccctgcaggacagcaggaactacggctggaaggtggaggagaccgtgaagcatgactgggacaggatgattgaggccgtgcagaaccacatcggcagcctgaactggggctacagagtggccctgcgggagaagaaggtggtgtatgaaaatgcctacggccagttcatcggcccccaccgcatcaaggccaccaacaacaagggcaaggagaagatctacagcgctgagcgcttcctgattgccactggagagcggccccgctacctgggcatccctggggacaaggagtactgcatcagcagtgatgacctcttcagcctgccctactgccctgggaagaccctggtggtgggcgccagctatgtggccctggagtgtgccggcttcctggccggcatcggcctggatgtgacagtgatggtgcgcagcatcctgctgcggggctttgaccaggacatggccaacaagatcggggagcacatggaggagcacggcatcaagttcatccggcagtttgtgcccatcaaggtggagcagattgaagctggcaccccaggccgcctgcgggtggtggcccagagcaccaacagcgaggagatcatcgagggggagtacaacacagtgatgctggccatcggcagagatgcctgcaccaggaagattggcctggagaccgtgggcgtgaagatcaatgagaagacaggcaagatccctgtgacagatgaggagcagaccaacgtgccctacatctatgccatcggggacatcctggaggacaaggtggagctgacccctgtggccatccaggccggccgcctgctggcccagaggctgtatgccggcagcacagtgaagtgtgactatgaaaatgtgcccaccaccgtcttcacccccctggagtatggagcctgtggcctgtctgaggagaaggctgtggagaagtttggagaagaaaatattgaggtgtaccacagctacttctggcccctggagtggaccatccccagccgggacaacaacaagtgctacgccaagatcatctgcaacaccaaggacaatgaaagagtggtgggcttccacgtgctgggccccaatgctggggaggtgacccagggctttgctgctgccctgaagtgtggcctgaccaagaagcagctggacagcaccatcggcatccaccctgtgtgtgccgaggtgttcaccaccctgtctgtgaccaagaggtctggggccagcatcctgcaggccggcggctag

SEQ ID NO: 22127 - DNA, 1494 bp, synthetic construct; identical to SEQ ID NO: 22126
  misc_feature 1..1494: note = Description of Artificial Sequence: Synthetic coding sequence
  source 1..1494: mol_type = other DNA

SEQ ID NO: 22128 - DNA, 1944 bp, synthetic construct
  misc_feature 1..1944: note = Description of Artificial Sequence: Synthetic coding sequence
  source 1..1944: mol_type = other DNA
atgggctgtgccgagggcaaggctgtggccgccgccgcccccacagagctgcagaccaagggcaagaatggagatggaagaagaagaagtgccaaggaccaccaccctgggaagaccctgcctgagaacccagctggcttcaccagcacagccacagctgacagccgggccctgctgcaggcctacattgatggccacagcgtggtgatcttcagccgcagcacctgcacccgctgcacagaggtgaagaagctgttcaagagcctgtgtgtgccctactttgtgctggagctggaccagacagaagatggccgggccctggagggcaccctgtctgagctggccgctgagacagacctgcctgtggtgtttgtgaagcagaggaagattggaggccacggccccaccctgaaggcctaccaggagggccgcctgcagaagctgctgaagatgaatggacctgaggacctgcccaagagctatgactatgacctgatcatcatcggcggcggcagcggcggcctggccgccgccaaggaggccgcccagtatggcaagaaggtgatggtgctggactttgtgacccccacccccctgggcacccgctggggcctgggcggcacctgtgtgaatgtgggctgcatccccaagaagctgatgcaccaggccgccctgctgggccaggccctgcaggacagcaggaactacggctggaaggtggaggagaccgtgaagcatgactgggacaggatgattgaggccgtgcagaaccacatcggcagcctgaactggggctacagagtggccctgcgggagaagaaggtggtgtatgaaaatgcctacggccagttcatcggcccccaccgcatcaaggccaccaacaacaagggcaaggagaagatctacagcgctgagcgcttcctgattgccactggagagcggccccgctacctgggcatccctggggacaaggagtactgcatcagcagtgatgacctcttcagcctgccctactgccctgggaagaccctggtggtgggcgccagctatgtggccctggagtgtgccggcttcctggccggcatcggcctggatgtgacagtgatggtgcgcagcatcctgctgcggggctttgaccaggacatggccaacaagatcggggagcacatggaggagcacggcatcaagttcatccggcagtttgtgcccatcaaggtggagcagattgaagctggcaccccaggccgcctgcgggtggtggcccagagcaccaacagcgaggagatcatcgagggggagtacaacacagtgatgctggccatcggcagagatgcctgcaccaggaagattggcctggagaccgtgggcgtgaagatcaatgagaagacaggcaagatccctgtgacagatgaggagcagaccaacgtgccctacatctatgccatcggggacatcctggaggacaaggtggagctgacccctgtggccatccaggccggccgcctgctggcccagaggctgtatgccggcagcacagtgaagtgtgactatgaaaatgtgcccaccaccgtcttcacccccctggagtatggagcctgtggcctgtctgaggagaaggctgtggagaagtttggagaagaaaatattgaggtgtaccacagctacttctggcccctggagtggaccatccccagccgggacaacaacaagtgctacgccaagatcatctgcaacaccaaggacaatgaaagagtggtgggcttccacgtgctgggccccaatgctggggaggtgacccagggctttgctgctgccctgaagtgtggcctgaccaagaagcagctggacagcaccatcggcatccaccctgtgtgtgccgaggtgttcaccaccctgtctgtgaccaagaggtctggggccagcatcctgcaggccggcggctag

SEQ ID NO: 22129 - DNA, 213 bp, synthetic construct
  misc_feature 1..213: note = Description of Artificial Sequence: Synthetic coding sequence
  source 1..213: mol_type = other DNA
atgaatggacctgaggacctgcccaagagctatgactatgacctgatcatcatcggcggcggcagcggcggcctggccgccgccaaggaggccgcccagtatggcaagaaggtgatggtgctggactttgtgacccccacccccctgggcacccgctggggcctgggcggcacctgtgtgaatgtgggctgcatccccaagaagctgatgtag

SEQ ID NO: 22130 - DNA, 1626 bp, synthetic construct
  misc_feature 1..1626: note = Description of Artificial Sequence: Synthetic coding sequence
  source 1..1626: mol_type = other DNA
atgctgagccggctggtgctgaacagctgggcccaggccatcatccggcccaggcctcccaaggtgctgggcctgcaggtgaccaccttcagcgaggcctaccaggagggccgcctgcagaagctgctgaagatgaatggacctgaggacctgcccaagagctatgactatgacctgatcatcatcggcggcggcagcggcggcctggccgccgccaaggaggccgcccagtatggcaagaaggtgatggtgctggactttgtgacccccacccccctgggcacccgctggggcctgggcggcacctgtgtgaatgtgggctgcatccccaagaagctgatgcaccaggccgccctgctgggccaggccctgcaggacagcaggaactacggctggaaggtggaggagaccgtgaagcatgactgggacaggatgattgaggccgtgcagaaccacatcggcagcctgaactggggctacagagtggccctgcgggagaagaaggtggtgtatgaaaatgcctacggccagttcatcggcccccaccgcatcaaggccaccaacaacaagggcaaggagaagatctacagcgctgagcgcttcctgattgccactggagagcggccccgctacctgggcatccctggggacaaggagtactgcatcagcagtgatgacctcttcagcctgccctactgccctgggaagaccctggtggtgggcgccagctatgtggccctggagtgtgccggcttcctggccggcatcggcctggatgtgacagtgatggtgcgcagcatcctgctgcggggctttgaccaggacatggccaacaagatcggggagcacatggaggagcacggcatcaagttcatccggcagtttgtgcccatcaaggtggagcagattgaagctggcaccccaggccgcctgcgggtggtggcccagagcaccaacagcgaggagatcatcgagggggagtacaacacagtgatgctggccatcggcagagatgcctgcaccaggaagattggcctggagaccgtgggcgtgaagatcaatgagaagacaggcaagatccctgtgacagatgaggagcagaccaacgtgccctacatctatgccatcggggacatcctggaggacaaggtggagctgacccctgtggccatccaggccggccgcctgctggcccagaggctgtatgccggcagcacagtgaagtgtgactatgaaaatgtgcccaccaccgtcttcacccccctggagtatggagcctgtggcctgtctgaggagaaggctgtggagaagtttggagaagaaaatattgaggtgtaccacagctacttctggcccctggagtggaccatccccagccgggacaacaacaagtgctacgccaagatcatctgcaacaccaaggacaatgaaagagtggtgggcttccacgtgctgggccccaatgctggggaggtgacccagggctttgctgctgccctgaagtgtggcctgaccaagaagcagctggacagcaccatcggcatccaccctgtgtgtgccgaggtgttcaccaccctgtctgtgaccaagaggtctggggccagcatcctgcaggccggcggctag

SEQ ID NO: 22131 - DNA, 315 bp, synthetic construct
  misc_feature 1..315: note = Description of Artificial Sequence: Synthetic coding sequence
  source 1..315: mol_type = other DNA
atgaatggacctgaggacctgcccaagagctatgactatgacctgatcatcatcggcggcggcagcggcggcctggccgccgccaaggaggccgcccagtatggcaagaaggtgatggtgctggactttgtgacccccacccccctgggcacccgctggggcctgggcggcacctgtgtgaatgtgggctgcatccccaagaagctgatgcaccaggccgccctgctgggccaggccctgcaggacagcaggaactacggctggaaggtggaggagaccgtgaagcatgactgggacaggatgattgaggcctag

SEQ ID NO: 22132 - DNA, 1650 bp, synthetic construct
  misc_feature 1..1650: note = Description of Artificial Sequence: Synthetic coding sequence
  source 1..1650: mol_type = other DNA
atgagctgtgaagatggccgggccctggagggcaccctgtctgagctggccgctgagacagacctgcctgtggtgtttgtgaagcagaggaagattggaggccacggccccaccctgaaggcctaccaggagggccgcctgcagaagctgctgaagatgaatggacctgaggacctgcccaagagctatgactatgacctgatcatcatcggcggcggcagcggcggcctggccgccgccaaggaggccgcccagtatggcaagaaggtgatggtgctggactttgtgacccccacccccctgggcacccgctggggcctgggcggcacctgtgtgaatgtgggctgcatccccaagaagctgatgcaccaggccgccctgctgggccaggccctgcaggacagcaggaactacggctggaaggtggaggagaccgtgaagcatgactgggacaggatgattgaggccgtgcagaaccacatcggcagcctgaactggggctacagagtggccctgcgggagaagaaggtggtgtatgaaaatgcctacggccagttcatcggcccccaccgcatcaaggccaccaacaacaagggcaaggagaagatctacagcgctgagcgcttcctgattgccactggagagcggccccgctacctgggcatccctggggacaaggagtactgcatcagcagtgatgacctcttcagcctgccctactgccctgggaagaccctggtggtgggcgccagctatgtggccctggagtgtgccggcttcctggccggcatcggcctggatgtgacagtgatggtgcgcagcatcctgctgcggggctttgaccaggacatggccaacaagatcggggagcacatggaggagcacggcatcaagttcatccggcagtttgtgcccatcaaggtggagcagattgaagctggcaccccaggccgcctgcgggtggtggcccagagcaccaacagcgaggagatcatcgagggggagtacaacacagtgatgctggccatcggcagagatgcctgcaccaggaagattggcctggagaccgtgggcgtgaagatcaatgagaagacaggcaagatccctgtgacagatgaggagcagaccaacgtgccctacatctatgccatcggggacatcctggaggacaaggtggagctgacccctgtggccatccaggccggccgcctgctggcccagaggctgtatgccggcagcacagtgaagtgtgactatgaaaatgtgcccaccaccgtcttcacccccctggagtatggagcctgtggcctgtctgaggagaaggctgtggagaagtttggagaagaaaatattgaggtgtaccacagctacttctggcccctggagtggaccatccccagccgggacaacaacaagtgctacgccaagatcatctgcaacaccaaggacaatgaaagagtggtgggcttccacgtgctgggccccaatgctggggaggtgacccagggctttgctgctgccctgaagtgtggcctgaccaagaagcagctggacagcaccatcggcatccaccctgtgtgtgccgaggtgttcaccaccctgtctgtgaccaagaggtctggggccagcatcctgcaggccggcggctag

SEQ ID NO: 22133 - DNA, 1701 bp, synthetic construct
  misc_feature 1..1701: note = Description of Artificial Sequence: Synthetic coding sequence
  source 1..1701: mol_type = other DNA
atgcctgccatgctgcccaccggcagccacagcgctgtgctgccccccagccactgcagcacagccccacccagcaccagccaggagcccagcagcagcgctgaccccaagctgtgcctgagcccccccaccagtgacagccggcaggagagaaatgtgcagtttggcctggcctaccaggagggccgcctgcagaagctgctgaagatgaatggacctgaggacctgcccaagagctatgactatgacctgatcatcattggaggcggcagcggcggcctggccgccgccaaggaggccgcccagtatggcaagaaggtgatggtgctggactttgtgacccccacccccctgggcacccgctggggcctgggcggcacctgtgtgaatgtgggctgcatccccaagaagctgatgcaccaggccgccctgctgggccaggccctgcaggacagcagaaattatggctggaaggtggaggagaccgtgaagcatgactgggacaggatgattgaagctgtgcagaaccacatcggcagcctgaactggggctacagagtggccctgcgggagaagaaggtggtgtatgaaaatgcctacggccagttcatcggcccccaccgcatcaaggccaccaacaacaagggcaaggagaagatctacagcgctgagcgcttcctgattgccaccggggagcggccccgctacctgggcatccctggggacaaggagtactgcatcagcagtgatgacctcttcagcctgccctactgccctgggaagaccctggtggtgggcgccagctatgtggccctggagtgtgccggcttcctggccggcatcggcctggatgtgacagtgatggtgcgcagcatcctgctgcggggctttgaccaggacatggccaacaagattggagagcacatggaggagcacggcatcaagttcatccggcagtttgtgcccatcaaggtggagcagatcgaggccggcaccccaggccgcctgcgggtggtggcccagagcaccaacagcgaggagatcattgaaggagagtacaacacagtgatgctggccatcggcagagatgcctgcaccaggaagattggcctggagaccgtgggcgtgaagatcaatgagaagacaggcaagatccctgtgacagatgaggagcagaccaacgtgccctacatctatgccatcggggacatcctggaggacaaggtggagctgacccctgtggccatccaggccggccgcctgctggcccagaggctgtatgccggcagcacagtgaagtgtgactatgaaaatgtgcccaccaccgtcttcacccccctggagtatggagcctgtggcctgtctgaggagaaggctgtggagaagtttggagaggagaacatcgaggtgtaccacagctacttctggcccctggagtggaccatccccagccgggacaacaacaagtgctacgccaagatcatctgcaacaccaaggacaatgaaagagtggtgggcttccacgtgctgggccccaatgctggggaggtgacccagggctttgctgctgccctgaagtgtggcctgaccaagaagcagctggacagcaccatcggcatccaccctgtgtgtgccgaggtgttcaccaccctgtctgtgaccaagaggtctggggccagcatcctgcaggccggctgctag

SEQ ID NO: 22134 - DNA, 528 bp, synthetic construct
  misc_feature 1..528: note = Description of Artificial Sequence: Synthetic coding sequence
  source 1..528: mol_type = other DNA
atgaatggacctgaggacctgcccaagagctatgactatgacctgatcatcatcggcggcggcagcggcggcctggccgccgccaaggaggccgcccagtatggcaagaaggtgatggtgctggactttgtgacccccacccccctgggcacccgctggggcctgggcggcacctgtgtgaatgtgggctgcatccccaagaagctgatgcaccaggccgccctgctgggccaggccctgcaggacagcaggaactacggctggaaggtggaggagaccgtgaagcatgactgggacaggatgattgaggccgtgcagaaccacatcggcagcctgaactggggctacagagtggccctgcgggagaagaaggtggtgtatgaaaatgcctacggccagttcatcggcccccaccgcatcaaggccaccaacaacaagggcaaggagaagatctacagcgctgagcgcttcctgattgccactggagagcggccccgctacctgggcatccctggggacaaggagtag

SEQ ID NO: 22135 - DNA, 162 bp, synthetic construct
  misc_feature 1..162: note = Description of Artificial Sequence: Synthetic coding sequence
  source 1..162: mol_type = other DNA
atgaatggacctgaggacctgcccaagagctatgactatgacctgatcatcatcggcggcggcagcggcggcctggccgccgccaaggaggccgcccagtatggcaagaaggtgatggtgctggactttgtgacccccacccccctgggcacccgctggtag

SEQ ID NO: 22136 - DNA, 219 bp, synthetic construct
  misc_feature 1..219: note = Description of Artificial Sequence: Synthetic coding sequence
  source 1..219: mol_type = other DNA
atgaatggacctgaggacctgcccaagagctatgactatgacctgatcatcatcggcggcggcagcggcggcctggccgccgccaaggaggccgcccagtatggcaagaaggtgatggtgctggactttgtgacccccacccccctgggcacccgctggggcctgggcggcacctgtgtgaatgtgggctgcatccccaagaagctgatgcaccagtag

SEQ ID NO: 22137 - DNA, 420 bp, synthetic construct
  misc_feature 1..420: note = Description of Artificial Sequence: Synthetic coding sequence
  source 1..420: mol_type = other DNA
atgctgagccggctggtgctgaacagctgggcccaggccatcatccggcccaggcctcccaaggtgctgggcctgcaggtgaccaccttcagcgaggcctaccaggagggccgcctgcagaagctgctgaagatgaatggacctgaggacctgcccaagagctatgactatgacctgatcatcatcggcggcggcagcggcggcctggccgccgccaaggaggccgcccagtatggcaagaaggtgatggtgctggactttgtgacccccacccccctgggcacccgctggggcctgggcggcacctgtgtgaatgtgggctgcatccccaagaagctgatgcaccaggccgccctgctgggccaggccctgcaggacagcaggaactacggctggaaggtggaggagaccggcatgtag

SEQ ID NO: 22138 - DNA, 1380 bp, synthetic construct
  misc_feature 1..1380: note = Description of Artificial Sequence: Synthetic coding sequence
  source 1..1380: mol_type = other DNA
atggtgctggactttgtgacccccacccccctgggcacccgctggggcctgggcggcacctgtgtgaatgtgggctgcatccccaagaagctgatgcaccaggccgccctgctgggccaggccctgcaggacagcaggaactacggctggaaggtggaggagaccgtgaagcatgactgggacaggatgattgaggccgtgcagaaccacatcggcagcctgaactggggctacagagtggccctgcgggagaagaaggtggtgtatgaaaatgcctacggccagttcatcggcccccaccgcatcaaggccaccaacaacaagggcaaggagaagatctacagcgctgagcgcttcctgattgccactggagagcggccccgctacctgggcatccctggggacaaggagtactgcatcagcagtgatgacctcttcagcctgccctactgccctgggaagaccctggtggtgggcgccagctatgtggccctggagtgtgccggcttcctggccggcatcggcctggatgtgacagtgatggtgcgcagcatcctgctgcggggctttgaccaggacatggccaacaagatcggggagcacatggaggagcacggcatcaagttcatccggcagtttgtgcccatcaaggtggagcagattgaagctggcaccccaggccgcctgcgggtggtggcccagagcaccaacagcgaggagatcatcgagggggagtacaacacagtgatgctggccatcggcagagatgcctgcaccaggaagattggcctggagaccgtgggcgtgaagatcaatgagaagacaggcaagatccctgtgacagatgaggagcagaccaacgtgccctacatctatgccatcggggacatcctggaggacaaggtggagctgacccctgtggccatccaggccggccgcctgctggcccagaggctgtatgccggcagcacagtgaagtgtgactatgaaaatgtgcccaccaccgtcttcacccccctggagtatggagcctgtggcctgtctgaggagaaggctgtggagaagtttggagaagaaaatattgaggtgtaccacagctacttctggcccctggagtggaccatccccagccgggacaacaacaagtgctacgccaagatcatctgcaacaccaaggacaatgaaagagtggtgggcttccacgtgctgggccccaatgctggggaggtgacccagggctttgctgctgccctgaagtgtggcctgaccaagaagcagctggacagcaccatcggcatccaccctgtgtgtgccgaggtgttcaccaccctgtctgtgaccaagaggtctggggccagcatcctgcaggccggctgctag

SEQ ID NO: 22139 - DNA, 1644 bp, synthetic construct
  misc_feature 1..1644: note = Description of Artificial Sequence: Synthetic coding sequence
  source 1..1644: mol_type = other DNA
atggaggatggccgggccctggagggcaccctgtctgagctggccgctgagacagacctgcctgtggtgtttgtgaagcagaggaagattggaggccacggccccaccctgaaggcctaccaggagggccgcctgcagaagctgctgaagatgaatggacctgaggacctgcccaagagctatgactatgacctgatcatcatcggcggcggcagcggcggcctggccgccgccaaggaggccgcccagtatggcaagaaggtgatggtgctggactttgtgacccccacccccctgggcacccgctggggcctgggcggcacctgtgtgaatgtgggctgcatccccaagaagctgatgcaccaggccgccctgctgggccaggccctgcaggacagcaggaactacggctggaaggtggaggagaccgtgaagcatgactgggacaggatgattgaggccgtgcagaaccacatcggcagcctgaactggggctacagagtggccctgcgggagaagaaggtggtgtatgaaaatgcctacggccagttcatcggcccccaccgcatcaaggccaccaacaacaagggcaaggagaagatctacagcgctgagcgcttcctgattgccactggagagcggccccgctacctgggcatccctggggacaaggagtactgcatcagcagtgatgacctcttcagcctgccctactgccctgggaagaccctggtggtgggcgccagctatgtggccctggagtgtgccggcttcctggccggcatcggcctggatgtgacagtgatggtgcgcagcatcctgctgcggggctttgaccaggacatggccaacaagatcggggagcacatggaggagcacggcatcaagttcatccggcagtttgtgcccatcaaggtggagcagattgaagctggcaccccaggccgcctgcgggtggtggcccagagcaccaacagcgaggagatcatcgagggggagtacaacacagtgatgctggccatcggcagagatgcctgcaccaggaagattggcctggagaccgtgggcgtgaagatcaatgagaagacaggcaagatccctgtgacagatgaggagcagaccaacgtgccctacatctatgccatcggggacatcctggaggacaaggtggagctgacccctgtggccatccaggccggccgcctgctggcccagaggctgtatgccggcagcacagtgaagtgtgactatgaaaatgtgcccaccaccgtcttcacccccctggagtatggagcctgtggcctgtctgaggagaaggctgtggagaagtttggagaagaaaatattgaggtgtaccacagctacttctggcccctggagtggaccatccccagccgggacaacaacaagtgctacgccaagatcatctgcaacaccaaggacaatgaaagagtggtgggcttccacgtgctgggccccaatgctggggaggtgacccagggctttgctgctgccctgaagtgtggcctgaccaagaagcagctggacagcaccatcggcatccaccctgtgtgtgccgaggtgttcaccaccctgtctgtgaccaagaggtctggggccagcatcctgcaggccggctgctag

SEQ ID NO: 22140 - DNA, 945 bp, synthetic construct
  misc_feature 1..945: note = Description of Artificial Sequence: Synthetic coding sequence
  source 1..945: mol_type = other DNA
atgggcagccaggccctgcccccaggccccatgcagaccctcatcttctttgacatggaggccaccggcctgcccttcagccagcccaaggtgacagagctgtgcctgctggccgtgcaccgctgtgccctggagagcccccccaccagccagggccccccacccaccgtgcccccaccaccccgggtggtggacaagctgagcctgtgtgtggcccctgggaaggcctgcagccctgctgccagcgagatcaccggcctgagcacagctgtgctggccgcccacggccggcagtgctttgatgacaacctggccaacctgctgctggccttcctgcggcggcagccccagccctggtgcctggtggcccacaatggagacagatatgacttccccctgctgcaggccgagctggccatgctgggcctgaccagcgccctggatggagccttctgtgtggacagcatcacagccctgaaggccctggagcgggccagcagccccagcgagcacggccccaggaagagctacagcctgggcagcatctacacccggctgtatggccagagccccccagacagccacacagcagaaggagatgtgctggccctgctgagcatctgccagtggaggccccaggccctgctgcgctgggtggatgcccacgcccggcccttcggcaccatccggcccatgtatggagtgacagccagcgcccggaccaagccccggcccagcgctgtgaccaccacagcccacctggccaccaccaggaacaccagccccagcctgggggagagccggggcaccaaggacctgccccctgtgaaggaccccggggccctgagccgggagggcctgctggcccccctgggcctgctggccatcctgaccctggccgtggccaccctgtatggcctgagcctggccaccccaggagagtag

SEQ ID NO: 22141 - DNA, 1110 bp, synthetic construct
  misc_feature 1..1110: note = Description of Artificial Sequence: Synthetic coding sequence
  source 1..1110: mol_type = other DNA
atgggccctggggcccggcggcagggcagaattgtgcagggccggcctgagatgtgcttctgccccccacccacccccctgccccccctgcgcatcctgaccctgggcacccacacccccaccccctgcagcagccctggcagcgctgctggcacctaccccaccatgggcagccaggccctgcccccaggccccatgcagaccctcatcttctttgacatggaggccaccggcctgcccttcagccagcccaaggtgacagagctgtgcctgctggccgtgcaccgctgtgccctggagagcccccccaccagccagggccccccacccaccgtgcccccaccaccccgggtggtggacaagctgagcctgtgtgtggcccctgggaaggcctgcagccctgctgccagcgagatcaccggcctgagcacagctgtgctggccgcccacggccggcagtgctttgatgacaacctggccaacctgctgctggccttcctgcggcggcagccccagccctggtgcctggtggcccacaacggggacagatatgacttccccctgctgcaggccgagctggccatgctgggcctgaccagcgccctggatggagccttctgtgtggacagcatcacagccctgaaggccctggagcgggccagcagccccagcgagcacggccccaggaagagctacagcctgggcagcatctacacccggctgtatggccagagccccccagacagccacacagcagaaggagatgtgctggccctgctgagcatctgccagtggaggccccaggccctgctgcgctgggtggatgcccacgcccggcccttcggcaccatccggcccatgtatggagtgacagccagcgcccggaccaagccccggcccagcgctgtgaccaccacagcccacctggccaccaccaggaacaccagccccagcctgggggagagccggggcaccaaggacctgccccctgtgaaggaccccggggccctgagccgggagggcctgctggcccccctgggcctgctggccatcctgaccctggccgtggccaccctgtatggcctgagcctggccaccccaggagagtag

SEQ ID NO: 22142 - DNA, 528 bp, synthetic construct
  misc_feature 1..528: note = Description of Artificial Sequence: Synthetic coding sequence
  source 1..528: mol_type = other DNA
atgctgggcctgaccagcgccctggatggagccttctgtgtggacagcatcacagccctgaaggccctggagcgggccagcagccccagcgagcacggccccaggaagagctacagcctgggcagcatctacacccggctgtatggccagagccccccagacagccacacagcagaaggagatgtgctggccctgctgagcatctgccagtggaggccccaggccctgctgcgctgggtggatgcccacgcccggcccttcggcaccatccggcccatgtatggagtgacagccagcgcccggaccaagccccggcccagcgctgtgaccaccacagcccacctggccaccaccaggaacaccagccccagcctgggggagagccggggcaccaaggacctgccccctgtgaaggaccccggggccctgagccgggagggcctgctggcccccctgggcctgctggccatcctgaccctggccgtggccaccctgtatggcctgagcctggccaccccaggagagtag

SEQ ID NO: 22143 - DNA, 945 bp, synthetic construct; identical to SEQ ID NO: 22140
  misc_feature 1..945: note = Description of Artificial Sequence: Synthetic coding sequence
  source 1..945: mol_type = other DNA

SEQ ID NO: 22144 - DNA, 915 bp, synthetic construct
  misc_feature 1..915: note = Description of Artificial Sequence: Synthetic coding sequence
  source 1..915: mol_type = other DNA
atgcagaccctcatcttctttgacatggaggccaccggcctgcccttcagccagcccaaggtgacagagctgtgcctgctggccgtgcaccgctgtgccctggagagcccccccaccagccagggccccccacccaccgtgcccccaccaccccgggtggtggacaagctgagcctgtgtgtggcccctgggaaggcctgcagccctgctgccagcgagatcaccggcctgagcacagctgtgctggccgcccacggccggcagtgctttgatgacaacctggccaacctgctgctggccttcctgcggcggcagccccagccctggtgcctggtggcccacaatggagacagatatgacttccccctgctgcaggccgagctggccatgctgggcctgaccagcgccctggatggagccttctgtgtggacagcatcacagccctgaaggccctggagcgggccagcagccccagcgagcacggccccaggaagagctacagcctgggcagcatctacacccggctgtatggccagagccccccagacagccacacagcagaaggagatgtgctggccctgctgagcatctgccagtggaggccccaggccctgctgcgctgggtggatgcccacgcccggcccttcggcaccatccggcccatgtatggagtgacagccagcgcccggaccaagccccggcccagcgctgtgaccaccacagcccacctggccaccaccaggaacaccagccccagcctgggggagagccggggcaccaaggacctgccccctgtgaaggaccccggggccctgagccgggagggcctgctggcccccctgggcctgctggccatcctgaccctggccgtggccaccctgtatggcctgagcctggccaccccaggagagtag

SEQ ID NO: 22145 - DNA, 528 bp, synthetic construct; identical to SEQ ID NO: 22142
  misc_feature 1..528: note = Description of Artificial Sequence: Synthetic coding sequence
  source 1..528: mol_type = other DNA

SEQ ID NO: 22146 - DNA, 3513 bp, synthetic construct
  misc_feature 1..3513: note = Description of Artificial Sequence: Synthetic coding sequence
  source 1..3513: mol_type = other DNA
atgggcctggcctggggcctgggcgtgctcttcctgatgcacgtgtgtggcaccaaccgcatccctgagagcggcggggacaacagcgtgtttgacatctttgagctgactggagctgccaggaagggcagcggccggcggctggtgaagggccctgaccccagcagccctgccttcagaattgaagatgccaacctgatcccccctgtgcctgatgacaagttccaggacctggtggatgctgtgcgggcagagaagggcttcctgctgctggccagcctgcggcagatgaagaagacccggggcaccctgctggccctggagaggaaggaccacagcggccaggtgttttctgtggtgtccaatggcaaggccggcaccctggacctgagcctgactgtgcagggcaagcagcacgtggtgtctgtggaggaggccctgctggccaccggccagtggaagagcatcaccctgtttgtgcaggaggaccgggcccagctgtacatcgactgtgagaagatggagaatgctgagctggatgtgcccatccagagcgtcttcacccgggacctggccagcatcgcccggctgagaattgccaagggcggcgtgaatgacaacttccagggcgtgctgcagaatgtgcgctttgtgtttggcaccaccccagaggacatcctgaggaacaagggctgcagcagcagcacctctgtgctgctgaccctggacaacaacgtggtgaatggcagcagccctgccatccgcaccaactacatcggccacaagaccaaggacctgcaggccatctgtggcatcagctgtgatgagctgagctccatggtgctggagctgcggggcctgcggaccatcgtgaccaccctgcaggacagcatcaggaaggtgacagaggagaacaaggagctggccaatgagctgcggcggccccccctgtgctaccacaatggagtgcagtacagaaataatgaggagtggacagtggacagctgcacagagtgccactgccagaacagcgtgaccatctgcaagaaggtgtcctgccccatcatgccctgcagcaatgccaccgtgcctgatggagagtgctgcccccgctgctggcccagcgacagcgcagatgatggctggagcccctggagcgagtggaccagctgcagcaccagctgtggaaatggcatccagcagaggggccgcagctgtgacagcctgaacaacagatgtgagggcagctctgtgcagaccaggacctgccacatccaggagtgtgacaagcgcttcaagcaggacggcggctggagccactggagcccctggagcagctgcagcgtgacctgtggagatggagtcatcacccgcatccggctgtgcaacagccccagcccccagatgaatggcaagccctgtgagggggaggcccgggagaccaaggcctgcaagaaggatgcctgccccatcaatggaggctggggcccctggagcccctgggacatctgcagcgtgacctgtggcggcggcgtgcagaagaggagccggctgtgcaacaaccccaccccccagtttggaggcaaggactgtgtgggagatgtgacagagaaccagatctgcaacaagcaggactgccccattgatggctgcctgagcaacccctgctttgctggggtgaagtgcaccagctacccagatggctcctggaagtgtggggcctgccccccaggctacagcggaaatggcatccagtgcacagatgtggatgagtgcaaggaggtgcctgatgcctgcttcaaccacaatggagagcaccgctgtgaaaatacagatcctggctacaactgcctgccctgccccccacgcttcaccggcagccagcccttcggccagggcgtggagcacgccacagccaacaagcaggtgtgcaagcccaggaacccctgcacagatggcacccatgactgcaacaagaatgccaagtgcaactacctgggccactacagcgaccccatgtaccgctgtgagtgcaagccaggctatgctggaaatggcatcatctgtggggaggacacagacctggatggctggcccaatgaaaacctggtgtgtgtggccaatgccacctaccactgcaagaaggacaactgccccaacctgcccaacagcggccaggaggactatgacaaggatggcattggagatgcctgtgatgatgatgatgacaatgacaagatcccagatgaccgggacaactgccccttccactacaacccagcccagtatgactatgacagagatgatgtgggggacagatgtgacaactgcccctacaaccacaacccagaccaggccgacacagacaacaatggagaaggagatgcctgtgccgctgacattgatggagatggcatcctgaatgaaagagacaactgccagtatgtgtacaacgtggaccagagggacacagacatggatggagtgggggaccagtgtgacaactgccccctggagcacaacccagaccagctggacagcgacagcgaccgcatcggggacacctgtgacaacaaccaggacattgatgaagatggccaccagaacaacctggacaactgcccctacgtgcccaatgccaaccaggccgaccatgacaaggatggaaaaggagatgcctgtgaccatgatgatgacaatgatggcatcccagatgacaaggacaactgccgcctggtgcccaacccagaccagaaggacagtgatggagatggaagaggagatgcctgcaaggatgactttgaccatgacagcgtgcctgacattgatgacatctgcccagaaaatgtggacatcagcgagacagacttccgccgcttccagatgatccccctggaccccaagggcaccagccagaatgaccccaactgggtggtgcgccaccagggcaaggagctggtgcagacagtgaactgtgaccccggcctggccgtgggctatgatgagttcaatgctgtggacttcagcggcaccttcttcatcaacacagaaagagatgatgattatgccggctttgtgtttggctaccagagcagcagccgcttctacgtggtgatgtggaagcaggtgacccagagctactgggacaccaaccccacccgggcccagggctacagcggcctgtctgtgaaggtggtgaacagcaccaccggccctggagagcacctgagaaatgccctgtggcacactggaaacaccccaggccaggtgaggaccctgtggcatgaccccaggcacatcggctggaaggacttcaccgcctaccgctggaggctgagccaccggcccaagacaggcttcatccgggtggtgatgtatgagggcaagaagatcatggctgacagcggccccatctatgacaagacctacgccggcggccgcctgggcctgtttgtgttcagccaggagatggtgttcttcagtgacctgaagtatgagtgccgggacccctag

SEQ ID NO: 22147 - DNA, 285 bp, synthetic construct
  misc_feature 1..285: note = Description of Artificial Sequence: Synthetic coding sequence
  source 1..285: mol_type = other DNA
atgggcctggcctggggcctgggcgtgctcttcctgatgcacgtgtgtggcaccaaccgcatccctgagagcggcggggacaacagcgtgtttgacatctttgagctgactggagctgccaggaagggcagcggccggcggctggtgaagggccctgaccccagcagccctgccttcagaattgaagatgccaacctgatcccccctgtgcctgatgacaagttccaggacctggtggatgctgtgcgggcagagaagggcttcctgctgctggccagcctgtag

SEQ ID NO: 22148 - DNA, 501 bp, synthetic construct
  misc_feature 1..501: note = Description of Artificial Sequence: Synthetic coding sequence
  source 1..501: mol_type = other DNA
atggctgctggaaatgtggtgctggtgcccctggtgacagtggagatggccagcagcgcccagatgctgatgtctgccaagaagtgcctgatgcctgccagcaccaccatggagagcactggagtgaggaccaggaccccagccaccacagcctgcccagccccccacgccagccctgcccacagccccagcgcccgggtgagcaacatgccccggcccaccaacagatgtgccagccccatccccctgtgcctgtgccacagagctggctgctactgtgaggccatcagcgagcagtggacccagaagcacttccaggcctgccagaggcgggaggacagcctggagctggccaacaagaccaccctgaccagcagcttcaggaacacaggcagccggggccagagcaccaagggccgggcccacaccagagatgactgcatgaagaagatctggaggaactgctacatgtttggcaccaagagcttcagcggggactag

SEQ ID NO: 22149 - DNA, 3519 bp, synthetic construct
  misc_feature 1..3519: note = Description of Artificial Sequence: Synthetic coding sequence
  source 1..3519: mol_type = other DNA
atggtgtggaggctggtgctgctggccctgtgggtgtggcccagcacccaggccggccaccaggacaaggacaccacctttgacctcttcagcatcagcaacatcaacaggaagaccatcggggccaagcagttccggggccctgaccccggggtgcctgcctacagatttgtgcgctttgactacatcccccctgtgaatgctgatgacctgagcaagatcaccaagatcatgaggcagaaggagggcttcttcctgacagcccagctgaagcaggacggcaagagccggggcaccctgctggccctggagggccctggcctgagccagaggcagtttgaaattgtgtccaatggacctgctgacaccctggacctgacctactggattgatggcaccaggcatgtggtgtccctggaggatgtgggcctggccgacagccagtggaagaatgtgacagtgcaggtggccggggagacctacagcctgcacgtgggctgtgacctgattgacagctttgccctggatgagcccttctatgagcacctgcaggccgagaagagcaggatgtatgtggccaagggcagcgcccgggagagccacttccggggcctgctgcagaatgtgcacctggtgtttgagaacagcgtggaggacatcctgagcaagaagggctgccagcagggccagggcgctgagatcaatgccatcagtgaaaatacagagaccctgcggctgggcccccacgtgaccacagaatatgtgggccccagcagcgagaggaggcctgaggtgtgtgagaggagctgtgaggagctgggcaacatggtgcaggagctgagcggcctgcacgtgctggtgaaccagctgtctgagaacctgaagagggtgtccaatgacaaccagttcctgtgggagctgattggaggcccccccaagaccaggaacatgtctgcctgctggcaggacggccgcttctttgctgaaaatgagacctgggtggtggacagctgcaccacctgcacctgcaagaagttcaagaccatctgccaccagatcacctgccccccagccacctgtgccagccccagctttgtggagggggagtgctgccccagctgcctgcacagcgtggatggagaggagggctggagcccctgggccgagtggacccagtgcagcgtgacctgtggcagcggcacccagcagaggggccgcagctgtgatgtgaccagcaacacctgcctgggccccagcatccagacccgggcctgcagcctgagcaaatgtgacacccgcatccggcaggacggcggctggagccactggagcccctggagcagctgcagcgtgacctgtggggtgggcaacatcacccgcatccggctgtgcaacagccctgtgccccagatgggcggcaagaactgcaagggcagcggccgggagaccaaggcctgccagggcgccccctgccccattgatggccgctggagcccctggagcccctggagcgcctgcaccgtgacctgtgccggcggcatccgggagaggaccagggtgtgcaacagccctgagccccagtatggaggcaaggcctgtgtgggagatgtgcaggagcggcagatgtgcaacaagaggagctgccctgtggatggctgcctgagcaacccctgcttccctggggcccagtgcagcagcttcccagatggctcctggagctgtggcagctgccctgtgggcttcctgggcaatggcacccactgtgaggacctggatgaatgtgccctggtgcctgacatctgcttcagcaccagcaaggtgccccgctgtgtgaacacccagcccggcttccactgcctgccctgccccccacgctaccggggcaaccagcctgtgggcgtgggcctggaggccgccaagacagagaagcaggtgtgtgagcctgagaacccctgcaaggacaagacccacaactgccacaagcatgctgagtgcatctacctgggccacttcagtgaccccatgtacaagtgtgagtgccagacaggctatgctggagatggcctcatctgtggagaagattctgacctggatggctggcccaacctgaacctggtgtgtgccaccaatgccacctaccactgcatcaaggacaactgcccccacctgcccaacagcggccaggaggactttgacaaggatggcattggagatgcctgtgatgatgatgatgacaatgatggagtgacagatgagaaggacaactgccagctgctcttcaacccccggcaggccgactatgacaaggatgaggtgggggacagatgtgacaactgcccctacgtgcacaacccagcccagattgacacagacaacaatggagaaggagatgcctgcagcgtggacattgatggagatgatgtgttcaatgaaagagacaactgcccctacgtgtacaacacagaccagagggacacagatggagatggagtgggggaccactgtgacaactgccccctggtgcacaacccagaccagacagatgtggacaatgacctggtgggggaccagtgtgacaacaatgaagatattgatgatgatggccaccagaacaaccaggacaactgcccctacatcagcaatgccaaccaggccgaccatgacagagatggccagggagatgcctgtgaccctgatgatgacaatgatggagtgcctgatgaccgggacaactgccgcctggtgttcaacccagaccaggaggacctggatggagatggccgcggggacatctgcaaggatgactttgacaatgacaacatcccagacattgatgatgtgtgcccagagaacaatgccatcagcgagacagacttcaggaacttccagatggtgcccctggaccccaagggcaccacccagattgaccccaactgggtgatccgccaccagggcaaggagctggtgcagacagccaacagcgaccccggcattgctgtgggctttgatgaatttggatctgtggacttcagcggcaccttctacgtgaacacagacagagatgatgattatgccggctttgtgtttggctaccagagcagcagccgcttctacgtggtgatgtggaagcaggtgacccagacctactgggaggaccagcccacccgggcctacggctacagcggcgtgtccctgaaggtggtgaacagcaccaccggcaccggggagcacctgagaaatgccctgtggcacactggaaacaccccaggccaggtgaggaccctgtggcatgaccccaggaacatcggctggaaggactacacagcctaccgctggcacctgacccaccggcccaagacaggctacatccgggtgctggtgcatgagggcaagcaggtgatggctgacagcggccccatctatgaccagacctacgccggcggccgcctgggcctgtttgtgttcagccaggagatggtgtacttcagtgacctgaagtatgagtgccgggacatctag

SEQ ID NO: 22150 - DNA, 1293 bp, synthetic construct
  misc_feature 1..1293: note = Description of Artificial Sequence: Synthetic coding sequence
  source 1..1293: mol_type = other DNA
gatgatgacaatgatggagtgacagatgagaaggacaactgccagctgctcttcaacccccggcaggccgactatgacaaggatgaggtgggggacagatgtgacaactgcccctacgtgcacaacccagcccagattgacacagacaacaatggagaaggagatgcctgcagcgtggacattgatggagatgatgtgttcaatgaaagagacaactgcccctacgtgtacaacacagaccagagggacacagatggagatggagtgggggaccactgtgacaactgccccctggtgcacaacccagaccagacagatgtggacaatgacctggtgggggaccagtgtgacaacaatgaagatattgatgatgatggccaccagaacaaccaggacaactgcccctacatcagcaatgccaaccaggccgaccatgacagagatggccagggagatgcctgtgaccctgatgatgacaatgatggagtgcctgatgaccgggacaactgccgcctggtgttcaacccagaccaggaggacctggatggagatggccgcggggacatctgcaaggatgactttgacaatgacaacatcccagacattgatgatgtgtgcccagagaacaatgccatcagcgagacagacttcaggaacttccagatggtgcccctggaccccaagggcaccacccagattgaccccaactgggtgatccgccaccagggcaaggagctggtgcagacagccaacagcgaccccggcattgctgtgggctttgatgaatttggatctgtggacttcagcggcaccttctacgtgaacacagacagagatgatgattatgccggctttgtgtttggctaccagagcagcagccgcttctacgtggtgatgtggaagcaggtgacccagacctactgggaggaccagcccacccgggcctacggctacagcggcgtgtccctgaaggtggtgaacagcaccaccggcaccggggagcacctgagaaatgccctgtggcacactggaaacaccccaggccaggtgaggaccctgtggcatgaccccaggaacatcggctggaaggactacacagcctaccgctggcacctgacccaccggcccaagacaggctacatccgggtgctggtgcatgagggcaagcaggtgatggctgacagcggccccatctatgaccagacctacgccggcggccgcctgggcctgtttgtgttcagccaggagatggtgtacttcagtgacctgaagtatgagtgcagggtcatctag

SEQ ID NO: 22151 - DNA, 252 bp, synthetic construct
  misc_feature 1..252: note = Description of Artificial Sequence: Synthetic coding sequence
  source 1..252: mol_type = other DNA
atggtgtggaggctggtgctgctggccctgtgggtgtggcccagcacccaggccggccaccaggacaaggacaccacctttgacctcttcagcatcagcaacatcaacaggaagaccatcggggccaagcagttccggggccctgaccccggggtgcctgcctacagatttgtgcgctttgactacatcccccctgtgaatgctgatgacctgagcaagatcaccaagatcatgaggcagaaggagggctag

SEQ ID NO: 22152 - DNA, 1449 bp, synthetic construct
  misc_feature 1..1449: note = Description of Artificial Sequence: Synthetic coding sequence
  source 1..1449: mol_type = other DNA
atggccgccctgatgaccccaggcactggagcccccccagcccctggggacttctctggagagggcagccagggcctgcctgaccccagccctgagcccaagcagctgcctgagctgatccgcatgaagagagatggcggccgcctgtctgaggccgacatccggggctttgtggccgctgtggtgaatggaagtgcccagggcgcccagattggagccatgctgatggccatccggctgcggggcatggacctggaggagacctctgtgctgacccaggccctggcccagagcggccagcagctggagtggccagaggcctggaggcagcagctggtggacaagcacagcactggaggagtgggggacaaggtgtccctggtgctggccccagccctggccgcctgtggctgcaaggtgcccatgatcagcggccggggcctgggccacactggaggcaccctggacaagctggagagcatccctggcttcaacgtcatccagagccctgagcagatgcaggtgctgctggaccaggccggctgctgcatcgtgggccagagcgagcagctggtgcctgcagatggcatcctgtatgctgccagagatgtgacagccaccgtggacagcctgcccctcatcacagccagcatcctgagcaagaagctggtggagggcctgagcgccctggtggtggatgtgaagtttggaggagctgctgtgttccccaaccaggagcaggcccgggagctggccaagaccctggtgggcgtgggcgccagcctgggcctgcgggtggccgccgccctgacagccatggacaagcccctgggccgctgtgtgggccacgccctggaggtggaggaggccctgctgtgcatggatggagctggccccccagacctgcgggacctggtgaccaccctgggcggggccctgctgtggctgagcggccacgccggcacccaggcccagggcgccgcccgggtggccgccgccctggatgatggcagcgccctgggccgctttgagaggatgctggccgcccagggcgtggaccccggcctggcccgggccctgtgcagcggcagccctgctgagcggcggcagctgctgccccgggcccgggagcaggaggagctgctggccccagcagatggcaccgtggagctggtgcgggccctgcccctggccctggtgctgcacgagctgggcgccggccgcagcagagctggggagcccctgcggctgggcgtgggcgctgagctgctggtggatgtgggccagaggctgcggcggggcaccccctggctgcgggtgcacagagatggccctgccctgagcggcccccagagccgggccctgcaggaggccctggtgctgagtgaccgggccccctttgctgcccccagcccctttgctgagctggtgctgcccccccagcagtag

SEQ ID NO: 22153 - DNA, 1449 bp, synthetic construct; identical to SEQ ID NO: 22152
  misc_feature 1..1449: note = Description of Artificial Sequence: Synthetic coding sequence
  source 1..1449: mol_type = other DNA

SEQ ID NO: 22154 - DNA, 1449 bp, synthetic construct; identical to SEQ ID NO: 22152
  misc_feature 1..1449: note = Description of Artificial Sequence: Synthetic coding sequence
  source 1..1449: mol_type = other DNA

SEQ ID NO: 22155 - DNA, 1233 bp, synthetic construct
  misc_feature 1..1233: note = Description of Artificial Sequence: Synthetic coding sequence
  source 1..1233: mol_type = other DNA
atggaggccgagaatgccggcagctacagcctgcagcaggcccaggccttctacaccttccccttccagcagctgatggccgaggcccccaacatggctgtggtgaatgagcagcagatgcctgaggaggtgcctgccccagccccagcccaggagcctgtgcaggaggcccccaagggcaggaagaggaagcccaggaccacagagcccaagcagcctgtggagcccaagaagcctgtggagagcaagaagagcggcaagagcgccaagagcaaggagaagcaggagaagatcacagacaccttcaaggtgaagaggaaggtggaccgcttcaacggggtgtctgaggccgagctgctgaccaagaccctgcctgacatcctgaccttcaacctggacatcgtcatcatcggcatcaaccctggcctgatggccgcctacaagggccaccactacccaggccctggcaaccacttctggaagtgcctcttcatgagcggcctgtctgaggtgcagctgaaccacatggatgaccacaccctgcccgggaagtatggaattggcttcaccaacatggtggagaggaccaccccaggcagcaaggacctgagcagcaaggagttccgggagggcggccgcatcctggtgcagaagctgcagaagtaccagcccagaattgctgtgttcaacgggaagtgcatctatgagatcttcagcaaggaggtgtttggagtgaaggtgaagaacctggagtttggcctgcagccccacaagatcccagacacagagaccctgtgctacgtgatgcccagcagcagcgcccgctgtgcccagttcccccgggcccaggacaaggtgcactactacatcaagctgaaggacctgcgggaccagctgaagggcatcgagaggaacatggatgtgcaggaggtgcagtacacctttgacctgcagctggcccaggaggatgccaagaagatggctgtgaaggaggagaagtatgaccccggctatgaggccgcctacggcggggcctacggggagaacccctgcagcagcgagccctgtggcttcagcagcaatggcctcatcgagagcgtggagctgcggggggagagcgccttcagcggcatccccaacggccagtggatgacccagagcttcacagaccagatccccagcttcagcaaccactgcggcacccaggagcaggaggaggagagccacgcctag

SEQ ID NO: 22156 - DNA, 621 bp, synthetic construct
  misc_feature 1..621: note = Description of Artificial Sequence: Synthetic coding sequence
  source 1..621: mol_type = other DNA
atgatcaccctgtaccagggctccatggtgctggacctgcccacctggtggaagggccccaggcctgctgccaagatcagccctggcatctatgagatcttcagcaaggaggtgtttggagtgaaggtgaagaacctggagtttggcctgcagccccacaagatcccagacacagagaccctgtgctacgtgatgcccagcagcagcgcccgctgtgcccagttcccccgggcccaggacaaggtgcactactacatcaagctgaaggacctgcgggaccagctgaagggcatcgagaggaacatggatgtgcaggaggtgcagtacacctttgacctgcagctggcccaggaggatgccaagaagatggctgtgaaggaggagaagtatgaccccggctatgaggccgcctacggcggggcctacggggagaacccctgcagcagcgagccctgtggcttcagcagcaatggcctcatcgagagcgtggagctgcggggggagagcgccttcagcggcatccccaacggccagtggatgacccagagcttcacagaccagatccccagcttcagcaaccactgcggcacccaggagcaggaggaggagagccacgcctag

SEQ ID NO: 22157 - DNA, 3294 bp, synthetic construct
  misc_feature 1..3294: note = Description of Artificial Sequence: Synthetic coding sequence
  source 1..3294: mol_type = other DNA
atgagcagctgccgcagcctgtgctgcggggacatcagccagagcgctgtgctcttcctgtgccagggcaccctggccatgctggactggcagaatggctccatgggccgcagcggggaggccctgctgctggacacagcccacgtgctcttcaccctgagcagccagatcaaggagcccaccctggagatgttcctgagccgcatcctggcctcctggaccaacagcgccatccaggtgctggagagcagcagccccagcctgacagacagcctgaatggaaacagcagcatcgtgggccgcctgctggagtatgtgtacacccactgggagcaccccctggatgccctgcggcaccagaccaagatcatgttcaagaacctgctgcagatgcaccggctgactgtggagggcgctgactttgtgcctgaccccttctttgtggagctgacagagagcctgctgcggctggagtggcacatcaagggcaagtacacctgcctgggctgcctggtggagtgcattggagtggagcacatcctggccatcgacaagaccatccccagccagatcctggaggtgatgggagaccagagcctggtgccctatgccagtgacctgctggagaccatgttcaggaaccacaagagccacctgaagagccagacagctgagagctcctggattgaccagtggcatgagacctgggtgagccccctgctcttcatcctgtgtgagggcaacctggaccagaagagctatgtgattgactactacctgcccaagctgctgagctacagccctgagagcctgcagtacatggtgaagatcctgcagaccagcattgatgccaagacaggccaggagcagagcttccccagcctgggcagctgcaacagcagaggagccctgggcgccctgatggcctgcctgagaattgcccgggcccacggccacctgcagagcgccacagacacctgggagaacctggtgtctgatgcccgcatcaagcagggcctcatccaccagcactgccaggtgagaattgacaccctgggcctgctgtgtgagagcaacagaagcacagagatcgtgtccatggaggagatgcagtggatccagttcttcatcacctacaacctgaacagccagagccctggggtgcggcagcagatctgcagcctgctgaagaagctgttctgccgcatccaggagagcagccaggtgctgtacaagctggagcagagcaagagcaagcgggagccagaaaatgagctgaccaagcagcaccccagcgtgtccctgcagcagtacaagaacttcatgagcagcatctgcaacagcctgtttgaggccctcttccctggcagcagctacagcacccgcttcagcgccctgaccatcctgggcagcattgctgaggtgttccacgtgcctgagggccgcatctacacagtgtaccagctgagccatgacattgatgtgggccgcttccagaccctgatggagtgcttcaccagcacctttgaagatgtgaagatcctggcctttgacctgctgatgaagctgagcaagacagctgtgcacttccaggacagcggcaagctgcagggcctcttccaggccgccctggagctgagcaccagcaccaagccctatgactgtgtgacagccagctacctgctgaacttcctgatctggcaggatgccctgcccagcagcctgagcgcctacctgacccagcaggtggcctgtgacaatggagacaggcctgctgctgtggtggagaggaacaccctgatggtgatcaagtgcctgatggagaacctggaggaggaggtgtcccaggccgagaacagcctgctgcaggccgccgccgccttccccatgtatggccgggtgcactgcatcaccggggccctgcagaagctgagcctgaacagcctgcagctggtgtctgagtggaggcctgtggtggagaagctgctgctgatgagctaccgcctgagcacagtggtgtcccctgtgatccagagcagcagccctgagggcctcatccccatggacacagacagcgagagcgccagccggctgcagatgatcctgaatgagatccagccccgggacaccaatgactacttcaaccaggccaagatcctgaaggagcatgacagctttgacatgaaggacctgaatgcctctgtggtgaacatcgacaccagcacagagatcaagggcaaggaggtgaagacctgtgatgtgacagcccagatggtgctggtgtgctgctggaggtccatgaaggaggtggccctgctgctgggcatgctgtgccagctgctgcccatgcagcctgtgcctgagagcagtgatggcctgctgactgtggagcaggtgaaggagatcggggactacttcaagcagcacctgctgcagagccgccacagaggagcctttgagctggcctacacaggctttgtgaagctgacagaggtgctgaaccgctgccccaacgtgtccctgcagaagctgcctgagcagtggctgtggagcgtgctggaggagatcaagtgcagcgaccccagcagcaagctgtgtgccaccaggagatctgctggcatccccttctacatccaggccctgctggccagcgagcccaagaagggccgcatggacctgctgaagatcaccatgaaggagctgatcagcctggccggccccacagatgacatccagagcacagtgccccaggtgcacgccctgaacatcctgcgggccctcttccgggacacccggctgggggagaacatcatcccctacgtggctgatggagccaaggccgccatcctgggcttcaccagccctgtgtgggccgtgaggaacagcagcaccctgctcttcagcgccctgatcacccgcatctttggagtgaagagggccaaggatgagcacagcaagaccaacaggatgacaggccgggagttcttcagccgcttccctgagctgtaccccttcctgctgaagcagctggagaccgtggccaacacagtggacagcgacatgggagagcccaacagacaccccagcatgttcctgctgctgctggtgctggagcggctgtatgccagccccatggatggcaccagcagcgccctgtccatgggcccctttgtgcccttcatcatgagggtgctgctgtgctgccccggctggagcgctgtggcccggagccagctgacagccaccagcacctcctgggtgcaggccatcctgctgccccagcccccagagtag

SEQ ID NO: 22158 - DNA, 5643 bp, synthetic construct
  misc_feature 1..5643: note = Description of Artificial Sequence: Synthetic coding sequence
  source 1..5643: mol_type = other DNA
atgggcgtgaagaagaagaaggagatgcaggtggccgccctgaccatctgccaccaggacctggagaccctgaagagctttgctgatgtggagggcaagaacctggccagcctgctgctgcactgtgtgcagctgacagatggagtgtcccagatccactacatcaagcagatcgtgcccctgctggagaaggctgacaagaatggcatgtgtgaccccaccatccagagctgcctggacatcctggccggcatctacctgagcctgagcctgaagaaccccctgaagaaggtgctggccagcagcctgaacagcctgcctgacttcttcctgcctgaggccatgcaccgcttcaccagccggctgcaggaggagctgaacaccacagacctgtacagctacaggaaggtgacagacaacatcagcagctgcatggagaacttcaacctgggccgggcctctgtgaacaacctgctgaagaatgtgctgcacttcctgcagaagagcctgattgagatcctggaggagaacagaaaatgtgccggcaaccacatcatccagacccagctgatgaatgacctgctggtgggcatccgggtgtccatgatgctggtgcagaaggtgcaggacttccagggcaacctgtggaagaccagtgacagccccatctggcagaacatgtgtggcctgctgagcatcttcaccaaggtgctgagtgatgatgacctgctgcagacagtgcagagcaccagcggcctggccatcatcctcttcatcaagaccatgttccaccccagcgagaagatcccccacctgatcagctctgtgctgctgcggtctgtggactgcacctctgtgcctgagtggttcatgagcagctgccgcagcctgtgctgcggggacatcagccagagcgctgtgctcttcctgtgccagggcaccctggccatgctggactggcagaatggctccatgggccgcagcggggaggccctgctgctggacacagcccacgtgctcttcaccctgagcagccagatcaaggagcccaccctggagatgttcctgagccgcatcctggcctcctggaccaacagcgccatccaggtgctggagagcagcagccccagcctgacagacagcctgaatggaaacagcagcatcgtgggccgcctgctggagtatgtgtacacccactgggagcaccccctggatgccctgcggcaccagaccaagatcatgttcaagaacctgctgcagatgcaccggctgactgtggagggcgctgactttgtgcctgaccccttctttgtggagctgacagagagcctgctgcggctggagtggcacatcaagggcaagtacacctgcctgggctgcctggtggagtgcattggagtggagcacatcctggccatcgacaagaccatccccagccagatcctggaggtgatgggagaccagagcctggtgccctatgccagtgacctgctggagaccatgttcaggaaccacaagagccacctgaagagccagacagctgagagctcctggattgaccagtggcatgagacctgggtgagccccctgctcttcatcctgtgtgagggcaacctggaccagaagagctatgtgattgactactacctgcccaagctgctgagctacagccctgagagcctgcagtacatggtgaagatcctgcagaccagcattgatgccaagacaggccaggagcagagcttccccagcctgggcagctgcaacagcagaggagccctgggcgccctgatggcctgcctgagaattgcccgggcccacggccacctgcagagcgccacagacacctgggagaacctggtgtctgatgcccgcatcaagcagggcctcatccaccagcactgccaggtgagaattgacaccctgggcctgctgtgtgagagcaacagaagcacagagatcgtgtccatggaggagatgcagtggatccagttcttcatcacctacaacctgaacagccagagccctggggtgcggcagcagatctgcagcctgctgaagaagaagctgttctgccgcatccaggagagcagccaggtgctgtacaagctggagcagagcaagagcaagcgggagccagaaaatgagctgaccaagcagcaccccagcgtgtccctgcagcagtacaagaacttcatgagcagcatctgcaacagcctgtttgaggccctcttccctggcagcagctacagcacccgcttcagcgccctgaccatcctgggcagcattgctgaggtgttccacgtgcctgagggccgcatctacacagtgtaccagctgagccatgacattgatgtgggccgcttccagaccctgatggagtgcttcaccagcacctttgaagatgtgaagatcctggcctttgacctgctgatgaagctgagcaagacagctgtgcacttccaggacagcggcaagctgcagggcctcttccaggccgccctggagctgagcaccagcaccaagccctatgactgtgtgacagccagctacctgctgaacttcctgatctggcaggatgccctgcccagcagcctgagcgcctacctgacccagcaggtggcctgtgacaacggggacaggcctgctgctgtggtggagaggaacaccctgatggtgatcaagtgcctgatggagaacctggaggaggaggtgtcccaggccgagaacagcctgctgcaggccgctgctgccttccccatgtatggccgggtgcactgcatcactggagccctgcagaagctgagcctgaacagcctgcagctggtgtctgagtggaggcctgtggtggagaagctgctgctgatgagctaccgcctgagcacagtggtgtcccctgtgatccagagcagcagccctgagggcctcatccccatggacacagattctgagagcgccagccggctgcagatgatcctgaatgagatccagccccgggacaccaatgactacttcaaccaggccaagatcctgaaggagcatgacagctttgacatgaaggacctgaatgcctctgtggtgaacatcgacaccagcacagagatcaagggcaaggaggtgaagacctgtgatgtgacagcccagatggtgctggtgtgctgctggaggtccatgaaggaggtggccctgctgctgggcatgctgtgccagctgctgcccatgcagcctgtgcctgagagcagtgatggcctgctgactgtggagcaggtgaaggagattggagactacttcaagcagcacctgctgcagagccgccacagaggagcctttgagctggcctacacaggctttgtgaagctgacagaggtgctgaaccgctgccccaacgtgtccctgcagaagctgcctgagcagtggctgtggagcgtgctggaggagatcaagtgcagcgaccccagcagcaagctgtgtgccacccggcgctctgctggcatccccttctacatccaggccctgctggccagcgagcccaagaagggccgcatggacctgctgaagatcaccatgaaggagctgatcagcctggccggccccacagatgacatccagagcacagtgccccaggtgcacgccctgaacatcctgcgggccctcttccgggacacccggctgggggagaacatcatcccctacgtggctgatggagccaaggccgccatcctgggcttcaccagccctgtgtgggccgtgaggaacagcagcaccctgctcttcagcgccctgatcacccgcatcttcggcgtgaagagggccaaggatgagcacagcaagaccaacagatgtggccacagccctgtgtaccacagccgggagatggccgcccgggccctggtgccctttgtgatgattgaccacatccccaacaccatccgcaccctgctgagcaccctgcccagctgcacagaccagtgcttccggcagaaccacatccacggcaccctgctgcaggtgttccacctgctgcaggcctacagcgacagcaagcacggcaccaacagcgacttccagcacgagctgacagacatcaccgtgtgcaccaaggccaagctgtggctggccaagaggcagaacccctgcctggtgaccagggctgtgtacatcgacatcctcttcctgctgacctgctgcctgaacagaagtgccaaggacaaccagcctgtgctggagagcctgggcttctgggaggaggtgcggggcatcatcagcggcagcgagctgatcaccggcttcccctgggccttcaaggtgcccggcctgccccagtacctgcagagcctgacccggctggccatcgctgctgtgtgggccgccgccgccaagtctggagagcgggagaccaacgtgcccatctccttcagccagctgctggagagcgccttccctgaggtgcgcagcctgaccctggaggccctgctggagaagttcctggccgccgccagcggcctgggggagaagggcgtgccccccctgctgtgcaacatgggagagaagttcctgctgctggccatgaaggagaaccaccctgagtgcttctgcaagatcctgaagatcctgcactgcatggaccctggagagtggctgccccagacagagcactgtgtgcacctgacccccaaggagttcctgatctggaccatggacatcgccagcaatgaaagaagtgagatccagagcgtggccctgcggctggccagcaaggtgatcagccaccacatgcagacctgtgtggagaaccgggagctgattgctgctgagctgaagcagtgggtgcagctggtgatcctgagctgtgaggaccacctgcccacagagagccggctggccgtggtggaggtgctgaccagcaccacccccctcttcctgaccaacccccaccccatcctggagctgcaggacaccctggccctgtggaagtgtgtgctgaccctgctgcagagcgaggagcaggccgtgagagatgctgccacagagaccgtgaccacagccatgagccaggagaacacctgccagagcacagaatttgccttctgccaggtggatgccagcatcgccctggccctggccctggccgtgctgtgtgacctgctgcagcagtgggaccagctggcccctggcctgcccatcctgctgggctggctgctgggggagagtgatgacctggtggcctgtgtggagagcatgcaccaggtggaggaggactacctgtttgagaaggccgaggtgaacttctgggccgagaccctcatctttgtgaagtacctgtgcaagcacctgttctgcctgctgagcaagagcggctggaggcctcccagccctgagatgctgtgccacctgcagaggatggtgtctgagcagtgccacctgctgagccagttcttccgggagctgcccccagctgctgagtttgtgaagacagtggagttcacccggctgcgcatccaggaggagaggaccctggcctgcctgcggctgctggccttcctggagggcaaggagggggaggacaccctggtgctgtctgtgtgggacagctatgcagagagccggcagctgaccctgcccaggacagaggccgcctgctag

SEQ ID NO: 22159 - DNA, 5862 bp, synthetic construct
  misc_feature 1..5862: note = Description of Artificial Sequence: Synthetic coding sequence
  source 1..5862: mol_type = other DNA
atgggcgtgaagaagaagaaggagatgcaggtggccgccctgaccatctgccaccaggacctggagaccctgaagagctttgctgatgtggagggcaagaacctggccagcctgctgctgcactgtgtgcagctgacagatggagtgtcccagatccactacatcaagcagatcgtgcccctgctggagaaggctgacaagaatggcatgtgtgaccccaccatccagagctgcctggacatcctggccggcatctacctgagcctgagcctgaagaaccccctgaagaaggtgctggccagcagcctgaacagcctgcctgacttcttcctgcctgaggccatgcaccgcttcaccagccggctgcaggaggagctgaacaccacagacctgtacagctacaggaaggtgacagacaacatcagcagctgcatggagaacttcaacctgggccgggcctctgtgaacaacctgctgaagaatgtgctgcacttcctgcagaagagcctgattgagatcctggaggagaacagaaaatgtgccggcaaccacatcatccagacccagctgatgaatgacctgctggtgggcatccgggtgtccatgatgctggtgcagaaggtgcaggacttccagggcaacctgtggaagaccagtgacagccccatctggcagaacatgtgtggcctgctgagcatcttcaccaaggtgctgagtgatgatgacctgctgcagacagtgcagagcaccagcggcctggccatcatcctcttcatcaagaccatgttccaccccagcgagaagatcccccacctgatcagctctgtgctgctgcggtctgtggactgcacctctgtgcctgagtggttcatgagcagctgccgcagcctgtgctgcggggacatcagccagagcgctgtgctcttcctgtgccagggcaccctggccatgctggactggcagaatggctccatgggccgcagcggggaggccctgctgctggacacagcccacgtgctcttcaccctgagcagccagatcaaggagcccaccctggagatgttcctgagccgcatcctggcctcctggaccaacagcgccatccaggtgctggagagcagcagccccagcctgacagacagcctgaatggaaacagcagcatcgtgggccgcctgctggagtatgtgtacacccactgggagcaccccctggatgccctgcggcaccagaccaagatcatgttcaagaacctgctgcagatgcaccggctgactgtggagggcgctgactttgtgcctgaccccttctttgtggagctgacagagagcctgctgcggctggagtggcacatcaagggcaagtacacctgcctgggctgcctggtggagtgcattggagtggagcacatcctggccatcgacaagaccatccccagccagatcctggaggtgatgggagaccagagcctggtgccctatgccagtgacctgctggagaccatgttcaggaaccacaagagccacctgaagagccagacagctgagagctcctggattgaccagtggcatgagacctgggtgagccccctgctcttcatcctgtgtgagggcaacctggaccagaagagctatgtgattgactactacctgcccaagctgctgagctacagccctgagagcctgcagtacatggtgaagatcctgcagaccagcattgatgccaagacaggccaggagcagagcttccccagcctgggcagctgcaacagcagaggagccctgggcgccctgatggcctgcctgagaattgcccgggcccacggccacctgcagagcgccacagacacctgggagaacctggtgtctgatgcccgcatcaagcagggcctcatccaccagcactgccaggtgagaattgacaccctgggcctgctgtgtgagagcaacagaagcacagagatcgtgtccatggaggagatgcagtggatccagttcttcatcacctacaacctgaacagccagagccctggggtgcggcagcagatctgcagcctgctgaagaagctgttctgccgcatccaggagagcagccaggtgctgtacaagctggagcagagcaagagcaagcgggagccagaaaatgagctgaccaagcagcaccccagcgtgtccctgcagcagtacaagaacttcatgagcagcatctgcaacagcctgtttgaggccctcttccctggcagcagctacagcacccgcttcagcgccctgaccatcctgggcagcattgctgaggtgttccacgtgcctgagggccgcatctacacagtgtaccagctgagccatgacattgatgtgggccgcttccagaccctgatggagtgcttcaccagcacctttgaagatgtgaagatcctggcctttgacctgctgatgaagctgagcaagacagctgtgcacttccaggacagcggcaagctgcagggcctcttccaggccgccctggagctgagcaccagcaccaagccctatgactgtgtgacagccagctacctgctgaacttcctgatctggcaggatgccctgcccagcagcctgagcgcctacctgacccagcaggtggcctgtgacaatggagacaggcctgctgctgtggtggagaggaacaccctgatggtgatcaagtgcctgatggagaacctggaggaggaggtgtcccaggccgagaacagcctgctgcaggccgccgccgccttccccatgtatggccgggtgcactgcatcaccggggccctgcagaagctgagcctgaacagcctgcagctggtgtctgagtggaggcctgtggtggagaagctgctgctgatgagctaccgcctgagcacagtggtgtcccctgtgatccagagcagcagccctgagggcctcatccccatggacacagacagcgagagcgccagccggctgcagatgatcctgaatgagatccagccccgggacaccaatgactacttcaaccaggccaagatcctgaaggagcatgacagctttgacatgaaggacctgaatgcctctgtggtgaacatcgacaccagcacagagatcaagggcaaggaggtgaagacctgtgatgtgacagcccagatggtgctggtgtgctgctggaggtccatgaaggaggtggccctgctgctgggcatgctgtgccagctgctgcccatgcagcctgtgcctgagagcagtgatggcctgctgactgtggagcaggtgaaggagatcggggactacttcaagcagcacctgctgcagagccgccacagaggagcctttgagctggcctacacaggctttgtgaagctgacagaggtgctgaaccgctgccccaacgtgtccctgcagaagctgcctgagcagtggctgtggagcgtgctggaggagatcaagtgcagcgaccccagcagcaagctgtgtgccaccaggagatctgctggcatccccttctacatccaggccctgctggccagcgagcccaagaagggccgcatggacctgctgaagatcaccatgaaggagctgatcagcctggccggccccacagatgacatccagagcacagtgccccaggtgcacgccctgaacatcctgcgggccctcttccgggacacccggctgggggagaacatcatcccctacgtggctgatggagccaaggccgccatcctgggcttcaccagccctgtgtgggccgtgaggaacagcagcaccctgctcttcagcgccctgatcacccgcatctttggagtgaagagggccaaggatgagcacagcaagaccaacaggatgacaggccgggagttcttcagccgcttccctgagctgtaccccttcctgctgaagcagctggagaccgtggccaacacagtggacagcgacatgggagagcccaacagacaccccagcatgttcctgctgctgctggtgctggagcggctgtatgccagccccatggatggcaccagcagcgccctgtccatgggcccctttgtgcccttcatcatgagatgtggccacagccctgtgtaccacagccgggagatggccgcccgggccctggtgccctttgtgatgattgaccacatccccaacaccatccgcaccctgctgagcaccctgcccagctgcacagaccagtgcttccggcagaaccacatccacggcaccctgctgcaggtgttccacctgctgcaggcctacagcgacagcaagcacggcaccaacagcgacttccagcacgagctgacagacatcaccgtgtgcaccaaggccaagctgtggctggccaagaggcagaacccctgcctggtgaccagggctgtgtacatcgacatcctcttcctgctgacctgctgcctgaacagaagtgccaaggacaaccagcctgtgctggagagcctgggcttctgggaggaggtgcggggcatcatcagcggcagcgagctgatcaccggcttcccctgggccttcaaggtgcccggcctgccccagtacctgcagagcctgacccggctggccatcgctgctgtgtgggccgctgctgccaagagcggggagcgggagaccaacgtgcccatctccttcagccagctgctggagagcgccttccctgaggtgcgcagcctgaccctggaggccctgctggagaagttcctggccgccgccagcggcctgggggagaagggcgtgccccccctgctgtgcaacatgggagagaagttcctgctgctggccatgaaggagaaccaccctgagtgcttctgcaagatcctgaagatcctgcactgcatggaccccggggagtggctgccccagacagagcactgtgtgcacctgacccccaaggagttcctgatctggaccatggacatcgccagcaatgaaagaagtgagatccagagcgtggccctgcggctggccagcaaggtgatcagccaccacatgcagacctgtgtggagaaccgggagctgattgctgctgagctgaagcagtgggtgcagctggtgatcctgagctgtgaggaccacctgcccacagagagccggctggccgtggtggaggtgctgaccagcaccacccccctcttcctgaccaacccccaccccatcctggagctgcaggacaccctggccctgtggaagtgtgtgctgaccctgctgcagagcgaggagcaggccgtgagagatgctgccacagaaacagtgaccacagccatgagccaggagaacacctgccagagcacagaatttgccttctgccaggtggatgccagcatcgccctggccctggccctggccgtgctgtgtgacctgctgcagcagtgggaccagctggcccctggcctgcccatcctgctgggctggctgctgggggagagtgatgacctggtggcctgtgtggagagcatgcaccaggtggaggaggactacctgtttgagaaggccgaggtgaacttctgggccgagaccctcatctttgtgaagtacctgtgcaagcacctgttctgcctgctgagcaagagcggctggaggcctcccagccctgagatgctgtgccacctgcagaggatggtgtctgagcagtgccacctgctgagccagttcttccgggagctgcccccagctgctgagtttgtgaagacagtggagttcacccggctgcgcatccaggaggagaggaccctggcctgcctgcggctgctggccttcctggagggcaaggagggggaggacaccctggtgctgtctgtgtgggacagctatgcagagagccggcagctgaccctgcccaggacagaagctgcctgctag

SEQ ID NO: 22160 - DNA, 5862 bp, synthetic construct; identical to SEQ ID NO: 22159
  misc_feature 1..5862: note = Description of Artificial Sequence: Synthetic coding sequence
  source 1..5862: mol_type = other DNA

SEQ ID NO: 22161 - DNA, 4905 bp, synthetic construct
  misc_feature 1..4905: note = Description of Artificial Sequence: Synthetic coding sequence
  source 1..4905: mol_type = other DNA
atgagcagctgccgcagcctgtgctgcggggacatcagccagagcgctgtgctcttcctgtgccagggcaccctggccatgctggactggcagaatggctccatgggccgcagcggggaggccctgctgctggacacagcccacgtgctcttcaccctgagcagccagatcaaggagcccaccctggagatgttcctgagccgcatcctggcctcctggaccaacagcgccatccaggtgctggagagcagcagccccagcctgacagacagcctgaatggaaacagcagcatcgtgggccgcctgctggagtatgtgtacacccactgggagcaccccctggatgccctgcggcaccagaccaagatcatgttcaagaacctgctgcagatgcaccggctgactgtggagggcgctgactttgtgcctgaccccttctttgtggagctgacagagagcctgctgcggctggagtggcacatcaagggcaagtacacctgcctgggctgcctggtggagtgcattggagtggagcacatcctggccatcgacaagaccatccccagccagatcctggaggtgatgggagaccagagcctggtgccctatgccagtgacctgctggagaccatgttcaggaaccacaagagccacctgaagagccagacagctgagagctcctggattgaccagtggcatgagacctgggtgagccccctgctcttcatcctgtgtgagggcaacctggaccagaagagctatgtgattgactactacctgcccaagctgctgagctacagccctgagagcctgcagtacatggtgaagatcctgcagaccagcattgatgccaagacaggccaggagcagagcttccccagcctgggcagctgcaacagcagaggagccctgggcgccctgatggcctgcctgagaattgcccgggcccacggccacctgcagagcgccacagacacctgggagaacctggtgtctgatgcccgcatcaagcagggcctcatccaccagcactgccaggtgagaattgacaccctgggcctgctgtgtgagagcaacagaagcacagagatcgtgtccatggaggagatgcagtggatccagttcttcatcacctacaacctgaacagccagagccctggggtgcggcagcagatctgcagcctgctgaagaagctgttctgccgcatccaggagagcagccaggtgctgtacaagctggagcagagcaagagcaagcgggagccagaaaatgagctgaccaagcagcaccccagcgtgtccctgcagcagtacaagaacttcatgagcagcatctgcaacagcctgtttgaggccctcttccctggcagcagctacagcacccgcttcagcgccctgaccatcctgggcagcattgctgaggtgttccacgtgcctgagggccgcatctacacagtgtaccagctgagccatgacattgatgtgggccgcttccagaccctgatggagtgcttcaccagcacctttgaagatgtgaagatcctggcctttgacctgctgatgaagctgagcaagacagctgtgcacttccaggacagcggcaagctgcagggcctcttccaggccgccctggagctgagcaccagcaccaagccctatgactgtgtgacagccagctacctgctgaacttcctgatctggcaggatgccctgcccagcagcctgagcgcctacctgacccagcaggtggcctgtgacaatggagacaggcctgctgctgtggtggagaggaacaccctgatggtgatcaagtgcctgatggagaacctggaggaggaggtgtcccaggccgagaacagcctgctgcaggccgccgccgccttccccatgtatggccgggtgcactgcatcaccggggccctgcagaagctgagcctgaacagcctgcagctggtgtctgagtggaggcctgtggtggagaagctgctgctgatgagctaccgcctgagcacagtggtgtcccctgtgatccagagcagcagccctgagggcctcatccccatggacacagacagcgagagcgccagccggctgcagatgatcctgaatgagatccagccccgggacaccaatgactacttcaaccaggccaagatcctgaaggagcatgacagctttgacatgaaggacctgaatgcctctgtggtgaacatcgacaccagcacagagatcaagggcaaggaggtgaagacctgtgatgtgacagcccagatggtgctggtgtgctgctggaggtccatgaaggaggtggccctgctgctgggcatgctgtgccagctgctgcccatgcagcctgtgcctgagagcagtgatggcctgctgactgtggagcaggtgaaggagatcggggactacttcaagcagcacctgctgcagagccgccacagaggagcctttgagctggcctacacaggctttgtgaagctgacagaggtgctgaaccgctgccccaacgtgtccctgcagaagctgcctgagcagtggctgtggagcgtgctggaggagatcaagtgcagcgaccccagcagcaagctgtgtgccaccaggagatctgctggcatccccttctacatccaggccctgctggccagcgagcccaagaagggccgcatggacctgctgaagatcaccatgaaggagctgatcagcctggccggccccacagatgacatccagagcacagtgccccaggtgcacgccctgaacatcctgcgggccctcttccgggacacccggctgggggagaacatcatcccctacgtggctgatggagccaaggccgccatcctgggcttcaccagccctgtgtgggccagccagatgacaggccgggagttcttcagccgcttccctgagctgtaccccttcctgctgaagcagctggagaccgtggccaacacagtggacagcgacatgggagagcccaacagacaccccagcatgttcctgctgctgctggtgctggagcggctgtatgccagccccatggatggcaccagcagcgccctgtccatgggcccctttgtgcccttcatcatgagatgtggccacagccctgtgtaccacagccgggagatggccgcccgggccctggtgccctttgtgatgattgaccacatccccaacaccatccgcaccctgctgagcaccctgcccagctgcacagaccagtgcttccggcagaaccacatccacggcaccctgctgcaggtgttccacctgctgcaggcctacagcgacagcaagcacggcaccaacagcgacttccagcacgagctgacagacatcaccgtgtgcaccaaggccaagctgtggctggccaagaggcagaacccctgcctggtgaccagggctgtgtacatcgacatcctcttcctgctgacctgctgcctgaacagaagtgccaaggacaaccagcctgtgctggagagcctgggcttctgggaggaggtgcggggcatcatcagcggcagcgagctgatcaccggcttcccctgggccttcaaggtgcccggcctgccccagtacctgcagagcctgacccggctggccatcgctgctgtgtgggccgccgccgccaagtctggagagcgggagaccaacgtgcccatctccttcagccagctgctggagagcgccttccctgaggtgcgcagcctgaccctggaggccctgctggagaagttcctggccgccgccagcggcctgggggagaagggcgtgccccccctgctgtgcaacatgggagagaagttcctgctgctggccatgaaggagaaccaccctgagtgcttctgcaagatcctgaagatcctgcactgcatggaccctggagagtggctgccccagacagagcactgtgtgcacctgacccccaaggagttcctgatctggaccatggacatcgccagcaatgaaagaagtgagatccagagcgtggccctgcggctggccagcaaggtgatcagccaccacatgcagacctgtgtggagaaccgggagctgattgctgctgagctgaagcagtgggtgcagctggtgatcctgagctgtgaggaccacctgcccacagagagccggctggccgtggtggaggtgctgaccagcaccacccccctcttcctgaccaacccccaccccatcctggagctgcaggacaccctggccctgtggaagtgtgtgctgaccctgctgcagagcgaggagcaggccgtgagagatgctgccacagagaccgtgaccacagccatgagccaggagaacacctgccagagcacagaatttgccttctgccaggtggatgccagcatcgccctggccctggccctggccgtgctgtgtgacctgctgcagcagtgggaccagctggcccctggcctgcccatcctgctgggctggctgctgggggagagtgatgacctggtggcctgtgtggagagcatgcaccaggtggaggaggactacctgtttgagaaggccgaggtgaacttctgggccgagaccctcatctttgtgaagtacctgtgcaagcacctgttctgcctgctgagcaagagcggctggaggcctcccagccctgagatgctgtgccacctgcagaggatggtgtctgagcagtgccacctgctgagccagttcttccgggagctgcccccagctgctgagtttgtgaagacagtggagttcacccggctgcgcatccaggaggagaggaccctggcctgcctgcggctgctggccttcctggagggcaaggagggggaggacaccctggtgctgtctgtgtgggacagctatgcagagagccggcagctgaccctgcccaggacagaggccgcctgctag

SEQ ID NO: 22162 - DNA, 2685 bp, synthetic construct
  misc_feature 1..2685: note = Description of Artificial Sequence: Synthetic coding sequence
  source 1..2685: mol_type = other DNA
atgggcgtgaagaagaagaaggagatgcaggtggccgccctgaccatctgccaccaggacctggagaccctgaagagctttgctgatgtggagggcaagaacctggccagcctgctgctgcactgtgtgcagctgacagatggagtgtcccagatccactacatcaagcagatcgtgcccctgctggagaaggctgacaagaatggcatgtgtgaccccaccatccagagctgcctggacatcctggccggcatctacctgagcctgagcctgaagaaccccctgaagaaggtgctggccagcagcctgaacagcctgcctgacttcttcctgcctgaggccatgcaccgcttcaccagccggctgcaggaggagctgaacaccacagacctgtacagctacaggaaggtgacagacaacatcagcagctgcatggagaacttcaacctgggccgggcctctgtgaacaacctgctgaagaatgtgctgcacttcctgcagaagagcctgattgagatcctggaggagaacagaaaatgtgccggcaaccacatcatccagacccagctgatgaatgacctgctggtgggcatccgggtgtccatgatgctggtgcagaaggtgcaggacttccagggcaacctgtggaagaccagtgacagccccatctggcagaacatgtgtggcctgctgagcatcttcaccaaggtgctgagtgatgatgacctgctgcagacagtgcagagcaccagcggcctggccatcatcctcttcatcaagaccatgttccaccccagcgagaagatcccccacctgatcagctctgtgctgctgcggtctgtggactgcacctctgtgcctgagtggttcatgagcagctgccgcagcctgtgctgcggggacatcagccagagcgctgtgctcttcctgtgccagggcaccctggccatgctggactggcagaatggctccatgggccgcagcggggaggccctgctgctggacacagcccacgtgctcttcaccctgagcagccagatcaaggagcccaccctggagatgttcctgagccgcatcctggcctcctggaccaacagcgccatccaggtgctggagagcagcagccccagcctgacagacagcctgaatggaaacagcagcatcgtgggccgcctgctggagtatgtgtacacccactgggagcaccccctggatgccctgcggcaccagaccaagatcatgttcaagaacctgctgcagatgcaccggctgactgtggagggcgctgactttgtgcctgaccccttctttgtggagctgacagagagcctgctgcggctggagtggcacatcaagggcaagtacacctgcctgggctgcctggtggagtgcattggagtggagcacatcctggccatcgacaagaccatccccagccagatcctggaggtgatgggagaccagagcctggtgccctatgccagtgacctgctggagaccatgttcaggaaccacaagagccacctgaagagccagacagctgagagctcctggattgaccagtggcatgagacctgggtgagccccctgctcttcatcctgtgtgagggcaacctggaccagaagagctatgtgattgactactacctgcccaagctgctgagctacagccctgagagcctgcagtacatggtgaagatcctgcagaccagcattgatgccaagacaggccaggagcagagcttccccagcctgggcagctgcaacagcagaggagccctgggcgccctgatggcctgcctgagaattgcccgggcccacggccacctgcagagcgccacagacacctgggagaacctggtgtctgatgcccgcatcaagcagggcctcatccaccagcactgccaggtgagaattgacaccctgggcctgctgtgtgagagcaacagaagcacagagatcgtgtccatggaggagatgcagtggatccagttcttcatcacctacaacctgaacagccagagccctggggtgcggcagcagatctgcagcctgctgaagaagctgttctgccgcatccaggagagcagccaggtgctgtacaagctggagcagagcaagagcaagcgggagccagaaaatgagctgaccaagcagcaccccagcgtgtccctgcagcagtacaagaacttcatgagcagcatctgcaacagcctgtttgaggccctcttccctggcagcagctacagcacccgcttcagcgccctgaccatcctgggcagcattgctgaggtgttccacgtgcctgagggccgcatctacacagtgtaccagctgagccatgacattgatgtgggccgcttccagaccctgatggagtgcttcaccagcacctttgaagatgtgaagatcctggcctttgacctgctgatgaagctgagcaagacagctgtgcacttccaggacagcggcaagctgcagggcctcttccaggccgccctggagctgagcaccagcaccaagccctatgactgtgtgacagccagctacctgctgaacttcctgatctggcaggatgccctgcccagcagcctgagcgcctacctgacccagcaggtggcctgtgacaatggagacaggcctgctgctgtggtggagaggaacaccctgatgggcctgtactag

SEQ ID NO: 22163 - DNA, 2268 bp, synthetic construct
  misc_feature 1..2268: note = Description of Artificial Sequence: Synthetic coding sequence
  source 1..2268: mol_type = other DNA
atgagcggcaccaacctggatggaaatgatgaatttgatgagcagctgaggatgcaggagctgtatggagatggcaaggatggagacacccagacagatgctggaggagagccagacagcctgggccagcagcccacagacaccccctatgagtgggacctggacaagaaggcctggttccccaagatcacagaggacttcatcgccacctaccaggccaactacggcttcagcaatgatggagccagcagcagcacagccaacgtggaggatgtgcacgccaggacagctgaggagcccccccaggagaaggcccctgagcccacagatgccaggaagaagggggagaagaggaaggccgagagcggctggttccacgtggaggaggacaggaacaccaacgtgtatgtgtctggcctgcccccagacatcaccgtggatgagttcatccagctgatgagcaagtttggcatcatcatgagggacccccagacagaggagttcaaggtgaagctgtacaaggacaaccagggcaacctgaagggagatggcctgtgctgctacctgaagcgggagagcgtggagctggccctgaagctgctggatgaagatgagatccggggctacaagctgcacgtggaggtggccaagttccagctgaagggggagtatgatgccagcaagaagaagaagaagtgcaaggactacaagaagaagctgtccatgcagcagaagcagctggactggaggcctgagaggagagctggccccagcaggatgagacatgagcgggtggtgatcatcaagaacatgttccaccccatggactttgaagatgaccccctggtgctgaatgagatccgggaggacctgcgggtggagtgcagcaagtttggccagatcaggaagctgctgctgtttgacagacacccagatggagtggcctctgtgtccttccgggaccctgaggaggccgactactgcatccagaccctggatggccgctggtttggaggccggcagatcacagcccaggcctgggatggcaccacagactaccaggtggaggagaccagccgggagcgggaggagcggctgcggggctgggaggccttcctgaatgcccctgaggccaacagaggcctgcggcggagtgacagcgtgtctgccagcgagcgggccggccccagccgggcccggcacttcagcgagcaccccagcaccagcaagatgaatgcccaggagacagccaccggcatggcctttgaggagcccattgatgagaagaagtttgagaagacagaagatggaggagaatttgaggagggcgccagcgagaacaatgccaaggagagcagccctgagaaggaggccgaggagggctgcccagagaaggagagcgaggagggctgccccaagaggggctttgagggcagctgcagccagaaggagagcgaggagggcaaccctgtgcggggcagcgaggaggacagccccaagaaggagagcaagaagaagaccctgaagaatgactgtgaggagaatggcctggccaaggagagtgaagatgacctgaacaaggagagcgaggaggaggtgggccccaccaaggagagtgaagaagatgacagcgagaaggagagtgatgaggactgcagcgagaagcagagtgaagatggcagcgagcgggagtttgaagaaaatggcctggagaaggacctggatgaggagggcagcgagaaggagctgcatgaaaatgtgctggacaaggagctggaggagaatgattctgagaacagcgagtttgaagatgatggcagcgagaaggtgctggatgaggagggcagcgagcgggagtttgatgaggacagtgatgagaaggaggaggaggaggacacctatgagaaggtgtttgatgatgaaagtgatgagaaggaggatgaggagtatgcagatgagaagggcctggaggccgctgacaagaaggccgaggagggagatgctgatgagaagctgtttgaggagagtgatgacaaggaggatgaagatgctgatggcaaggaggtggaggatgctgatgagaagctgtttgaagatgatgacagcaatgagaagctgtttgatgaggaggaggacagcagcgagaagctgtttgatgacagtgatgagcggggcaccctgggcggcttcggctctgtggaggagggccccctgagcacaggcagcagcttcatcctgagcagtgatgatgatgatgatgacatctag

SEQ ID NO: 22164 - DNA, 432 bp, synthetic construct
  misc_feature 1..432: note = Description of Artificial Sequence: Synthetic coding sequence
  source 1..432: mol_type = other DNA
atgaccaagatgtacaagggcttccaggccctgggagatgctgctgacatccgctttgtgtacaccccagccatggagagcgtgtgtggctacttccacaggagccacaacagaagtgaggagttcctgattgctgggaagctgcaggacggcctgctgcacatcaccacctgcagctttgtggccccctggaacagcctgagcctggcccagaggcggggcttcaccaagacctacacagtgggctgtgaagaatgtactgtgttcccctgcctgagcatcccctgcaagctgcagagcggcacccactgcctgtggacagaccagctgctgcagggcagcgagaagggcttccagagccgccacctggcctgcctgccccgggagcccggcctgtgcacctggcagagcctgcggagccagatcgcctag

SEQ ID NO: 22165 - DNA, 786 bp, synthetic construct
  misc_feature 1..786: note = Description of Artificial Sequence: Synthetic coding sequence
  source 1..786: mol_type = other DNA
atgcccctgaccagcggcagcagcaccccaccaccctggagggtgtctgctgacaccagcacaggccccaccacagctgcccgctccttcagcctgctggtgcgccaccggccccgggccctgtgccacaccaaccagagcctgggccggggcctggccaccacccggggccggggcagtgatggaaatggccccactggaaatggagaccaccccaacttcagcctgtctgagggccgggccttcggcagcctggccgcccagcccatcaccagctgcctgtctgtgcctgccccacccttcagcctgggcaagctgcaggacggcctgctgcacatcaccacctgcagctttgtggccccctggaacagcctgagcctggcccagaggcggggcttcaccaagacctacacagtgggctgtgaagaatgtactgtgtctgcctggaccctgaccagcaatggccgctccttccctggccccttccccaagtcctgggcctgcttcctgctgcccctggccatcctgtgcccctgtggctgcagccccaccctgcgggctgtgcctgacctgagctgctacttccccaagccagagacagcccccctgcagatcctggccgcccccttcccctgtgtgcagtacagagtcatcacctgccccagcctggtgcccctcatcctgccctgtgactacagcgtcatccccctgcctgtgcctgagcccccaggcctcttcctgggcagcccagaatgtagccccaggacccagagcgctgtgccctag

SEQ ID NO: 22166 - DNA, 291 bp, synthetic construct
  misc_feature 1..291: note = Description of Artificial Sequence: Synthetic coding sequence
  source 1..291: mol_type = other DNA
atgcctgtgtacagcgcctggccagctgagcccaccatggccccctttgagcccctggccagcggcatcctgctgctgctgtggctgattgcccccagccgggcctgcacctgtgtgcccccccacccccagacagccttctgcaacagcgacctggtgatccgggccaagtttgtgggcaccccagaggtgaaccagaccaccctgtaccagagatatgagatcaagatgaccaagatgtacaagggcttccaggccctgggagatgctgctgacatccgctttgtgtag

SEQ ID NO: 22167 - DNA, 498 bp, synthetic construct
  misc_feature 1..498: note = Description of Artificial Sequence: Synthetic coding sequence
  source 1..498: mol_type = other DNA
tgaccccgggccctgtgccacaccaaccagagcctgggccggggcctggccaccacccggggccggggcagtgatggaaatggccccactggaaatggagaccaccccaacttcagcctgtctgagggccgggccttcggcagcctggccgcccagcccatcaccagctgcctgtctgtgcctgccccacccttcagcctgggcaagctgcaggacggcctgctgcacatcaccacctgcagctttgtggccccctggaacagcctgagcctggcccagaggcggggcttcaccaagacctacacagtgggctgtgaagaatgtactgtgttcccctgcctgagcatcccctgcaagctgcagagcggcacccactgcctgtggacagaccagctgctgcagggcagcgagaagggcttccagagccgccacctggcctgcctgccccgggagcccggcctgtgcacctggcagagcctgcggagccagatcgcctag

SEQ ID NO: 22168 - DNA, 411 bp, synthetic construct
  misc_feature 1..411: note = Description of Artificial Sequence: Synthetic coding sequence
  source 1..411: mol_type = other DNA
atggccccctttgagcccctggccagcggcatcctgctgctgctgtggctgattgcccccagccgggcctgcacctgtgtgcccccccacccccagacagccttctgcaacagcgacctggtgatccgggccaagtttgtgggcaccccagaggtgaaccagaccaccctgtaccagagatatgagatcaagatgaccaagatgtacaagggcttccaggccctgggagatgctgctgacatccgctttgtgtacaccccagccatggagagcgtgtgtggctacttccacaggagccacaacagaagtgaggagttcctgattgctggggaggcccccagccccaggcctgtgccccaccagcctgtgcctggggcccggcccagcaaccatgaaggagcccggctgtag

SEQ ID NO: 22169 - DNA, 663 bp, synthetic construct
  misc_feature 1..663: note = Description of Artificial Sequence: Synthetic coding sequence
  source 1..663: mol_type = other DNA
atgggcgccgccgcccggaccctgcggctggccctgggcctgctgctgctggccaccctgctgcggccagcagatgcctgcagctgcagccctgtgcacccccagcaggccttctgcaatgctgatgtggtgatccgggccaaggctgtgtctgagaaggaggtggacagcggaaatgacatctacggcaaccccatcaagaggatccagtatgagatcaagcagatcaagatgttcaagggccctgagaaggacatcgagttcatctacacagcccccagcagcgctgtgtgtggggtgtccctggatgtgggcggcaagaaggagtacctgattgctgggaaggccgagggagatggcaagatgcacatcaccctgtgtgacttcatcgtgccctgggacaccctgagcaccacccagaagaagagcctgaaccaccgctaccagatgggctgtgagtgcaagatcacccgctgccccatgatcccctgctacatcagcagcccagatgaatgtctgtggatggactgggtgacagagaagaacatcaatggccaccaggccaagttctttgcctgcatcaagagaagtgatggcagctgtgcctggtacagaggagctgccccacccaagcaggagttcctggacatcgaggacccctag

SEQ ID NO: 22170 - DNA, 432 bp, synthetic construct
  misc_feature 1..432: note = Description of Artificial Sequence: Synthetic coding sequence
  source 1..432: mol_type = other DNA
atgtttaaaggacctgagaaggacatcgagttcatctacacagcccccagcagcgctgtgtgtggggtgtccctggatgtgggcggcaagaaggagtacctgattgctgggaaggccgagggagatggcaagatgcacatcaccctgtgtgacttcatcgtgccctgggacaccctgagcaccacccagaagaagagcctgaaccaccgctaccagatgggctgtgagtgcaagatcacccgctgccccatgatcccctgctacatcagcagcccagatgagtgcctgtggatggactgggtgacagagaagaacatcaatggccaccaggccaagttctttgcctgcatcaagagaagtgatggcagctgtgcctggtacagaggagctgccccacccaagcaggagttcctggacatcgaggacccctag

SEQ ID NO: 22171 - DNA, 636 bp, synthetic construct
  misc_feature 1..636: note = Description of Artificial Sequence: Synthetic coding sequence
  source 1..636: mol_type = other DNA
atgaccccctggctgggcctcatcgtgctgctgggctcctggagcctgggggactggggcgctgaggcctgcacctgcagccccagccacccccaggatgccttctgcaacagcgacatcgtcatccgggccaaggtggtgggcaagaagctggtgaaggagggccccttcggcaccctggtgtacaccatcaagcagatgaagatgtaccggggcttcaccaagatgccccacgtgcagtacatccacacagaggccagcgagagcctgtgtggcctgaagctggaggtgaacaagtaccagtacctgctgaccggccgggtgtatgatggcaagatgtacacaggcctgtgcaactttgtggagcgctgggaccagctgaccctgagccagaggaagggcctgaactaccgctaccacctgggctgcaactgcaagatcaagagctgctactacctgccctgctttgtgaccagcaagaatgaatgtctgtggacagacatgctgagcaactttggctacccaggctaccagagcaagcactacgcctgcatccggcagaagggcggctactgctcctggtaccggggctgggcccccccagacaagagcatcatcaatgccacagacccctag

SEQ ID NO: 22172 - DNA, 438 bp, synthetic construct
  misc_feature 1..438: note = Description of Artificial Sequence: Synthetic coding sequence
  source 1..438: mol_type = other DNA
atgaagatgtaccggggcttcaccaagatgccccacgtgcagtacatccacacagaggccagcgagagcctgtgtggcctgaagctggaggtgaacaagtaccagtacctgctgaccggccgggtgtatgatggcaagatgtacacaggcctgtgcaactttgtggagcgctgggaccagctgaccctgagccagaggaagggcctgaactaccgctaccacctgggctgcaactgcaagatcaagagctgctactacctgccctgctttgtgaccagcaagaatgaatgtctgtggacagacatgctgagcaactttggctacccaggctaccagagcaagcactacgcctgcatccggcagaagggcggctactgctcctggtaccggggctgggcccccccagacaagagcatcatcaatgccacagacccctag

SEQ ID NO: 22173 - DNA, 675 bp, synthetic construct
  misc_feature 1..675: note = Description of Artificial Sequence: Synthetic coding sequence
  source 1..675: mol_type = other DNA
atgcctggcagccccaggcctgcccccagctgggtgctgctgctgcggctgctggccctgctgcggcccccaggcctgggggaggcctgcagctgtgccccagcccacccccagcagcacatctgccacagcgccctggtgatccgggccaagatcagcagcgagaaggtggtgcctgccagcgctgaccctgctgacacagagaagatgctgcgctatgagatcaagcagatcaagatgttcaagggctttgagaaggtgaaggatgtgcagtacatctacaccccatttgacagcagcctgtgtggggtgaagctggaggccaacagccagaagcagtacctgctgaccggccaggtgctgagtgatggcaaggtgttcatccacctgtgcaactacatcgagccctgggaggacctgagcctggtgcagcgggagagcctgaaccaccactaccacctgaactgtggctgccagatcaccacctgctacacagtgccctgcaccatcagcgccccaaatgaatgtctgtggacagactggctgctggagaggaagctgtatggctaccaggcccagcactacgtgtgcatgaagcacgtggatggcacctgctcctggtaccggggccacctgcccctgaggaaggagtttgtggacatcgtgcagccctag

SEQ ID NO: 22174 - DNA, 1164 bp, synthetic construct
  misc_feature 1..1164: note = Description of Artificial Sequence: Synthetic coding sequence
  source 1..1164: mol_type = other DNA
atggtgcactgcagctgtgtgctcttcagaaaatatggcaacttcatcgacaagctgcggctcttcacccggggcggcagcggcggcatgggctacccccggctgggcggggagggcggcaaaggaggagatgtgtgggtggtggcccagaacaggatgaccctgaagcagctgaaggaccgctaccccaggaagagatttgtggccggcgtgggcgccaacagcaagatcagcgccctgaagggcagcaagggcaaggactgtgagatccctgtgcctgtgggcatctctgtgacagatgaaaatggcaagatcatcggggagctgaacaaggaaaatgaccgcatcctggtggcccagggcggcctgggcggcaagctgctgaccaacttcctgcccctgaagggccagaagaggatcatccacctggacctgaagctgattgctgatgtgggcctggtgggcttccccaatgccggcaagagcagcctgctgagctgtgtgagccacgccaagccagccatcgctgactatgccttcaccaccctgaagccagagctgggcaagatcatgtacagcgacttcaagcagatctctgtggccgacctgcccggcctgattgaaggagcccacatgaacaagggcatgggccacaagttcctgaagcacatcgagaggacccggcagctgctgtttgtggtggacatcagcggcttccagctgagcagccacacccagtacagaacagcctttgagaccatcatcctgctgaccaaggagctggagctgtacaaggaggagctgcagaccaagccagccctgctggccgtgaacaagatggacctgcctgatgcccaggacaagttccacgagctgatgagccagctgcagaaccccaaggacttcctgcacctgtttgagaagaacatgatccctgagaggacagtggagttccagcacatcatccccatctctgctgtgactggagagggcatcgaggagctgaagaactgcatcaggaagagcctggatgagcaggccaaccaggagaatgatgccctgcacaagaagcagctgctgaacctgtggatcagtgacaccatgagcagcacagagccccccagcaagcatgctgtgaccaccagcaagatggacatcatctag

SEQ ID NO: 22175 - DNA, 375 bp, synthetic construct
  misc_feature 1..375: note = Description of Artificial Sequence: Synthetic coding sequence
  source 1..375: mol_type = other DNA
atggaccctgcccggcccctgggcctgagcatcctgctgctcttcctgacagaagctgccctgggagatgctgcccaggagcccactggaaataatgctgagatctgcctgctgcccctggactatggcccctgccgggccctgctgctgcgctactactatgaccgctacacccagagctgccggcagttcctgtatggaggctgtgagggcaatgccaacaacttctacacctgggaggcctgtgatgatgcctgctggagaattgagaaggtgcccaagctgagctccatgaccagcctgaagaagaagaagaagatgcccaagctgcgctttgccagccgcatcaggaagatcaggaagaagcagttctag

SEQ ID NO: 22176 - DNA, 1506 bp, synthetic construct
  misc_feature 1..1506: note = Description of Artificial Sequence: Synthetic coding sequence
  source 1..1506: mol_type = other DNA
atggctgctgcctctgtgaccccacctggcagcctggagctgctgcagcccggcttcagcaagaccctgctgggcaccaagctggaggccaagtacctgtgcagcgcctgcagaaatgtgctgcggcggcccttccaggcccagtgtggccaccgctactgcagcttctgcctggccagcatcctgagcagcggcccccagaactgtgccgcctgtgtgcatgagggcatctatgaggagggcatcagcatcctggagagcagcagcgccttcccagacaatgctgcccggcgggaggtggagagcctgcctgctgtgtgccccagtgatggctgcacctggaagggcaccctgaaggagtatgagagctgccacgagggccgctgccccctgatgctgacagaatgtcctgcctgcaagggcctggtgcggctgggggagaaggagcggcacctggagcatgaatgtcctgagaggagcctgagctgccgccactgccgggccccctgctgcggggctgatgtgaaggcccaccacgaggtgtgccccaagttccccctgacctgtgatggctgtgggaagaagaagatcccccgggagaagttccaggaccacgtgaagacctgtgggaaatgtcgggtgccctgccgcttccacgccatcggctgcctggagaccgtggagggggagaagcagcaggagcacgaggtgcagtggctgcgggagcacctggccatgctgctgagctctgtgctggaggccaagcccctgctgggggaccagagccacgccggcagcgagctgctgcagagatgtgagagcctggagaagaagacagccacctttgaaaatattgtgtgtgtgctgaaccgggaggtggagcgggtggccatgacagctgaggcctgcagccggcagcaccggctggaccaggacaagattgaggccctgagcagcaaggtgcagcagctggagaggagcatcggcctgaaggacctggccatggctgacctggagcagaaggtgctggagatggaggccagcacctatgatggagtcttcatctggaagatcagtgactttgccaggaagaggcaggaggccgtggccggccgcatcccagccatcttctccccagccttctacaccagccgctatggctacaagatgtgcctgcgcatctacctgaatggagatggcaccggccggggcacccacctgagcctcttctttgtggtgatgaagggccccaatgatgccctgctgcgctggcccttcaaccagaaggtgaccctgatgctgctggaccagaacaaccgggagcacgtgattgatgccttccggccagatgtgaccagcagcagcttccagaggcctgtgaatgacatgaacatcgccagcggctgccccctcttctgccctgtgtccaagatggaggccaagaacagctatgtgagagatgatgccatcttcatcaaggccatcgtggacctgaccggcctgtag

SEQ ID NO: 22177 - DNA, 1662 bp, synthetic construct
  misc_feature 1..1662: note = Description of Artificial Sequence: Synthetic coding sequence
  source 1..1662: mol_type = other DNA
atggctgctgcctctgtgaccccacctggcagcctggagctgctgcagcccggcttcagcaagaccctgctgggcaccaagctggaggccaagtacctgtgcagcgcctgcagaaatgtgctgcggcggcccttccaggcccagtgtggccaccgctactgcagcttctgcctggccagcatcctgagcagcggcccccagaactgtgccgcctgtgtgcatgagggcatctatgaggagggcatcagcatcctggagagcagcagcgccttcccagacaatgctgcccggcgggaggtggagagcctgcctgctgtgtgccccagtgatggctgcacctggaagggcaccctgaaggagtatgaggtgaagatgcctgcctgtggcatggtgacagaggccccagctgtgggcagccggcccaggagccccagcagctatgacctggtgctgcacgtgcccctgaccggggctgaggcctgcctgatgtctgtggaggaggagacagagctgctgctgcggagctgccacgagggccgctgccccctgatgctgacagaatgtcctgcctgcaagggcctggtgcggctgggggagaaggagcggcacctggagcatgaatgtcctgagaggagcctgagctgccgccactgccgggccccctgctgcggggctgatgtgaaggcccaccacgaggtgtgccccaagttccccctgacctgtgatggctgtgggaagaagaagatcccccgggagaagttccaggaccacgtgaagacctgtgggaaatgtcgggtgccctgccgcttccacgccatcggctgcctggagaccgtggagggggagaagcagcaggagcacgaggtgcagtggctgcgggagcacctggccatgctgctgagctctgtgctggaggccaagcccctgctgggggaccagagccacgccggcagcgagctgctgcagagatgtgagagcctggagaagaagacagccacctttgaaaatattgtgtgtgtgctgaaccgggaggtggagcgggtggccatgacagctgaggcctgcagccggcagcaccggctggaccaggacaagattgaggccctgagcagcaaggtgcagcagctggagaggagcatcggcctgaaggacctggccatggctgacctggagcagaaggtgctggagatggaggccagcacctatgatggagtcttcatctggaagatcagtgactttgccaggaagaggcaggaggccgtggccggccgcatcccagccatcttctccccagccttctacaccagccgctatggctacaagatgtgcctgcgcatctacctgaatggagatggcaccggccggggcacccacctgagcctcttctttgtggtgatgaagggccccaatgatgccctgctgcgctggcccttcaaccagaaggtgaccctgatgctgctggaccagaacaaccgggagcacgtgattgatgccttccggccagatgtgaccagcagcagcttccagaggcctgtgaatgacatgaacatcgccagcggctgccccctcttctgccctgtgtccaagatggaggccaagaacagctatgtgagagatgatgccatcttcatcaaggccatcgtggacctgaccggcctgtag

SEQ ID NO: 22178 - DNA, 1269 bp, synthetic construct
  misc_feature 1..1269: note = Description of Artificial Sequence: Synthetic coding sequence
  source 1..1269: mol_type = other DNA
atggctgctgcctctgtgaccccacctggcagcctggagctgctgcagcccggcttcagcaagaccctgctgggcaccaagctggaggccaagtacctgtgcagcgcctgcagaaatgtgctgcggcggcccttccaggcccagtgtggccaccgctactgcagcttctgcctggccagcatcctgagcagcggcccccagaactgtgccgcctgtgtgcatgagggcatctatgaggagggcatcagcatcctggagagcagcagcgccttcccagacaatgctgcccggcgggaggtggagagcctgcctgctgtgtgccccagtgatggctgcacctggaagggcaccctgaaggagtatgaggtgaagatgcctgcctgtggcatggtgacagaggccccagctgtgggcagccggcccaggagccccagcagctatgacctggtgctgcacgtgcccctgaccggggctgaggcctgcctgatgtctgtggaggaggagacagagctgctgctgcggagctgccacgagggccgctgccccctgatgctgacagaatgtcctgcctgcaagggcctggtgcggctgggggagaaggagcggcacctggagcatgaatgtcctgagaggagcctgagctgccgccactgccgggccccctgctgcggggctgatgtgaagaggctggaccaggacaagattgaggccctgagcagcaaggtgcagcagctggagaggagcatcggcctgaaggacctggccatggctgacctggagcagaaggtgctggagatggaggccagcacctatgatggagtcttcatctggaagatcagtgactttgccaggaagaggcaggaggccgtggccggccgcatcccagccatcttcagccctgccttctacaccagccgctatggctacaagatgtgcctgcgcatctacctgaatggagatggcaccggccggggcacccacctgagcctcttctttgtggtgatgaagggccccaatgatgccctgctgcgctggcccttcaaccagaaggtgaccctgatgctgctggaccagaacaaccgggagcacgtgattgatgccttccggccagatgtgaccagcagcagcttccagaggcctgtgaatgacatgaacatcgccagcggctgccccctcttctgccctgtgtccaagatggaggccaagaacagctatgtgagagatgatgccatcttcatcaaggccatcgtggacctgaccggcctgtag

SEQ ID NO: 22179 - DNA, 366 bp, synthetic construct
  misc_feature 1..366: note = Description of Artificial Sequence: Synthetic coding sequence
  source 1..366: mol_type = other DNA
atggctgctgcctctgtgaccccacctggcagcctggagctgctgcagcccggcttcagcaagaccctgctgggcaccaagctggaggccaagtacctgtgcagcgcctgcagaaatgtgctgcggcggcccttccaggcccagtgtggccaccgctactgcagcttctgcctggccagcatcctgagcagcggcccccagaactgtgccgcctgtgtgcatgagggcatctatgaggagggcatcagcatcctggagagcagcagcgccttcccagacaatgctgcccggcgggaggtggagagcctgcctgctgtgtgccccagtgatggctgcacctggaagggcaccctgaaggagtactag

SEQ ID NO: 22180 - DNA, 519 bp, synthetic construct
  misc_feature 1..519: note = Description of Artificial Sequence: Synthetic coding sequence
  source 1..519: mol_type = other DNA
atggctgctgcctctgtgaccccacctggcagcctggagctgctgcagcccggcttcagcaagaccctgctgggcaccaagctggaggccaagtacctgtgcagcgcctgcagaaatgtgctgcggcggcccttccaggcccagtgtggccaccgctactgcagcttctgcctggccagcatcctgagcagcggcccccagaactgtgccgcctgtgtgcatgagggcatctatgaggagggcatcagcatcctggagagcagcagcgccttcccagacaatgctgcccggcgggaggtggagagcctgcctgctgtgtgccccagtgatggctgcacctggaagggcaccctgaaggagtatgagagctgccacgagggccgctgccccctgatgctgacagaatgtcctgcctgcaagggcctggtgcggctgggggagaaggagcggcacctggagcatgaatgtcctgagaggagcctgagctgccgccactgccgggccccctgctgcggctag

SEQ ID NO: 22181 - DNA, 582 bp, synthetic construct
  misc_feature 1..582: note = Description of Artificial Sequence: Synthetic coding sequence
  source 1..582: mol_type = other DNA
atggctgctgcctctgtgaccccacctggcagcctggagctgctgcagcccggcttcagcaagaccctgctgggcaccaagctggaggccaagtacctgtgcagcgcctgcagaaatgtgctgcggcggcccttccaggcccagtgtggccaccgctactgcagcttctgcctggccagcatcctgagcagcggcccccagaactgtgccgcctgtgtgcatgagggcatctatgaggagggcatcagcatcctggagagcagcagcgccttcccagacaatgctgcccggcgggaggtggagagcctgcctgctgtgtgccccagtgatggctgcacctggaagggcaccctgaaggagtatgagagctgccacgagggccgctgccccctgatgctgacagaatgtcctgcctgcaagggcctggtgcggctgggggagaaggagcggcacctggagcatgaatgtcctgagaggagcctgagctgccgccactgccgggccccctgctgcggggctgatgtgaaggcccaccacgaggtgtgccccaagttccccctgacctgtgatggctgcggctag

SEQ ID NO: 22182 - DNA, 1503 bp, synthetic construct
  misc_feature 1..1503: note = Description of Artificial Sequence: Synthetic coding sequence
  source 1..1503: mol_type = other DNA
gtggccggccgggccctgagcagcggccgggccgccaccgtgggcgccctgtttgctggggtgacagccctgatggctgctgcctctgtgaccccacctggcagcctggagctgctgcagcccggcttcagcaagaccctgctgggcaccaagctggaggccaagtacctgtgcagcgcctgcagaaatgtgctgcggcggcccttccaggcccagtgtggccaccgctactgcagcttctgcctggccagcatcctgagcagcggcccccagaactgtgccgcctgtgtgcatgagggcatctatgaggagggcatcagcatcctggagagcagcagcgccttcccagacaatgctgcccggcgggaggtggagagcctgcctgctgtgtgccccagtgatggctgcacctggaagggcaccctgaaggagtatgagagctgccacgagggccgctgccccctgatgctgacagaatgtcctgcctgcaagggcctggtgcggctgggggagaaggagcggcacctggagcatgaatgtcctgagaggagcctgagctgccgccactgccgggccccctgctgcggggctgatgtgaagttccaggaccacgtgaagacctgtgggaagtgccgggtgccctgccgcttccacgccatcggctgcctggagaccgtggagggggagaagcagcaggagcacgaggtgcagtggctgcgggagcacctggccatgctgctgagctctgtgctggaggccaagcccctgctgggggaccagagccatgctggcagcgagctgctgcagagatgtgagagcctggagaagaagacagccacctttgagaacatcgtgtgtgtgctgaaccgggaggtggagcgggtggccatgacagctgaggcctgcagccggcagcaccggctggaccaggacaagattgaggccctgagcagcaaggtgcagcagctggagaggagcatcggcctgaaggacctggccatggctgacctggagcagaaggtgctggagatggaggccagcacctatgatggagtcttcatctggaagatcagtgactttgccaggaagaggcaggaggccgtggccggccgcatcccagccatcttcagccctgccttctacaccagccgctatggctacaagatgtgcctgcgcatctacctgaatggagatggcaccggccggggcacccacctgagcctcttctttgtggtgatgaagggccccaatgatgccctgctgcgctggcccttcaaccagaaggtgaccctgatgctgctggaccagaacaaccgggagcacgtgattgatgccttccggccagatgtgaccagcagcagcttccagaggcctgtgaatgacatgaacatcgccagcggctgccccctcttctgccctgtgtccaagatggaggccaagaacagctatgtgagagatgatgccatcttcatcaaggccatcgtggacctgaccggcctgtag

SEQ ID NO: 22183 - DNA, 1506 bp, synthetic construct; identical to SEQ ID NO: 22176
  misc_feature 1..1506: note = Description of Artificial Sequence: Synthetic coding sequence
  source 1..1506: mol_type = other DNA

SEQ ID NO: 22184 - DNA, 1632 bp, synthetic construct
  misc_feature 1..1632: note = Description of Artificial Sequence: Synthetic coding sequence
  source 1..1632: mol_type = other DNA
atggagagcagcaagaagatggacagccctggggccctgcagaccaacccccccctgaagctgcacacagacagatctgctggcacccctgtgtttgtgcctgagcagggcggctacaaggagaagtttgtgaagacagtggaggacaagtacaagtgtgagaagtgccacctggtgctgtgcagccccaagcagacagaatgtggccaccgcttctgtgagagctgcatggccgccctgctgagcagcagcagccccaagtgcacagcctgccaggagagcatcgtgaaggacaaggtgttcaaggacaactgctgcaagcgggagatcctggccctgcagatctactgcagaaatgaaagccggggctgtgccgagcagctgatgctgggccacctgctggtgcacctgaagaatgactgccactttgaggagctgccctgtgtgcggccagactgcaaggagaaggtgctgaggaaggacctgcgggaccacgtggagaaggcctgcaagtaccgggaggccacctgcagccactgcaagagccaggtgcccatgattgccctgcagaagcatgaggacacagactgcccctgtgtggtggtgtcctgcccccacaagtgcagcgtgcagaccctgctgcggtctgagggcaccaaccagcagatcaaggcccacgaggccagcagcgctgtgcagcacgtgaacctgctgaaggagtggagcaacagcctggagaagaaggtgtccctgctgcagaatgaatctgtggagaagaacaagagcatccagagcctgcacaaccagatctgcagctttgaaattgaaattgagcggcagaaggagatgctgagaaataatgaaagcaagatcctgcacctgcagagggtcatcgacagccaggccgagaagctgaaggagctggacaaggagatccggcccttccggcagaactgggaggaggccgacagcatgaagagctctgtggagagcctgcagaacagagtgacagagctggagagcgtggacaagtctgctggccaggtggccaggaacacaggcctgctggagagccagctgagcagacatgaccagatgctgtctgtgcatgacatccggctggccgacatggacctgcgcttccaggtgctggagacagccagctacaacggggtgctgatctggaagatccgggactacaagaggaggaagcaggaggccgtgatgggcaagaccctgagcctgtacagccagcccttctacacaggctacttcggctacaagatgtgtgcccgggtgtacctgaatggagatggcatgggcaagggcacccacctgagcctcttcttcgtcatcatgagaggagaatatgatgccctgctgccctggcccttcaagcagaaggtgaccctgatgctgatggaccagggcagcagccgccgccacctgggagatgccttcaagccagaccccaacagcagcagcttcaagaagcccaccggggagatgaacatcgccagcggctgccctgtgtttgtggcccagacagtgctggagaatggcacctacatcaaggatgacaccatcttcatcaaggtgattgtggacaccagtgacctgcctgacccctag

SEQ ID NO: 22185 - DNA, 1632 bp, synthetic construct; identical to SEQ ID NO: 22184
  misc_feature 1..1632: note = Description of Artificial Sequence: Synthetic coding sequence
  source 1..1632: mol_type = other DNA

SEQ ID NO: 22186 - DNA, 1707 bp, synthetic construct
  misc_feature 1..1707: note = Description of Artificial Sequence: Synthetic coding sequence
  source 1..1707: mol_type = other DNA
atggagagcagcaagaagatggacagccctggggccctgcagaccaacccccccctgaagctgcacacagacagatctgctggcacccctgtgtttgtgcctgagcagggcggctacaaggagaagtttgtgaagacagtggaggacaagtacaagtgtgagaagtgccacctggtgctgtgcagccccaagcagacagaatgtggccaccgcttctgtgagagctgcatggccgccctgctgagcagcagcagccccaagtgcacagcctgccaggagagcatcgtgaaggacaaggtgttcaaggacaactgctgcaagcgggagatcctggccctgcagatctactgcagaaatgaaagccggggctgtgccgagcagctgatgctgggccacctgctggtgcacctgaagaatgactgccactttgaggagctgccctgtgtgcggccagactgcaaggagaaggtgctgaggaaggacctgcgggaccacgtggagaaggcctgcaagtaccgggaggccacctgcagccactgcaagagccaggtgcccatgattgccctgcagaagcatgaggacacagactgcccctgtgtggtggtgtcctgcccccacaagtgcagcgtgcagaccctgctgcggtctgagctgagcgcccacctgtctgaatgtgtgaatgcccccagcacctgcagcttcaagagatatggctgtgtgttccagggcaccaaccagcagatcaaggcccacgaggccagcagcgctgtgcagcacgtgaacctgctgaaggagtggagcaacagcctggagaagaaggtgtccctgctgcagaatgaatctgtggagaagaacaagagcatccagagcctgcacaaccagatctgcagctttgaaattgaaattgaaaggcagaaggagatgctgaggaacaatgaaagcaagatcctgcacctgcagagggtgattgacagccaggccgagaagctgaaggagctggacaaggagatccggcccttccggcagaactgggaggaggccgacagcatgaagagctctgtggagagcctgcagaacagagtgacagagctggagagcgtggacaagtctgctggccaggtggccaggaacacaggcctgctggagagccagctgagcagacatgaccagatgctgtctgtgcatgacatccggctggccgacatggacctgcgcttccaggtgctggagacagccagctacaatggagtgctgatctggaagatccgggactacaagaggaggaagcaggaggccgtgatgggcaagaccctgagcctgtacagccagcccttctacacaggctacttcggctacaagatgtgtgcccgggtgtacctgaatggagatggcatgggcaagggcacccacctgagcctcttctttgtgatcatgagaggagaatatgatgccctgctgccctggcccttcaagcagaaggtgaccctgatgctgatggaccagggcagcagcagaagacacctgggagatgccttcaagccagaccccaacagcagcagcttcaagaagcccactggagagatgaacatcgccagcggctgccctgtgtttgtggcccagacagtgctggagaatggcacctacatcaaggatgacaccatcttcatcaaggtgattgtggacaccagtgacctgcctgacccctag

SEQ ID NO: 22187 - DNA, 1458 bp, synthetic construct
  misc_feature 1..1458: note = Description of Artificial Sequence: Synthetic coding sequence
  source 1..1458: mol_type = other DNA
atggagagcagcaagaagatggacagccctggggccctgcagaccaacccccccctgaagctgcacacagacagatctgctggcacccctgtgtttgtgcctgagcagggcggctacaaggagaagtttgtgaagacagtggaggacaagtacaagtgtgagaagtgccacctggtgctgtgcagccccaagcagacagaatgtggccaccgcttctgtgagagctgcatggccgccctgctgagcagcagcagccccaagtgcacagcctgccaggagagcatcgtgaaggacaaggtgttcaaggacaactgctgcaagcgggagatcctggccctgcagatctactgcagaaatgaaagccggggctgtgccgagcagctgatgctgggccacctgctggtgcacctgaagaatgactgccactttgaggagctgccctgtgtgcggccagactgcaaggagaaggtgctgaggaaggacctgcgggaccacgtggagaaggcctgcaagtaccgggaggccacctgcagccactgcaagagccaggtgcccatgattgccctgcaggtgtccctgctgcagaatgaatctgtggagaagaacaagagcatccagagcctgcacaaccagatctgcagctttgaaattgaaattgagcggcagaaggagatgctgagaaataatgaaagcaagatcctgcacctgcagagggtcatcgacagccaggccgagaagctgaaggagctggacaaggagatccggcccttccggcagaactgggaggaggccgacagcatgaagagctctgtggagagcctgcagaacagagtgacagagctggagagcgtggacaagtctgctggccaggtggccaggaacacaggcctgctggagagccagctgagcagacatgaccagatgctgtctgtgcatgacatccggctggccgacatggacctgcgcttccaggtgctggagacagccagctacaacggggtgctgatctggaagatccgggactacaagaggaggaagcaggaggccgtgatgggcaagaccctgagcctgtacagccagcccttctacacaggctacttcggctacaagatgtgtgcccgggtgtacctgaatggagatggcatgggcaagggcacccacctgagcctcttcttcgtcatcatgagaggagaatatgatgccctgctgccctggcccttcaagcagaaggtgaccctgatgctgatggaccagggcagcagccgccgccacctgggagatgccttcaagccagaccccaacagcagcagcttcaagaagcccaccggggagatgaacatcgccagcggctgccctgtgtttgtggcccagacagtgctggagaatggcacctacatcaaggatgacaccatcttcatcaaggtgattgtggacaccagtgacctgcctgacccctag

SEQ ID NO: 22188 - DNA, 1707 bp, synthetic construct; identical to SEQ ID NO: 22186
  misc_feature 1..1707: note = Description of Artificial Sequence: Synthetic coding sequence
  source 1..1707: mol_type = other DNA

SEQ ID NO: 22189 - DNA, 285 bp, synthetic construct
  misc_feature 1..285: note = Description of Artificial Sequence: Synthetic coding sequence
  source 1..285: mol_type = other DNA
atggagagcagcaagaagatggacagccctggggccctgcagaccaacccccccctgaagctgcacacagacagatctgctggcacccctgtgtttgtgcctgagcagggcggctacaaggagaagtttgtgaagacagtggaggacaagtacaagtgtgagaagtgccacctggtgctgtgcagccccaagcagacagaatgtggccaccgcttctgtgagagctgcatggccgccctgctgagcagcagcagccccaagtgcacagcctgccaggagagctag

SEQ ID NO: 22190 - DNA, 939 bp, synthetic construct
  misc_feature 1..939: note = Description of Artificial Sequence: Synthetic coding sequence
  source 1..939: mol_type = other DNA
atggctgctggccagaatggccacgaggagtgggtgggcagcgcctacctgtttgtggagagcagcctggacaaggtggtgctgagtgatgcctatgcccacccccagcagaaggtggccgtgtaccgggccctgcaggccgccctggccgagagcggcggcagcccagatgtgctgcagatgctgaagatccacagaagtgacccccagctgattgtgcagctgcgcttctgtggccggcagccctgtggccgcttcctgcgggcctaccgggagggcgccctgcgggccgccctgcagaggagcctggccgccgccctggcccagcacagcgtgcccctgcagctggagctgcgggccggggctgagcggctggatgccctgctggctgatgaggagcgctgcctgagctgcatcctggcccagcagcctgaccggctgagagatgaggagctggccgagctggaggatgccctgaggaacctgaagtgtggcagcggggcccggggaggagatggagaggtggccagcgcccccctgcagccccctgtgcccagcctgtctgaggtgaagcccccacctcctcctcctccagcccagaccttcctgttccagggccagcctgtggtgaaccggcccctgagcctgaaggaccagcagacctttgcccggtctgtgggcctgaagtggaggaaggtgggccgcagcctgcagaggggctgccgggccctgcgggaccctgccctggacagcctggcctatgaatatgaaagagagggcctgtatgagcaggccttccagctgctgcggagatttgtgcaggccgagggccggcgggccaccctgcagaggctggtggaggccctggaggagaatgagctgaccagcctggccgaggacctgctgggcctgacagaccccaacggcggcctggcctag

SEQ ID NO: 22191 - DNA, 825 bp, synthetic construct
  misc_feature 1..825: note = Description of Artificial Sequence: Synthetic coding sequence
  source 1..825: mol_type = other DNA
atggccaccaccgtgtccacccagaggggccctgtgtacatcggggagctgccccaggacttcctgcgcatcacccccacccagcagcagaggcaggtgcagctggatgcccaggccgcccagcagctgcagtatggaggagctgtgggcaccgtgggccgcctgaacatcaccgtggtgcaggccaagctggccaagaactacggcatgaccaggatggacccctactgccgcctgcggctgggctatgctgtgtatgagacccccacagcccacaatggagccaagaacccccgctggaacaaggtgatccactgcaccgtgcccccaggagtggacagcttctacctggagatctttgatgagcgggccttctccatggatgacagaattgcctggacccacatcaccatccctgagagcctgcggcagggcaaggtggaggacaagtggtacagcctgagcggccggcagggagatgacaaggagggcatgatcaacctggtgatgtcctatgccctgctgcctgctgccatggtgatgccaccccagcctgtggtgctgatgcccaccgtgtaccagcagggcgtgggctacgtgcccatcaccggcatgcctgctgtgtgcagccctggcatggtgcctgtggccctgcccccagctgctgtgaatgcccagccccgctgcagcgaggaggacctgaaggccatccaggacatgttccccaacatggaccaggaggtgatccgctctgtgctggaggcccagaggggcaacaaggatgctgccatcaacagcctgctgcagatgggagaggagccctag

SEQ ID NO: 22192 - DNA, 1059 bp, synthetic construct
  misc_feature 1..1059: note = Description of Artificial Sequence: Synthetic coding sequence
  source 1..1059: mol_type = other DNA
cagctgagccccagccaggccccagctggggcccaggaggtggcccggcgggtgacagtgggcagcgccagccatggaggccgccgcagcaccatggccaccaccgtgtccacccagaggggccctgtgtacatcggggagctgccccaggacttcctgcgcatcacccccacccagcagcagaggcaggtgcagctggatgcccaggccgcccagcagctgcagtatggaggagctgtgggcaccgtgggccgcctgaacatcaccgtggtgcaggccaagctggccaagaactacggcatgaccaggatggacccctactgccgcctgcggctgggctatgctgtgtatgagacccccacagcccacaacggggccaagaacccccgctggaacaaggtgatccactgcaccgtgcccccaggagtggacagcttctacctggagatctttgatgagcgggccttctccatggatgaccgcatcgcctggacccacatcaccatccctgagagcctgcggcagggcaaggtggaggacaagtggtacagcctgagcggccggcagggagatgacaaggagggcatgatcaacctggtgatgtcctatgccctgctgcctgctgccatggtgatgccaccccagcctgtggtgctgatgcccaccgtgtaccagcagggcgtgggctacgtgcccatcaccggcatgcctgctgtgtgcagccctggcatggtgcctgtggccctgcccccagctgctgtgaatgcccagccccgctgcagcgaggaggacctgaaggccatccaggacatgttccccaacatggaccaggaggtgatccgctctgtgctggaggcccagaggggcaacaaggatgctgccatccccagccacctggtgctgggcggcctgagcgccctgagctgcccctgggatgtgcggctgtccttcagctgccgcagcggcaagtgcagctgctgccgggagcagctgctgctgcccggctgctggcgctggtggagcgccttccgcttccacagctggcactttgtgatgtag

SEQ ID NO: 22193 - DNA, 675 bp, synthetic construct
  misc_feature 1..675: note = Description of Artificial Sequence: Synthetic coding sequence
  source 1..675: mol_type = other DNA
atggccaccaccgtgtccacccagaggggccctgccaagctggccaagaactacggcatgaccaggatggacccctactgccgcctgcggctgggctatgctgtgtatgagacccccacagcccacaatggagccaagaacccccgctggaacaaggtgatccactgcaccgtgcccccaggagtggacagcttctacctggagatctttgatgagcgggccttctccatggatgacagaattgcctggacccacatcaccatccctgagagcctgcggcagggcaaggtggaggacaagtggtacagcctgagcggccggcagggagatgacaaggagggcatgatcaacctggtgatgtcctatgccctgctgcctgctgccatggtgatgccaccccagcctgtggtgctgatgcccaccgtgtaccagcagggcgtgggctacgtgcccatcaccggcatgcctgctgtgtgcagccctggcatggtgcctgtggccctgcccccagctgctgtgaatgcccagccccgctgcagcgaggaggacctgaaggccatccaggacatgttccccaacatggaccaggaggtgatccgctctgtgctggaggcccagaggggcaacaaggatgctgccatcaacagcctgctgcagatgggagaggagccctag

SEQ ID NO: 22194 - DNA, 768 bp, synthetic construct
  misc_feature 1..768: note = Description of Artificial Sequence: Synthetic coding sequence
  source 1..768: mol_type = other DNA
atggccagcagcaccagcctgcctgcccctggcagccggcccaagaagcccctgggcaagatggctgactggttccggcagaccctgctgaagaagcccaagaagaggcccaacagccctgagagcaccagcagtgatgccagccagcccaccagccaggacagccccctgccccccagcctgagctctgtgaccagccccagcctgccccccacccacgccagtgacagcggcagcagccgctggagcaaggactatgatgtgtgtgtgtgccacagcgaggaggacctggtggccgcccaggacctggtgtcctacctggagggcagcacagccagcctgcgctgcttcctgcagctgagagatgccaccccaggaggagccatcgtgtctgagctgtgccaggccctgagcagcagccactgccgggtgctgctgatcaccccaggcttcctgcaggacccctggtgcaagtaccagatgctgcaggccctgacagaggcccctggagctgagggctgcaccatccccctgctgagcggcctgagcagagctgcctacccacctgagctgcgcttcatgtactacgtggatggccggggcccagatggcggcttccggcaggtgaaggaggccgtgatgaggagcaaccaggtgctgaagcacctgctgtaccacggcaccccagaaattggagtgaagctggagacagagaacccctgccgggccagtgacagccacaagtgtgacaagcgctaccgggagtag

SEQ ID NO: 22195 - DNA, 708 bp, synthetic construct
  misc_feature 1..708: note = Description of Artificial Sequence: Synthetic coding sequence
  source 1..708: mol_type = other DNA
atggccagcagcaccagcctgcctgcccctggcagccggcccaagaagcccctgggcaagatggctgactggttccggcagaccctgctgaagaagcccaagaagaggcccaacagccctgagagcaccagcagtgatgccagccagcccaccagccaggacagccccctgccccccagcctgagctctgtgaccagccccagcctgccccccacccacgccagtgacagcggcagcagccgctggagcaaggactatgatgtgtgtgtgtgccacagcgaggaggacctggtggccgcccaggacctggtgtcctacctggagggcagcacagccagcctgcgctgcttcctgcagctgagagatgccaccccaggaggagccatcgtgtctgagctgtgccaggccctgagcagcagccactgccgggtgctgctgatcaccccaggcttcctgcaggacccctggtgcaagtaccagatgctgcaggccctgacagaggcccctggagctgagggctgcaccatccccctgctgagcggcctgagcagagctgcctacccacctgagctgcgcttcatgtactacgtggatggccggggcccagatggcggcttccggcaggtgaaggaggccgtgatgcgctgcaagctgctgcaggagggggagggggagcgggacagcgccaccgtgtctgacctgctgtag

SEQ ID NO: 22196 - DNA, 666 bp, synthetic construct
  misc_feature 1..666: note = Description of Artificial Sequence: Synthetic coding sequence
  source 1..666: mol_type = other DNA
atggccagcagcaccagcctgcctgcccctggcagccggcccaagaagcccctgggcaagatggctgactggttccggcagaccctgctgaagaagcccaagaagaggcccaacagccctgagagcaccagcagtgatgccagccagcccaccagccaggacagccccctgccccccagcctgagctctgtgaccagccccagcctgccccccacccacgccagtgacagcggcagcagccgctggagcaaggactatgatgtgtgtgtgtgccacagcgaggaggacctggtggccgcccaggacctggtgtcctacctggagggcagcacagccagcctgcgctgcttcctgcagctgagagatgccaccccaggaggagccatcgtgtctgagctgtgccaggccctgagcagcagccactgccgggtgctgctgatcaccccaggcttcctgcaggacccctggtgcaagtaccagatgctgcaggccctgacagaggcccctggagctgagggctgcaccatccccctgctgagcggcctgagcagagctgcctacccacctgagctgcgcttcatgtactacgtggatggccggggcccagatggcggcttccggcaggtgaaggaggccgtgatgagatacctgcagaccctgtcctag

SEQ ID NO: 22197 - DNA, 666 bp, synthetic construct; identical to SEQ ID NO: 22196
  misc_feature 1..666: note = Description of Artificial Sequence: Synthetic coding sequence
  source 1..666: mol_type = other DNA

SEQ ID NO: 22198 - DNA, 666 bp, synthetic construct; identical to SEQ ID NO: 22196
  misc_feature 1..666: note = Description of Artificial Sequence: Synthetic coding sequence
  source 1..666: mol_type = other DNA

SEQ ID NO: 22199 - DNA, 2520 bp, synthetic construct
  misc_feature 1..2520: note = Description of Artificial Sequence: Synthetic coding sequence
  source 1..2520: mol_type = other DNA
atgatgtctgccagccggctggccggcaccctcatcccagccatggccttcctgagctgtgtgcggcctgagagctgggagccctgtgtggaggtggtgcccaacatcacctaccagtgcatggagctgaacttctacaagatcccagacaacctgcccttcagcaccaagaacctggacctgtccttcaaccccctgcggcacctgggcagctacagcttcttctccttccctgagctgcaggtgctggacctgagccgctgtgagatccagaccattgaagatggagcctaccagagcctgagccacctgagcaccctcatcctgaccggcaaccccatccagagcctggccctgggcgccttcagcggcctgagcagcctgcagaagctggtggccgtggagaccaacctggccagcctggagaacttccccatcggccacctgaagaccctgaaggagctgaatgtggcccacaacctgatccagagcttcaagctgcctgagtacttcagcaacctgaccaacctggagcacctggacctgagcagcaacaagatccagagcatctactgcacagacctgcgggtgctgcaccagatgcccctgctgaacctgagcctggacctgagcctgaaccccatgaacttcatccagcccggggccttcaaggagatccggctgcacaagctgaccctgaggaacaactttgacagcctgaatgtgatgaagacctgcatccagggcctggccggcctggaggtgcaccggctggtgctgggggagttcagaaatgaaggcaacctggagaagtttgacaagagcgccctggagggcctgtgcaacctgaccatcgaggagttccggctggcctacctggactactacctggatgacatcatcgacctcttcaactgcctgaccaacgtgagcagcttcagcctggtgtctgtgaccatcgagcgggtgaaggacttctcctacaactttggctggcagcacctggagctggtgaactgcaagtttggccagttccccaccctgaagctgaagagcctgaagaggctgaccttcaccagcaacaagggcggcaatgccttcagcgaggtggacctgcccagcctggagttcctggacctgagcagaaatggcctgtccttcaagggctgctgcagccagagcgactttggcaccaccagcctgaagtacctggacctgtccttcaatggagtcatcaccatgagcagcaacttcctgggcctggagcagctggagcacctggacttccagcacagcaacctgaagcagatgtctgagttctctgtgttcctgagcctgaggaacctgatctacctggacatcagccacacccacaccagggtggccttcaacggcatcttcaacggcctgagcagcctggaggtgctgaagatggccggcaacagcttccaggagaacttcctgcctgacatcttcacagagctgaggaacctgaccttcctggacctgagccagtgccagctggagcagctgagccccacagccttcaacagcctgagcagcctgcaggtgctgaacatgagccacaacaacttcttcagcctggacaccttcccctacaagtgcctgaacagcctgcaggtgctggactacagcctgaaccacatcatgaccagcaagaagcaggagctgcagcacttccccagcagcctggccttcctgaacctgacccagaatgactttgcctgcacctgtgagcaccagagcttcctgcagtggatcaaggaccagaggcagctgctggtggaggtggagaggatggagtgtgccacccccagcgacaagcagggcatgcctgtgctgagcctgaacatcacctgccagatgaacaagaccatcatcggcgtgtctgtgctgtctgtgctggtggtgtctgtggtggccgtgctggtgtacaagttctacttccacctgatgctgctggccggctgcatcaagtatggaagaggagagaacatctatgatgcctttgtgatctacagcagccaggatgaggactgggtgagaaatgagctggtgaagaacctggaggagggcgtgccccccttccagctgtgcctgcactacagagacttcatccctggggtggccatcgccgccaacatcatccacgagggcttccacaagagcaggaaggtgattgtggtggtgtcccagcacttcatccagagccgctggtgcatctttgaatatgaaattgcccagacctggcagttcctgagcagccgggccggcatcatcttcatcgtgctgcagaaggtggagaagaccctgctgcggcagcaggtggagctgtaccgcctgctgagcaggaacacctacctggagtgggaggacagcgtgctgggccgccacatcttctggaggcggctgaggaaggccctgctggatggcaagtcctggaaccctgagggcaccgtgggcaccggctgcaactggcaggaggccaccagcatctag

SEQ ID NO: 22200 - DNA, 2400 bp, synthetic construct
  misc_feature 1..2400: note = Description of Artificial Sequence: Synthetic coding sequence
  source 1..2400: mol_type = other DNA
atggagctgaacttctacaagatcccagacaacctgcccttcagcaccaagaacctggacctgtccttcaaccccctgcggcacctgggcagctacagcttcttctccttccctgagctgcaggtgctggacctgagccgctgtgagatccagaccattgaagatggagcctaccagagcctgagccacctgagcaccctcatcctgaccggcaaccccatccagagcctggccctgggcgccttcagcggcctgagcagcctgcagaagctggtggccgtggagaccaacctggccagcctggagaacttccccatcggccacctgaagaccctgaaggagctgaatgtggcccacaacctgatccagagcttcaagctgcctgagtacttcagcaacctgaccaacctggagcacctggacctgagcagcaacaagatccagagcatctactgcacagacctgcgggtgctgcaccagatgcccctgctgaacctgagcctggacctgagcctgaaccccatgaacttcatccagcccggggccttcaaggagatccggctgcacaagctgaccctgaggaacaactttgacagcctgaatgtgatgaagacctgcatccagggcctggccggcctggaggtgcaccggctggtgctgggggagttcagaaatgaaggcaacctggagaagtttgacaagagcgccctggagggcctgtgcaacctgaccatcgaggagttccggctggcctacctggactactacctggatgacatcatcgacctcttcaactgcctgaccaacgtgagcagcttcagcctggtgtctgtgaccatcgagcgggtgaaggacttctcctacaactttggctggcagcacctggagctggtgaactgcaagtttggccagttccccaccctgaagctgaagagcctgaagaggctgaccttcaccagcaacaagggcggcaatgccttcagcgaggtggacctgcccagcctggagttcctggacctgagcagaaatggcctgtccttcaagggctgctgcagccagagcgactttggcaccaccagcctgaagtacctggacctgtccttcaatggagtcatcaccatgagcagcaacttcctgggcctggagcagctggagcacctggacttccagcacagcaacctgaagcagatgtctgagttctctgtgttcctgagcctgaggaacctgatctacctggacatcagccacacccacaccagggtggccttcaacggcatcttcaacggcctgagcagcctggaggtgctgaagatggccggcaacagcttccaggagaacttcctgcctgacatcttcacagagctgaggaacctgaccttcctggacctgagccagtgccagctggagcagctgagccccacagccttcaacagcctgagcagcctgcaggtgctgaacatgagccacaacaacttcttcagcctggacaccttcccctacaagtgcctgaacagcctgcaggtgctggactacagcctgaaccacatcatgaccagcaagaagcaggagctgcagcacttccccagcagcctggccttcctgaacctgacccagaatgactttgcctgcacctgtgagcaccagagcttcctgcagtggatcaaggaccagaggcagctgctggtggaggtggagaggatggagtgtgccacccccagcgacaagcagggcatgcctgtgctgagcctgaacatcacctgccagatgaacaagaccatcatcggcgtgtctgtgctgtctgtgctggtggtgtctgtggtggccgtgctggtgtacaagttctacttccacctgatgctgctggccggctgcatcaagtatggaagaggagagaacatctatgatgcctttgtgatctacagcagccaggatgaggactgggtgagaaatgagctggtgaagaacctggaggagggcgtgccccccttccagctgtgcctgcactacagagacttcatccctggggtggccatcgccgccaacatcatccacgagggcttccacaagagcaggaaggtgattgtggtggtgtcccagcacttcatccagagccgctggtgcatctttgaatatgaaattgcccagacctggcagttcctgagcagccgggccggcatcatcttcatcgtgctgcagaaggtggagaagaccctgctgcggcagcaggtggagctgtaccgcctgctgagcaggaacacctacctggagtgggaggacagcgtgctgggccgccacatcttctggaggcggctgaggaaggccctgctggatggcaagtcctggaaccctgagggcaccgtgggcaccggctgcaactggcaggaggccaccagcatctag

SEQ ID NO: 22201 - DNA, 2577 bp, synthetic construct
  misc_feature 1..2577: note = Description of Artificial Sequence: Synthetic coding sequence
  source 1..2577: mol_type = other DNA
atgggagaccacctggacctgctgctgggcgtggtgctgatggccggccctgtgtttggcatccccagctgcagctttgatggccgcatcgccttctaccgcttctgcaacctgacccaggtgccccaggtgctgaacaccacagagcggctgctgctgtccttcaactacatcagaacagtgacagccagcagcttccccttcctggagcagctgcagctgctggagctgggcagccagtacacccccctgaccatcgacaaggaggccttcaggaacctgcccaacctgcgcatcctggacctgggcagcagcaagatctacttcctgcacccagatgccttccagggcctcttccacctgtttgagctgcggctgtacttctgtggcctgagtgatgctgtgctgaaggatggctacttcaggaacctgaaggccctgacccggctggacctgagcaagaaccagatccgcagcctgtacctgcaccccagctttgggaagctgaacagcctgaagagcattgacttcagcagcaaccagatcttcctggtgtgtgagcacgagctggagcccctgcagggcaagaccctgtccttcttcagcctggccgccaacagcctgtacagccgggtgtctgtggactggggcaagtgcatgaaccccttcaggaacatggtgctggagatcctggatgtgtctggaaatggctggacagtggacatcactggaaacttcagcaatgccatcagcaagagccaggccttcagcctcatcctggcccaccacatcatgggcgccggcttcggcttccacaacatcaaggaccctgaccagaacacctttgctggcctggcccggagctctgtgcgccacctggacctgagccacggctttgtgttcagcctgaacagccgggtgtttgagaccctgaaggacctgaaggtgctgaacctggcctacaacaagatcaacaagattgctgatgaggccttctacggcctggacaacctgcaggtgctgaacctgagctacaacctgctgggggagctgtacagcagcaacttctacggcctgcccaaggtggcctacatcgacctgcagaagaaccacatcgccatcatccaggaccagaccttcaagttcctggagaagctgcagaccctggacctgcgggacaatgccctgaccaccatccacttcatccccagcatcccagacatcttcctgagcggcaacaagctggtgaccctgcccaagatcaacctgacagccaacctgatccacctgtctgagaaccggctggagaacctggacatcctgtacttcctgctgcgggtgccccacctgcagatcctgatcctgaaccagaaccgcttcagcagctgcagcggggaccagacccccagcgagaaccccagcctggagcagctgttcctgggggagaacatgctgcagctggcctgggagacagagctgtgctgggatgtgtttgagggcctgagccacctgcaggtgctgtacctgaaccacaactacctgaacagcctgcccccaggagtcttcagccacctgacagccctgcggggcctgagcctgaacagcaaccggctgactgtgctgagccacaatgacctgcctgccaacctggagatcctggacatcagcaggaaccagctgctggcccccaacccagatgtgtttgtgtccctgtctgtgctggacatcacccacaacaagttcatctgtgaatgtgagctgagcaccttcatcaactggctgaaccacaccaacgtgaccatcgccggccccccagctgacatctactgtgtgtacccagacagcttctctggagtgtccctcttcagcctgagcacagagggctgtgatgaggaggaggtgctgaagagcctgaagttcagcctcttcatcgtgtgcaccgtgaccctgaccctcttcctgatgaccatcctgactgtgaccaagttccggggcttctgcttcatctgctacaagacagcccagaggctggtgttcaaggaccacccccagggcacagagccagacatgtacaagtatgatgcctacctgtgcttcagcagcaaggacttcacctgggtgcagaatgccctgctgaagcacctggacacccagtacagcgaccagaaccgcttcaacctgtgctttgaggagcgggactttgtgcctggagagaacagaattgccaacatccaggatgccatctggaacagcaggaagatcgtgtgcctggtgagccgccacttcctgagagatggctggtgcctggaggccttctcctatgcccagggccgctgcctgagtgacctgaacagcgccctgatcatggtggtggtgggcagcctgagccagtaccagctgatgaagcaccagagcatccggggctttgtgcagaagcagcagtacctgcgctggccagaggacttccaggatgtgggctggttcctgcacaagctgagccagcagatcctgaagaaggagaaggagaagaagaaggacaacaacatccccctgcagacagtggccaccatctcctag

SEQ ID NO: 22202 - DNA, 2577 bp, synthetic construct; identical to SEQ ID NO: 22201
  misc_feature 1..2577: note = Description of Artificial Sequence: Synthetic coding sequence
  source 1..2577: mol_type = other DNA

SEQ ID NO: 22203 - DNA, 66 bp, synthetic construct
  misc_feature 1..66: note = Description of Artificial Sequence: Synthetic coding sequence
  source 1..66: mol_type = other DNA
atgggagaccacctggacctgctgctgggcgtggtgctgatggccggccctgtgtttggcatctag

SEQ ID NO: 22204 - DNA, 2577 bp, synthetic construct; identical to SEQ ID NO: 22201
  misc_feature 1..2577: note = Description of Artificial Sequence: Synthetic coding sequence
  source 1..2577: mol_type = other DNA

SEQ ID NO: 22205 - DNA, 4836 bp, synthetic construct
  misc_feature 1..4836: note = Description of Artificial Sequence: Synthetic coding sequence
  source 1..4836: mol_type = other DNA
caggtgagccccagccaccctgtgaatgaaaacatgcaggtgaacaagatcaagaagaatgaagatgccaagaagaggctgtctgtggagcgcatctaccagaagaagacccagctggagcacatcctgctgcggccagacacctacatcggctctgtggagctggtgacccagcagatgtgggtgtatgatgaagatgtgggcatcaactaccgggaggtgacctttgtgcccggcctgtacaagatctttgatgagatcctggtgaatgctgctgacaacaagcagagggaccccaagatgagctgcatccgggtgaccatcgaccctgagaacaacctgatcagcatctggaacaacgggaagggcatccctgtggtggagcacaaggtggagaagatgtatgtgcctgccctgatcttcggccagctgctgaccagcagcaactatgatgatgatgagaagaaggtgactggaggaagaaatggctacggggccaagctgtgcaacatcttcagcaccaagttcaccgtggagacagccagccgggagtacaagaagatgttcaagcagacctggatggacaacatgggccgggccggggagatggagctgaagcccttcaatggagaggactacacctgcatcaccttccagcctgacctgagcaagttcaagatgcagagcctggacaaggacatcgtggccctgatggtgcggcgggcctatgacattgctggcagcaccaaggatgtgaaggtgttcctgaatggaaacaagctgcctgtgaagggcttccgctcctatgtggacatgtacctgaaggacaagctggatgaaacaggcaacagcctgaaggtgattcatgagcaggtgaaccaccgctgggaggtgtgcctgaccatgtctgagaagggcttccagcagatcagctttgtgaacagcatcgccaccagcaagggcggccgccacgtggactatgtggccgaccagatcgtgaccaagctggtggatgtggtgaagaagaagaacaagggcggcgtggccgtgaaggcccaccagaggctggagtgcagcggcaccatcagcgcccactgcaacctgcggctgctgggcttcagtgacagcctggccagcgccagccgggtggccgagatcacagacatgcaccaccacatccagctgatctttgtgttcctgattgagatgggcttctaccacgtgggccaggccggcctggagctgctggccagcctggacccccccagcagcgccagctgtgtgagccactgcacccagctgtttgtgagcaacttcatctacctgttcctgatcttcctgcggcgctccttcacctttgtgacccaggccggcgtgcagtgcaccatcagccccaccagcagctctgtgctggcccagttctttgagagcttcctgtttgtggccatcggctgcggcatcgtggagagcatcctgaactgggtgaagttcaaggcccaggtgcagctgaacaagaagtgcagcgctgtgaagcacaaccgcatcaagggcatccccaagctggatgatgccaatgatgctgggggcaggaacagcacagagtgcaccctcatcctgacagaaggagacagcgccaagaccctggccgtgtctggcctgggcgtggtgggccgggacaagtatggagtcttccccctgcggggcaagatcctgaatgtgcgggaggccagccacaagcagatcatggagaatgctgagatcaacaacatcatcaagatcgtgggcctgcagtacaagaagaactatgaagatgaggacagcctgaagaccctgcgctatggcaagatcatgatcatgacagaccaggaccaggacggcagccacatcaagggcctgctgatcaacttcatccaccacaactggcccagcctgctgcggcaccgcttcctggaggagttcatcacccccatcgtgaaggtgtccaagaacaagcaggagatggccttctacagcctgcctgagtttgaggagtggaagagcagcacccccaaccacaagaagtggaaggtgaagtactacaagggcctgggcaccagcaccagcaaggaggccaaggagtactttgctgacatgaagaggcaccgcatccagttcaagtacagcggcccagaagatgatgctgccatcagcctggccttcagcaagaagcagattgatgacaggaaggagtggctgaccaacttcatggaggaccggcggcagaggaagctgctgggcctgcctgaggactacctgtatggccagaccaccacctacctgacctacaatgacttcatcaacaaggagctgatcctcttcagcaacagcgacaatgaaagaagcatccccagcatggtggatggcctgaagccaggccagaggaaggtgctcttcacctgcttcaagagaaatgacaagcgggaggtgaaggtggcccagctggccggctctgtggccgagatgagcagctaccaccacggggagatgagcctgatgatgaccatcatcaacctggcccagaactttgtgggcagcaacaacctgaacctgctgcagcccatcggccagtttggcacccggctgcatggaggcaaggacagcgccagcccccgctacatcttcaccatgctgagcagcctggcccggctgctcttcccccccaaggatgaccacaccctgaagttcctgtatgatgacaaccagagggtggagcctgagtggtacatccccatcatccccatggtgctgatcaatggagctgagggcatcggcaccggctggagctgcaagatccccaactttgatgtgcgggagatcgtgaacaacatccggcggctgatggatggagaggagcccctgcccatgctgcccagctacaagaacttcaagggcaccatcgaggagctggcccccaaccagtatgtgatcagcggggaggtggccatcctgaacagcaccaccatcgagatcagcgagctgcctgtgaggacctggacccagacctacaaggagcaggtgctggagcccatgctgaatggaacagagaagaccccacccctcatcacagactaccgggagtaccacacagacaccaccgtgaagtttgtggtgaagatgacagaggagaagctggccgaggccgagcgggtgggcctgcacaaggtgttcaagctgcagaccagcctgacctgcaacagcatggtgctgtttgaccacgtgggctgcctgaagaagtatgacacagtgctggacatcctgcgggacttctttgagctgcggctgaagtactacggcctgaggaaggagtggctgctgggcatgctgggcgctgagagcgccaagctgaacaaccaggcccgcttcatcctggagaagattgatggcaagatcatcatcgagaacaagcccaagaaggagctgatcaaggtgctgatccagaggggctatgacagcgaccctgtgaaggcctggaaggaggcccagcagaaggtgcctgatgaggaggagaatgaggagagtgacaatgagaaggagacagagaagagtgacagcgtgacagattctggccccaccttcaactacctgctggacatgcccctgtggtacctgaccaaggagaagaaggatgagctgtgccgcctgagaaatgagaaggagcaggagctggacaccctgaagaggaagagccccagcgacctgtggaaggaggacctggccaccttcatcgaggagctggaggccgtggaggccaaggagaagcaggatgagcaggtgggcctgcccgggaagggcggcaaggccaagggcaagaagacccagatggccgaggtgctgcccagcccccggggccagagggtcatcccccgcatcaccatcgagatgaaggccgaggccgagaagaagaacaagaagaagatcaagaatgaaaatacagagggcagcccccaggaggatggagtggagctggagggcctgaagcagaggctggagaagaagcagaagcgggagcccggcaccaagaccaagaagcagaccaccctggccttcaagcccatcaagaagggcaagaagaggaacccctggagcgacagcgagagtgacaggagcagtgatgagagcaactttgatgtgcccccccgggagacagagccccggcgggccgccaccaagaccaagttcaccatggacctggacagtgatgaggacttcagtgactttgatgagaagacagatgatgaggactttgtgcccagtgatgccagcccccccaagaccaagaccagccccaagctgagcaacaaggagctgaagccccagaagtctgtggtgtctgacctggaggctgatgatgtgaagggctctgtgcccctgagcagcagccccccagccacccacttcccagatgaaacagagatcaccaaccctgtgcccaagaagaatgtgacagtgaagaagacagctgccaagagccagagcagcaccagcaccaccggggccaagaagagagctgcccccaagggcaccaagagggaccctgccctgaacagcggcgtgtcccagaagccagaccctgccaagaccaagaacagaaggaagaggaagcccagcaccagtgatgacagcgacagcaactttgagaagatcgtgtccaaggctgtgaccagcaagaagagcaagggggagagtgatgacttccacatggactttgacagcgctgtggccccccgggccaagtctgtgcgggccaagaagcccatcaagtacctggaggagagtgatgaagatgacctcttctag

SEQ ID NO: 22206 - DNA, 4665 bp, synthetic construct
  misc_feature 1..4665: note = Description of Artificial Sequence: Synthetic coding sequence
  source 1..4665: mol_type = other DNA
caggtgagccccagccaccctgtgaatgaaaacatgcaggtgaacaagatcaagaagaatgaagatgccaagaagaggctgtctgtggagcgcatctaccagaagaagacccagctggagcacatcctgctgcggccagacacctacatcggctctgtggagctggtgacccagcagatgtgggtgtatgatgaagatgtgggcatcaactaccgggaggtgacctttgtgcccggcctgtacaagatctttgatgagatcctggtgaatgctgctgacaacaagcagagggaccccaagatgagctgcatccgggtgaccatcgaccctgagaacaacctgatcagcatctggaacaacgggaagggcatccctgtggtggagcacaaggtggagaagatgtatgtgcctgccctgatcttcggccagctgctgaccagcagcaactatgatgatgatgagaagaaggtgactggaggaagaaatggctacggggccaagctgtgcaacatcttcagcaccaagttcaccgtggagacagccagccgggagtacaagaagatgttcaagcagacctggatggacaacatgggccgggccggggagatggagctgaagcccttcaatggagaggactacacctgcatcaccttccagcctgacctgagcaagttcaagatgcagagcctggacaaggacatcgtggccctgatggtgcggcgggcctatgacattgctggcagcaccaaggatgtgaaggtgttcctgaatggaaacaagctgcctgtgaagggcttccgctcctatgtggacatgtacctgaaggacaagctggatgaaacaggcaacagcctgaaggtgattcatgagcaggtgaaccaccgctgggaggtgtgcctgaccatgtctgagaagggcttccagcagatcagctttgtgaacagcatcgccaccagcaagggcggccgccacgtggactatgtggccgaccagatcgtgaccaagctggtggatgtggtgaagaagaagaacaagggcggcgtggccgtgaaggcccaccaggtgaagaaccacatgtggatctttgtgaatgccctgattgagaaccccacctttgacagccagaccaaggagaacatgaccctgcagcccaagagctttggcagcacctgccagctgtctgagaagttcatcaaggccgcccacctgtacagccgcttcctgattgaccccttcttccccaacatgatccccaacatgaacctcttccaggccatcggctgcggcatcgtggagagcatcctgaactgggtgaagttcaaggcccaggtgcagctgaacaagaagtgcagcgctgtgaagcacaaccgcatcaagggcatccccaagctggatgatgccaatgatgctgggggcaggaacagcacagaatgtaccctcatcctgacagaaggagacagcgccaagaccctggccgtgtctggcctgggcgtggtgggccgggacaagtatggagtcttccccctgcggggcaagatcctgaatgtgcgggaggccagccacaagcagatcatggagaatgctgagatcaacaacatcatcaagatcgtgggcctgcagtacaagaagaactatgaagatgaggacagcctgaagaccctgcgctatggcaagatcatgatcatgacagaccaggaccaggacggcagccacatcaagggcctgctgatcaacttcatccaccacaactggcccagcctgctgcggcaccgcttcctggaggagttcatcacccccatcgtgaaggtgtccaagaacaagcaggagatggccttctacagcctgcctgagtttgaggagtggaagagcagcacccccaaccacaagaagtggaaggtgaagtactacaagggcctgggcaccagcaccagcaaggaggccaaggagtactttgctgacatgaagaggcaccgcatccagttcaagtacagcggcccagaagatgatgctgccatcagcctggccttcagcaagaagcagattgatgacaggaaggagtggctgaccaacttcatggaggaccggcggcagaggaagctgctgggcctgcctgaggactacctgtatggccagaccaccacctacctgacctacaatgacttcatcaacaaggagctgatcctcttcagcaacagcgacaatgaaagaagcatccccagcatggtggatggcctgaagccaggccagaggaaggtgctcttcacctgcttcaagagaaatgacaagcgggaggtgaaggtggcccagctggccggctctgtggccgagatgagcagctaccaccacggggagatgagcctgatgatgaccatcatcaacctggcccagaactttgtgggcagcaacaacctgaacctgctgcagcccatcggccagtttggcacccggctgcacggcggcaaggacagcgccagcccccgctacatcttcaccatgctgagcagcctggcccggctgctcttcccccccaaggatgaccacaccctgaagttcctgtatgatgacaaccagagggtggagcctgagtggtacatccccatcatccccatggtgctgatcaacggggctgagggcattggaacaggctggagctgcaagatccccaactttgatgtgcgggagatcgtgaacaacatccggcggctgatggatggagaggagcccctgcccatgctgcccagctacaagaacttcaagggcaccatcgaggagctggcccccaaccagtatgtgatctctggagaggtggccatcctgaacagcaccaccatcgagatcagcgagctgcctgtgaggacctggacccagacctacaaggagcaggtgctggagcccatgctgaatggaacagagaagaccccacccctcatcacagactaccgggagtaccacacagacaccaccgtgaagtttgtggtgaagatgacagaggagaagctggccgaggccgagcgggtgggcctgcacaaggtgttcaagctgcagaccagcctgacctgcaacagcatggtgctgtttgaccacgtgggctgcctgaagaagtatgacacagtgctggacatcctgcgggacttctttgagctgcggctgaagtactacggcctgaggaaggagtggctgctgggcatgctgggcgctgagagcgccaagctgaacaaccaggcccgcttcatcctggagaagattgatggcaagatcatcatcgagaacaagcccaagaaggagctgatcaaggtgctgatccagaggggctatgacagcgaccctgtgaaggcctggaaggaggcccagcagaaggtgcctgatgaggaggagaatgaggagagtgacaatgagaaggagacagagaagagtgacagcgtgacagacagcggccccaccttcaactacctgctggacatgcccctgtggtacctgaccaaggagaagaaggatgagctgtgccgcctgagaaatgagaaggagcaggagctggacaccctgaagaggaagagccccagcgacctgtggaaggaggacctggccaccttcatcgaggagctggaggccgtggaggccaaggagaagcaggatgagcaggtgggcctgcctggaaaaggaggcaaggccaagggcaagaagacccagatggccgaggtgctgcccagcccccggggccagagggtcatcccccgcatcaccatcgagatgaaggccgaggccgagaagaagaacaagaagaagatcaagaatgaaaatacagagggcagcccccaggaggatggagtggagctggagggcctgaagcagaggctggagaagaagcagaagcgggagcccggcaccaagaccaagaagcagaccaccctggccttcaagcccatcaagaagggcaagaagaggaacccctggagcgacagcgagagtgacaggagcagtgatgagagcaactttgatgtgcccccccgggagacagagcccaggagagctgccaccaagaccaagttcaccatggacctggacagtgatgaggacttcagtgactttgatgagaagacagatgatgaagattttgtgcccagtgatgccagcccccccaagaccaagaccagccccaagctgagcaacaaggagctgaagccccagaagtctgtggtgtctgacctggaggctgatgatgtgaagggctctgtgcccctgagcagcagccccccagccacccacttcccagatgaaacagagatcaccaaccctgtgcccaagaagaatgtgacagtgaagaagacagctgccaagagccagagcagcaccagcaccactggagccaagaagagagctgcccccaagggcaccaagagggaccctgccctgaacagcggcgtgtcccagaagccagaccctgccaagaccaagaacagaaggaagaggaagcccagcaccagtgatgacagcgacagcaactttgagaagatcgtgtccaaggctgtgaccagcaagaagagcaaaggagagagtgatgacttccacatggactttgattctgctgtggccccccgggccaagtctgtgcgggccaagaagcccatcaagtacctggaggagagtgatgaagatgacctcttctag

SEQ ID NO: 22207 - DNA, 4707 bp, synthetic construct
  misc_feature 1..4707: note = Description of Artificial Sequence: Synthetic coding sequence
  source 1..4707: mol_type = other DNA
atggaggtgagccccctgcagcctgtgaatgaaaacatgcaggtgaacaagatcaagaagaatgaagatgccaagaagaggctgtctgtggagcgcatctaccagaagaagacccagctggagcacatcctgctgcggccagacacctacatcggctctgtggagctggtgacccagcagatgtgggtgtatgatgaagatgtgggcatcaactaccgggaggtgacctttgtgcccggcctgtacaagatctttgatgagatcctggtgaatgctgctgacaacaagcagagggaccccaagatgagctgcatccgggtgaccattgatcctgagaacaacctgatcagcatctggaacaacgggaagggcatccctgtggtggagcacaaggtggagaagatgtatgtgcctgccctgatcttcggccagctgctgaccagcagcaactatgatgatgatgagaagaaggtgactggaggaagaaatggctatggagccaagctgtgcaacatcttcagcaccaagttcaccgtggagacagccagccgggagtacaagaagatgttcaagcaggccatcacctggatggacaacatgggccgggccggggagatggagctgaagcccttcaacggggaggactacacctgcatcaccttccagcctgacctgagcaagttcaagatgcagagcctggacaaggacatcgtggccctgatggtgagaagagcctatgacattgctggcagcaccaaggatgtgaaggtgttcctgaatggaaacaagctgcctgtgaagggcttccgctcctatgtggacatgtacctgaaggacaagctggatgagaccggcaacagcctgaaggtgatccacgagcaggtgaaccaccgctgggaggtgtgcctgaccatgtctgagaagggcttccagcagatcagctttgtgaacagcatcgccaccagcaaggtgatcctcttcctgaactacatgatctacctgtacatctacgtgttcctgctcttcctgatctacaaggtggacctgaacatcggcctggcctacttcaccggcggcagacatgtggactatgtggccgaccagatcgtgaccaagctggtggatgtggtgaagaagaagaacaagggcggcgtggccgtgaaggcccaccaggtgaagaaccacatgtggatctttgtgaatgccctgattgagaaccccacctttgacagccagaccaaggagaacatgaccctgcagcccaagagctttggcagcacctgccagctgtctgagaagttcatcaaggccgccatcggctgcggcatcgtggagagcatcctgaactgggtgaagttcaaggcccaggtgcagctgaacaagaagtgcagcgctgtgaagcacaaccgcatcaagggcatccccaagctggatgatgccaatgatgctgggggcaggaacagcacagagtgcaccctcatcctgacagaaggagacagcgccaagaccctggccgtgtctggcctgggcgtggtgggccgggacaagtatggagtcttccccctgcggggcaagatcctgaatgtgcgggaggccagccacaagcagatcatggagaatgctgagatcaacaacatcatcaagatcgtgggcctgcagtacaagaagaactatgaagatgaggacagcctgaagaccctgcgctatggcaagatcatgatcatgacagaccaggaccaggacggcagccacatcaagggcctgctgatcaacttcatccaccacaactggcccagcctgctgcggcaccgcttcctggaggagttcatcacccccatcgtgaaggtgtccaagaacaagcaggagatggccttctacagcctgcctgagtttgaggagtggaagagcagcacccccaaccacaagaagtggaaggtgaagtactacaagggcctgggcaccagcaccagcaaggaggccaaggagtactttgctgacatgaagaggcaccgcatccagttcaagtacagcggcccagaagatgatgctgccatcagcctggccttcagcaagaagcagattgatgacaggaaggagtggctgaccaacttcatggaggaccggcggcagaggaagctgctgggcctgcctgaggactacctgtatggccagaccaccacctacctgacctacaatgacttcatcaacaaggagctgatcctcttcagcaacagcgacaatgaaagaagcatccccagcatggtggatggcctgaagccaggccagaggaaggtgctcttcacctgcttcaagagaaatgacaagcgggaggtgaaggtggcccagctggccggctctgtggccgagatgagcagctaccaccacggggagatgagcctgatgatgaccatcatcaacctggcccagaactttgtgggcagcaacaacctgaacctgctgcagcccatcggccagtttggcacccggctgcatggaggcaaggacagcgccagcccccgctacatcttcaccatgctgagcagcctggcccggctgctcttcccccccaaggatgaccacaccctgaagttcctgtatgatgacaaccagagggtggagcctgagtggtacatccccatcatccccatggtgctgatcaatggagctgagggcatcggcaccggctggagctgcaagatccccaactttgatgtgcgggagatcgtgaacaacatccggcggctgatggatggagaggagcccctgcccatgctgcccagctacaagaacttcaagggcaccatcgaggagctggcccccaaccagtatgtgatcagcggggaggtggccatcctgaacagcaccaccatcgagatcagcgagctgcctgtgaggacctggacccagacctacaaggagcaggtgctggagcccatgctgaatggaacagagaagaccccacccctcatcacagactaccgggagtaccacacagacaccaccgtgaagtttgtggtgaagatgacagaggagaagctggccgaggccgagcgggtgggcctgcacaaggtgttcaagctgcagaccagcctgacctgcaacagcatggtgctgtttgaccacgtgggctgcctgaagaagtatgacacagtgctggacatcctgcgggacttctttgagctgcggctgaagtactacggcctgaggaaggagtggctgctgggcatgctgggcgctgagagcgccaagctgaacaaccaggcccgcttcatcctggagaagattgatggcaagatcatcatcgagaacaagcccaagaaggagctgatcaaggtgctgatccagaggggctatgacagcgaccctgtgaaggcctggaaggaggcccagcagaaggtgcctgatgaggaggagaatgaggagagtgacaatgagaaggagacagagaagagtgacagcgtgacagattctggccccaccttcaactacctgctggacatgcccctgtggtacctgaccaaggagaagaaggatgagctgtgccgcctgagaaatgagaaggagcaggagctggacaccctgaagaggaagagccccagcgacctgtggaaggaggacctggccaccttcatcgaggagctggaggccgtggaggccaaggagaagcaggatgagcaggtgggcctgcccgggaagggcggcaaggccaagggcaagaagacccagatggccgaggtgctgcccagcccccggggccagagggtcatcccccgcatcaccatcgagatgaaggccgaggccgagaagaagaacaagaagaagatcaagaatgaaaatacagagggcagcccccaggaggatggagtggagctggagggcctgaagcagaggctggagaagaagcagaagcgggagcccggcaccaagaccaagaagcagaccaccctggccttcaagcccatcaagaagggcaagaagaggaacccctggagcgacagcgagagtgacaggagcagtgatgagagcaactttgatgtgcccccccgggagacagagccccggcgggccgccaccaagaccaagttcaccatggacctggacagtgatgaggacttcagtgactttgatgagaagacagatgatgaggactttgtgcccagtgatgccagcccccccaagaccaagaccagccccaagcagaactgcaacaaggagctgaagccccagaagtctgtggtgtctgacctggaggctgatgatgtgaagggctctgtgcccctgagcagcagccccccagccacccacttcccagatgaaacagagatcaccaaccctgtgcccaagaagaatgtgacagtgaagaagacagctgccaagagccagagcagcaccagcaccactggagccaagaagagagctgcccccaagggcaccaagagggaccctgccctgaacagcggcgtgtcccagaagccagaccctgccaagaccaagaacagaaggaagaggaagcccagcaccagtgatgacagcgacagcaactttgagaagatcgtgtccaaggctgtgaccagcaagaagagcaaaggagagagtgatgacttccacatggactttgattctgctgtggccccccgggccaagtctgtgcgggccaagaagcccatcaagtacctggaggagagtgatgaagatgacctcttctag

SEQ ID NO: 22208 - DNA, 4596 bp, synthetic construct
  misc_feature 1..4596: note = Description of Artificial Sequence: Synthetic coding sequence
  source 1..4596: mol_type = other DNA
atggaggtgagccccctgcagcctgtgaatgaaaacatgcaggtgaacaagatcaagaagaatgaagatgccaagaagaggctgtctgtggagcgcatctaccagaagaagacccagctggagcacatcctgctgcggccagacacctacatcggctctgtggagctggtgacccagcagatgtgggtgtatgatgaagatgtgggcatcaactaccgggaggtgacctttgtgcccggcctgtacaagatctttgatgagatcctggtgaatgctgctgacaacaagcagagggaccccaagatgagctgcatccgggtgaccattgatcctgagaacaacctgatcagcatctggaacaacgggaagggcatccctgtggtggagcacaaggtggagaagatgtatgtgcctgccctgatcttcggccagctgctgaccagcagcaactatgatgatgatgagaagaaggtgactggaggaagaaatggctatggagccaagctgtgcaacatcttcagcaccaagttcaccgtggagacagccagccgggagtacaagaagatgttcaagcagacctggatggacaacatgggccgggccggggagatggagctgaagcccttcaacggggaggactacacctgcatcaccttccagcctgacctgagcaagttcaagatgcagagcctggacaaggacatcgtggccctgatggtgagaagagcctatgacattgctggcagcaccaaggatgtgaaggtgttcctgaatggaaacaagctgcctgtgaagggcttccgctcctatgtggacatgtacctgaaggacaagctggatgagaccggcaacagcctgaaggtgatccacgagcaggtgaaccaccgctgggaggtgtgcctgaccatgtctgagaagggcttccagcagatcagctttgtgaacagcatcgccaccagcaaaggaggaagacatgtggactatgtggccgaccagatcgtgaccaagctggtggatgtggtgaagaagaagaacaagggcggcgtggccgtgaaggcccaccaggtgaagaaccacatgtggatctttgtgaatgccctgattgagaaccccacctttgacagccagaccaaggagaacatgaccctgcagcccaagagctttggcagcacctgccagctgtctgagaagttcatcaaggccgccatcggctgcggcatcgtggagagcatcctgaactgggtgaagttcaaggcccaggtgcagctgaacaagaagtgcagcgctgtgaagcacaaccgcatcaagggcatccccaagctggatgatgccaatgatgctgggggcaggaacagcacagagtgcaccctcatcctgacagaaggagacagcgccaagaccctggccgtgtctggcctgggcgtggtgggccgggacaagtatggagtcttccccctgcggggcaagatcctgaatgtgcgggaggccagccacaagcagatcatggagaatgctgagatcaacaacatcatcaagatcgtgggcctgcagtacaagaagaactatgaagatgaggacagcctgaagaccctgcgctatggcaagatcatgatcatgacagaccaggaccaggacggcagccacatcaagggcctgctgatcaacttcatccaccacaactggcccagcctgctgcggcaccgcttcctggaggagttcatcacccccatcgtgaaggtgtccaagaacaagcaggagatggccttctacagcctgcctgagtttgaggagtggaagagcagcacccccaaccacaagaagtggaaggtgaagtactacaagggcctgggcaccagcaccagcaaggaggccaaggagtactttgctgacatgaagaggcaccgcatccagttcaagtacagcggcccagaagatgatgctgccatcagcctggccttcagcaagaagcagattgatgacaggaaggagtggctgaccaacttcatggaggaccggcggcagaggaagctgctgggcctgcctgaggactacctgtatggccagaccaccacctacctgacctacaatgacttcatcaacaaggagctgatcctcttcagcaacagcgacaatgaaagaagcatccccagcatggtggatggcctgaagccaggccagaggaaggtgctcttcacctgcttcaagagaaatgacaagcgggaggtgaaggtggcccagctggccggctctgtggccgagatgagcagctaccaccacggggagatgagcctgatgatgaccatcatcaacctggcccagaactttgtgggcagcaacaacctgaacctgctgcagcccatcggccagtttggcacccggctgcatggaggcaaggacagcgccagcccccgctacatcttcaccatgctgagcagcctggcccggctgctcttcccccccaaggatgaccacaccctgaagttcctgtatgatgacaaccagagggtggagcctgagtggtacatccccatcatccccatggtgctgatcaatggagctgagggcatcggcaccggctggagctgcaagatccccaactttgatgtgcgggagatcgtgaacaacatccggcggctgatggatggagaggagcccctgcccatgctgcccagctacaagaacttcaagggcaccatcgaggagctggcccccaaccagtatgtgatcagcggggaggtggccatcctgaacagcaccaccatcgagatcagcgagctgcctgtgaggacctggacccagacctacaaggagcaggtgctggagcccatgctgaatggaacagagaagaccccacccctcatcacagactaccgggagtaccacacagacaccaccgtgaagtttgtggtgaagatgacagaggagaagctggccgaggccgagcgggtgggcctgcacaaggtgttcaagctgcagaccagcctgacctgcaacagcatggtgctgtttgaccacgtgggctgcctgaagaagtatgacacagtgctggacatcctgcgggacttctttgagctgcggctgaagtactacggcctgaggaaggagtggctgctgggcatgctgggcgctgagagcgccaagctgaacaaccaggcccgcttcatcctggagaagattgatggcaagatcatcatcgagaacaagcccaagaaggagctgatcaaggtgctgatccagaggggctatgacagcgaccctgtgaaggcctggaaggaggcccagcagaaggtgcctgatgaggaggagaatgaggagagtgacaatgagaaggagacagagaagagtgacagcgtgacagattctggccccaccttcaactacctgctggacatgcccctgtggtacctgaccaaggagaagaaggatgagctgtgccgcctgagaaatgagaaggagcaggagctggacaccctgaagaggaagagccccagcgacctgtggaaggaggacctggccaccttcatcgaggagctggaggccgtggaggccaaggagaagcaggatgagcaggtgggcctgcccgggaagggcggcaaggccaagggcaagaagacccagatggccgaggtgctgcccagcccccggggccagagggtcatcccccgcatcaccatcgagatgaaggccgaggccgagaagaagaacaagaagaagatcaagaatgaaaatacagagggcagcccccaggaggatggagtggagctggagggcctgaagcagaggctggagaagaagcagaagcgggagcccggcaccaagaccaagaagcagaccaccctggccttcaagcccatcaagaagggcaagaagaggaacccctggagcgacagcgagagtgacaggagcagtgatgagagcaactttgatgtgcccccccgggagacagagccccggcgggccgccaccaagaccaagttcaccatggacctggacagtgatgaggacttcagtgactttgatgagaagacagatgatgaggactttgtgcccagtgatgccagcccccccaagaccaagaccagccccaagctgagcaacaaggagctgaagccccagaagtctgtggtgtctgacctggaggctgatgatgtgaagggctctgtgcccctgagcagcagccccccagccacccacttcccagatgaaacagagatcaccaaccctgtgcccaagaagaatgtgacagtgaagaagacagctgccaagagccagagcagcaccagcaccaccggggccaagaagagagctgcccccaagggcaccaagagggaccctgccctgaacagcggcgtgtcccagaagccagaccctgccaagaccaagaacagaaggaagaggaagcccagcaccagtgatgacagcgacagcaactttgagaagatcgtgtccaaggctgtgaccagcaagaagagcaagggggagagtgatgacttccacatggactttgacagcgctgtggccccccgggccaagtctgtgcgggccaagaagcccatcaagtacctggaggagagtgatgaagatgacctcttctag

SEQ ID NO: 22209 - DNA, 4881 bp, synthetic construct
  misc_feature 1..4881: note = Description of Artificial Sequence: Synthetic coding sequence
  source 1..4881: mol_type = other DNA
atggccaagagcggcggctgtggggccggggccggcgtgggcggcggcaatggagccctgacctgggtgaccctgtttgaccagaacaatgctgccaagaaggaggagagcgagacagccaacaagaatgacagcagcaagaagctgtctgtggagcgggtgtaccagaagaagacccagctggagcacatcctgctgcggccagacacctacatcggctctgtggagcccctgacccagttcatgtgggtgtatgatgaagatgtgggcatgaactgccgggaggtgacctttgtgcccggcctgtacaagatctttgatgagatcctggtgaatgctgctgacaacaagcagagggacaagaacatgacctgcatcaaggtgtccattgatcctgagagcaacatcatcagcatctggaacaacgggaagggcatccctgtggtggagcacaaggtggagaaggtgtatgtgcctgccctgatcttcggccagctgctgaccagcagcaactatgatgatgatgagaagaaggtgactggaggaagaaatggctacggggccaagctgtgcaacatcttcagcaccaagttcaccgtggagacagcctgcaaggagtacaagcacagcttcaagcagacctggatgaacaacatgatgaagaccagcgaggccaagatcaagcactttgatggagaggactacacctgcatcaccttccagcctgacctgagcaagttcaagatggagaagctggacaaggacatcgtggccctgatgacccggcgggcctatgacctggccggcagctgccggggcgtgaaggtgatgtttaatggcaagaagctgcctgtgaatggcttccgctcctatgtggacctgtatgtgaaggacaagctggatgaaacaggagtggccctgaaggtgattcatgagctggccaatgaacgctgggatgtgtgcctgaccctgtctgagaagggcttccagcagatcagctttgtgaacagcatcgccaccaccaagggcggccgccacgtggactatgtggtggaccaggtggtgggcaagctgattgaggtggtgaagaagaagaacaaggccggcgtgtctgtgaagcccttccaggtgaagaaccacatctgggtgttcatcaactgcctgattgagaaccccacctttgacagccagaccaaggagaacatgaccctgcagcccaagagctttggcagcaagtgccagctgtctgagaagttcttcaaggccgccagcaactgtggcatcgtggagagcatcctgaactgggtgaagttcaaggcccagacccagctgaacaagaagtgcagctctgtgaagtacagcaagatcaagggcatccccaagctggatgatgccaatgatgctgggggcaagcacagcctggagtgcaccctcatcctgacagaaggagacagcgccaagagcctggccgtgtctggcctgggcgtgattggccgggacagatatggagtcttccccctgcggggcaagatcctgaatgtgcgggaggccagccacaagcagatcatggagaatgctgagatcaacaacatcatcaagatcgtgggcctgcagtacaagaagagctatgatgatgctgagagcctgaagaccctgcgctatggcaagatcatgatcatgacagaccaggaccaggacggcagccacatcaagggcctgctgatcaacttcatccaccacaactggcccagcctgctgaagcacggcttcctggaggagttcatcacccccatcgtgaaggccagcaagaacaagcaggagctgtccttctacagcatccctgagtttgatgagtggaagaagcacatcgagaaccagaaggcctggaagatcaagtactacaagggcctgggcaccagcacagccaaggaggccaaggagtactttgctgacatggagcggcaccgcatcctcttccgctatgccggcccagaagatgatgctgccatcaccctggccttcagcaagaagaagattgatgacaggaaggagtggctgaccaacttcatggaggaccggcggcagaggcggctgcacggcctgcctgagcagttcctgtatggaacagccaccaagcacctgacctacaatgacttcatcaacaaggagctgatcctcttcagcaacagcgacaatgaaagaagcatccccagcctggtggatggcttcaagccaggccagaggaaggtgctcttcacctgcttcaagagaaatgacaagcgggaggtgaaggtggcccagctggccggctctgtggccgagatgtctgcctaccaccacggggagcaggccctgatgatgaccatcgtgaacctggcccagaactttgtgggcagcaacaacatcaacctgctgcagcccatcggccagtttggcacccggctgcacggcggcaaggatgctgccagcccccgctacatcttcaccatgctgagcaccctggcccggctgctcttccctgctgtggatgacaacctgctgaagttcctgtatgatgacaaccagagggtggagcctgagtggtacatccccatcatccccatggtgctgatcaacggggctgagggcattggaacaggctgggcctgcaagctgcccaactatgatgcccgggagatcgtgaacaacgtgcggaggatgctggatggcctggacccccaccccatgctgcccaactacaagaacttcaagggcaccatccaggagctgggccagaaccagtatgctgtgtctggagagatctttgtggtggacaggaacacagtggagatcacagagctgcctgtgaggacctggacccaggtgtacaaggagcaggtgctggagcccatgctgaatggaacagacaagaccccagccctgatcagtgactacaaggagtaccacacagacaccaccgtgaagtttgtggtgaagatgacagaggagaagctggcccaggccgaggccgccggcctgcacaaggtgttcaagctgcagaccaccctgacctgcaacagcatggtgctgtttgaccacatgggctgcctgaagaagtatgaaacagtgcaggacatcctgaaggagttctttgacctgcggctgagctactacggcctgaggaaggagtggctggtgggcatgctgggcgctgagagcaccaagctgaacaaccaggcccgcttcatcctggagaagatccagggcaagatcaccattgaaaatagaagcaagaaggacctgatccagatgctggtgcagaggggctatgaaagtgaccctgtgaaggcctggaaggaggcccaggagaaggctgctgaagaagatgagacccagaaccagcatgatgacagcagcagtgacagcggcaccccatctggccctgacttcaactacatcctgaacatgagcctgtggagcctgaccaaggagaaggtggaggagctgatcaagcagagagatgccaagggccgggaggtgaatgacctgaagaggaagagccccagcgacctgtggaaggaggacctggccgcctttgtggaggagctggacaaggtggagagccaggagagagaagatgtgctggccggcatgtctgggaaggccatcaagggcaaggtgggcaagcccaaggtgaagaagctgcagctggaggagaccatgcccagcccctacggccgccgcatcatccctgagatcacagccatgaaggcagatgccagcaagaagctgctgaagaagaagaagggggacctggacacagctgctgtgaaggtggagtttgatgaggagttcagcggggcccctgtggagggcgctggggaggaggccctgacccccagcgtgcccatcaacaagggccccaagcccaagcgggagaagaaggagcccggcaccagggtgaggaagacccccaccagcagcggcaagcccagcgccaagaaggtgaagaagaggaacccctggagcgatgatgagagcaagtctgagagtgacctggaggagacagagcctgtggtgatcccccgggacagcctgctgcggcgggctgctgctgagcggcccaagtacacctttgacttcagcgaggaggaggatgatgatgctgatgatgatgatgatgacaacaatgacctggaggagctgaaggtgaaggccagccccatcaccaatgatggagaagatgaatttgtgcccagtgatggcctggacaaggatgagtacaccttcagccctgggaagagcaaggccaccccagagaagagcctgcatgacaagaagagccaggactttggaaacctcttctccttccccagctacagccagaagtcagaagatgattctgccaagtttgacagcaatgaagaagattctgcctctgtgttcagccccagctttggcctgaagcagacagacaaggtgcccagcaagacagtggccgccaagaagggcaagcccagcagtgacacagtgcccaagcccaagagggcccccaagcagaagaaggtggtggaggccgtgaacagcgacagcgacagcgagtttggcatccccaagaagaccaccacccccaagggcaagggccgcggggccaagaagaggaaggccagcggctctgaaaatgaaggagactacaaccctggcaggaagaccagcaagaccaccagcaagaagcccaagaagaccagctttgaccaggacagtgatgtggacatcttccccagcgacttccccacagagccccccagcctgcccaggacaggccgggccaggaaggaggtgaagtactttgctgagagtgatgaggaggaggatgatgtggactttgccatgttcaactag

SEQ ID NO: 22210 - DNA, 3453 bp, synthetic construct
  misc_feature 1..3453: note = Description of Artificial Sequence: Synthetic coding sequence
  source 1..3453: mol_type = other DNA
atggccaagagcggcggctgtggggccggggccggcgtgggcggcggcaatggagccctgacctgggtgaacaatgctgccaagaaggaggagagcgagacagccaacaagaatgacagcagcaagaagctgtctgtggagcgggtgtaccagaagaagacccagctggagcacatcctgctgcggccagacacctacatcggctctgtggagcccctgacccagttcatgtgggtgtatgatgaagatgtgggcatgaactgccgggaggtgacctttgtgcccggcctgtacaagatctttgatgagatcctggtgaatgctgctgacaacaagcagagggacaagaacatgacctgcatcaaggtgtccattgatcctgagagcaacatcatcagcatctggaacaacgggaagggcatccctgtggtggagcacaaggtggagaaggtgtatgtgcctgccctgatcttcggccagctgctgaccagcagcaactatgatgatgatgagaagaaggtgactggaggaagaaatggctatggagccaagctgtgcaacatcttcagcaccaagttcaccgtggagacagcctgcaaggagtacaagcacagcttcaagcagacctggatgaacaacatgatgaagaccagcgaggccaagatcaagcactttgatggagaggactacacctgcatcaccttccagcctgacctgagcaagttcaagatggagaagctggacaaggacatcgtggccctgatgacccggcgggcctatgacctggccggcagctgccggggcgtgaaggtgatgttcaacgggaagaagctgcctgtgaatggcttccgctcctatgtggacctgtatgtgaaggacaagctggatgagaccggggtggccctgaaggtgatccacgagctggccaatgaacgctgggatgtgtgcctgaccctgtctgagaagggcttccagcagatcagctttgtgaacagcatcgccaccaccaagggcggcagacatgtggactatgtggtggaccaggtggtgggcaagctgattgaggtggtgaagaagaagaacaaggccggcgtgtctgtgaagcccttccaggtgaagaaccacatctgggtgttcatcaactgcctgattgagaaccccacctttgacagccagaccaaggagaacatgaccctgcagcccaagagctttggcagcaagtgccagctgtctgagaagttcttcaaggccgccagcaactgtggcatcgtggagagcatcctgaactgggtgaagttcaaggcccagacccagctgaacaagaagtgcagctctgtgaagtacagcaagatcaagggcatccccaagctggatgatgccaatgatgctgggggcaagcacagcctggagtgcaccctcatcctgacagaaggagacagcgccaagagcctggccgtgtctggcctgggcgtcatcggccgggacagatatggagtcttccccctgcggggcaagatcctgaatgtgcgggaggccagccacaagcagatcatggagaatgctgagatcaacaacatcatcaagatcgtgggcctgcagtacaagaagagctatgatgatgctgagagcctgaagaccctgcgctatggcaagatcatgatcatgacagaccaggaccaggacggcagccacatcaagggcctgctgatcaacttcatccaccacaactggcccagcctgctgaagcacggcttcctggaggagttcatcacccccatcgtgaaggccagcaagaacaagcaggagctgtccttctacagcatccctgagtttgatgagtggaagaagcacatcgagaaccagaaggcctggaagatcaagtactacaagggcctgggcaccagcacagccaaggaggccaaggagtactttgctgacatggagcggcaccgcatcctcttccgctatgccggcccagaagatgatgctgccatcaccctggccttcagcaagaagaagattgatgacaggaaggagtggctgaccaacttcatggaggaccggcggcagaggcggctgcacggcctgcctgagcagttcctgtatggaacagccaccaagcacctgacctacaatgacttcatcaacaaggagctgatcctcttcagcaacagcgacaatgaaagaagcatccccagcctggtggatggcttcaagccaggccagaggaaggtgctcttcacctgcttcaagagaaatgacaagcgggaggtgaaggtggcccagctggccggctctgtggccgagatgtctgcctaccaccacggggagcaggccctgatgatgaccatcgtgaacctggcccagaactttgtgggcagcaacaacatcaacctgctgcagcccatcggccagtttggcacccggctgcatggaggcaaggatgctgccagcccccgctacatcttcaccatgctgagcaccctggcccggctgctcttccctgctgtggatgacaacctgctgaagttcctgtatgatgacaaccagagggtggagcctgagtggtacatccccatcatccccatggtgctgatcaatggagctgagggcatcggcaccggctgggcctgcaagctgcccaactatgatgcccgggagatcgtgaacaacgtgcggaggatgctggatggcctggacccccaccccatgctgcccaactacaagaacttcaagggcaccatccaggagctgggccagaaccagtatgctgtgtctggagagatctttgtggtggacaggaacacagtggagatcacagagctgcctgtgaggacctggacccaggtgtacaaggagcaggtgctggagcccatgctgaatggaacagacaagaccccagccctgatcagtgactacaaggagtaccacacagacaccaccgtgaagtttgtggtgaagatgacagaggagaagctggcccaggccgaggccgccggcctgcacaaggtgttcaagctgcagaccaccctgacctgcaacagcatggtgctgtttgaccacatgggctgcctgaagaagtatgagaccgtgcaggacatcctgaaggagttctttgacctgcggctgagctactacggcctgaggaaggagtggctggtgggcatgctgggcgctgagagcaccaagctgaacaaccaggcccgcttcatcctggagaagatccagggcaagatcaccatcgagaacagaagcaagaaggacctgatccagatgctggtgcagaggggctatgaaagtgaccctgtgaaggcctggaaggaggcccaggagaaggctgctgaggaggatgagacccagaaccagcatgatgacagcagcagtgacagcggcacccccagcggccctgacttcaactacatcctgaacatgagcctgtggagcctgacctag

SEQ ID NO: 22211 - DNA, 4866 bp, synthetic construct
  misc_feature 1..4866: note = Description of Artificial Sequence: Synthetic coding sequence
  source 1..4866: mol_type = other DNA
atggccaagagcggcggctgtggggccggggccggcgtgggcggcggcaatggagccctgacctgggtgaacaatgctgccaagaaggaggagagcgagacagccaacaagaatgacagcagcaagaagctgtctgtggagcgggtgtaccagaagaagacccagctggagcacatcctgctgcggccagacacctacatcggctctgtggagcccctgacccagttcatgtgggtgtatgatgaagatgtgggcatgaactgccgggaggtgacctttgtgcccggcctgtacaagatctttgatgagatcctggtgaatgctgctgacaacaagcagagggacaagaacatgacctgcatcaaggtgtccattgatcctgagagcaacatcatcagcatctggaacaacgggaagggcatccctgtggtggagcacaaggtggagaaggtgtatgtgcctgccctgatcttcggccagctgctgaccagcagcaactatgatgatgatgagaagaaggtgactggaggaagaaatggctatggagccaagctgtgcaacatcttcagcaccaagttcaccgtggagacagcctgcaaggagtacaagcacagcttcaagcagacctggatgaacaacatgatgaagaccagcgaggccaagatcaagcactttgatggagaggactacacctgcatcaccttccagcctgacctgagcaagttcaagatggagaagctggacaaggacatcgtggccctgatgacccggcgggcctatgacctggccggcagctgccggggcgtgaaggtgatgttcaacgggaagaagctgcctgtgaatggcttccgctcctatgtggacctgtatgtgaaggacaagctggatgagaccggggtggccctgaaggtgatccacgagctggccaatgaacgctgggatgtgtgcctgaccctgtctgagaagggcttccagcagatcagctttgtgaacagcatcgccaccaccaagggcggcagacatgtggactatgtggtggaccaggtggtgggcaagctgattgaggtggtgaagaagaagaacaaggccggcgtgtctgtgaagcccttccaggtgaagaaccacatctgggtgttcatcaactgcctgattgagaaccccacctttgacagccagaccaaggagaacatgaccctgcagcccaagagctttggcagcaagtgccagctgtctgagaagttcttcaaggccgccagcaactgtggcatcgtggagagcatcctgaactgggtgaagttcaaggcccagacccagctgaacaagaagtgcagctctgtgaagtacagcaagatcaagggcatccccaagctggatgatgccaatgatgctgggggcaagcacagcctggagtgcaccctcatcctgacagaaggagacagcgccaagagcctggccgtgtctggcctgggcgtcatcggccgggacagatatggagtcttccccctgcggggcaagatcctgaatgtgcgggaggccagccacaagcagatcatggagaatgctgagatcaacaacatcatcaagatcgtgggcctgcagtacaagaagagctatgatgatgctgagagcctgaagaccctgcgctatggcaagatcatgatcatgacagaccaggaccaggacggcagccacatcaagggcctgctgatcaacttcatccaccacaactggcccagcctgctgaagcacggcttcctggaggagttcatcacccccatcgtgaaggccagcaagaacaagcaggagctgtccttctacagcatccctgagtttgatgagtggaagaagcacatcgagaaccagaaggcctggaagatcaagtactacaagggcctgggcaccagcacagccaaggaggccaaggagtactttgctgacatggagcggcaccgcatcctcttccgctatgccggcccagaagatgatgctgccatcaccctggccttcagcaagaagaagattgatgacaggaaggagtggctgaccaacttcatggaggaccggcggcagaggcggctgcacggcctgcctgagcagttcctgtatggaacagccaccaagcacctgacctacaatgacttcatcaacaaggagctgatcctcttcagcaacagcgacaatgaaagaagcatccccagcctggtggatggcttcaagccaggccagaggaaggtgctcttcacctgcttcaagagaaatgacaagcgggaggtgaaggtggcccagctggccggctctgtggccgagatgtctgcctaccaccacggggagcaggccctgatgatgaccatcgtgaacctggcccagaactttgtgggcagcaacaacatcaacctgctgcagcccatcggccagtttggcacccggctgcatggaggcaaggatgctgccagcccccgctacatcttcaccatgctgagcaccctggcccggctgctcttccctgctgtggatgacaacctgctgaagttcctgtatgatgacaaccagagggtggagcctgagtggtacatccccatcatccccatggtgctgatcaatggagctgagggcatcggcaccggctgggcctgcaagctgcccaactatgatgcccgggagatcgtgaacaacgtgcggaggatgctggatggcctggacccccaccccatgctgcccaactacaagaacttcaagggcaccatccaggagctgggccagaaccagtatgctgtgtctggagagatctttgtggtggacaggaacacagtggagatcacagagctgcctgtgaggacctggacccaggtgtacaaggagcaggtgctggagcccatgctgaatggaacagacaagaccccagccctgatcagtgactacaaggagtaccacacagacaccaccgtgaagtttgtggtgaagatgacagaggagaagctggcccaggccgaggccgccggcctgcacaaggtgttcaagctgcagaccaccctgacctgcaacagcatggtgctgtttgaccacatgggctgcctgaagaagtatgagaccgtgcaggacatcctgaaggagttctttgacctgcggctgagctactacggcctgaggaaggagtggctggtgggcatgctgggcgctgagagcaccaagctgaacaaccaggcccgcttcatcctggagaagatccagggcaagatcaccatcgagaacagaagcaagaaggacctgatccagatgctggtgcagaggggctatgaaagtgaccctgtgaaggcctggaaggaggcccaggagaaggctgctgaggaggatgagacccagaaccagcatgatgacagcagcagtgacagcggcacccccagcggccctgacttcaactacatcctgaacatgagcctgtggagcctgaccaaggagaaggtggaggagctgatcaagcagagagatgccaagggccgggaggtgaatgacctgaagaggaagagccccagcgacctgtggaaggaggacctggccgcctttgtggaggagctggacaaggtggagagccaggagcgggaggatgtgctggccggcatgtctgggaaggccatcaagggcaaggtgggcaagcccaaggtgaagaagctgcagctggaggagaccatgcccagcccctatggaagacgcatcatccctgagatcacagccatgaaggcagatgccagcaagaagctgctgaagaagaagaagggggacctggacacagctgctgtgaaggtggagtttgatgaggagttcagcggggcccctgtggagggcgctggggaggaggccctgaccccatctgtgcccatcaacaagggccccaagcccaagcgggagaagaaggagcccggcaccagggtgaggaagacccccaccagcagcggcaagcccagcgccaagaaggtgaagaagaggaacccctggagcgatgatgagagcaagtctgagagtgacctggaggagacagagcctgtggtgatcccccgggacagcctgctgcggcgggctgctgctgagcggcccaagtacacctttgacttcagcgaggaggaggatgatgatgctgatgatgatgatgatgacaacaatgacctggaggagctgaaggtgaaggccagccccatcaccaatgatggagaagatgaatttgtgcccagtgatggcctggacaaggatgagtacaccttcagccctgggaagagcaaggccaccccagagaagagcctgcatgacaagaagagccaggactttggaaacctcttctccttccccagctacagccagaagtcagaagatgacagcgccaagtttgacagcaatgaggaggacagcgccagcgtcttcagccccagctttggcctgaagcagacagacaaggtgcccagcaagacagtggccgccaagaagggcaagcccagcagtgacacagtgcccaagcccaagagggcccccaagcagaagaaggtggtggaggccgtgaacagcgacagcgacagcgagtttggcatccccaagaagaccaccacccccaagggcaagggccgcggggccaagaagaggaaggccagcggctctgaaaatgaaggagactacaaccctggcaggaagaccagcaagaccaccagcaagaagcccaagaagaccagctttgaccaggacagtgatgtggacatcttccccagcgacttccccacagagccccccagcctgcccaggacaggccgggccaggaaggaggtgaagtactttgctgagagtgatgaggaggaggatgatgtggactttgccatgttcaactag

SEQ ID NO: 22212 - DNA, 174 bp, synthetic construct
  misc_feature 1..174: note = Description of Artificial Sequence: Synthetic coding sequence
  source 1..174: mol_type = other DNA
accctgtttgaccagaacaatgctgccaagaaggaggagagcgagacagccaacaagaatgacagcagcaagaagctgtctgtggagcgggtgtaccagaagaagacccagctggagcacatcctgctgcggccagacacctacatcggctctgtggagcccctgacccagtag

SEQ ID NO: 22213 - DNA, 1437 bp, synthetic construct
  misc_feature 1..1437: note = Description of Artificial Sequence: Synthetic coding sequence
  source 1..1437: mol_type = other DNA
atgagcctgtggagcctgaccaaggagaaggtggaggagctgatcaagcagagagatgccaagggccgggaggtgaatgacctgaagaggaagagccccagcgacctgtggaaggaggacctggccgcctttgtggaggagctggacaaggtggagagccaggagagagaagatgtgctggccggcatgtctgggaaggccatcaagggcaaggtgggcaagcccaaggtgaagaagctgcagctggaggagaccatgcccagcccctacggccgccgcatcatccctgagatcacagccatgaaggcagatgccagcaagaagctgctgaagaagaagaagggggacctggacacagctgctgtgaaggtggagtttgatgaggagttcagcggggcccctgtggagggcgctggggaggaggccctgacccccagcgtgcccatcaacaagggccccaagcccaagcgggagaagaaggagcccggcaccagggtgaggaagacccccaccagcagcggcaagcccagcgccaagaaggtgaagaagaggaacccctggagcgatgatgagagcaagtctgagagtgacctggaggagacagagcctgtggtgatcccccgggacagcctgctgcggcgggctgctgctgagcggcccaagtacacctttgacttcagcgaggaggaggatgatgatgctgatgatgatgatgatgacaacaatgacctggaggagctgaaggtgaaggccagccccatcaccaatgatggagaagatgaatttgtgcccagtgatggcctggacaaggatgagtacaccttcagccctgggaagagcaaggccaccccagagaagagcctgcatgacaagaagagccaggactttggaaacctcttctccttccccagctacagccagaagtcagaagatgattctgccaagtttgacagcaatgaagaagattctgcctctgtgttcagccccagctttggcctgaagcagacagacaaggtgcccagcaagacagtggccgccaagaagggcaagcccagcagtgacacagtgcccaagcccaagagggcccccaagcagaagaaggtggtggaggccgtgaacagcgacagcgacagcgagtttggcatccccaagaagaccaccacccccaagggcaagggccgcggggccaagaagaggaaggccagcggctctgaaaatgaaggagactacaaccctggcaggaagaccagcaagaccaccagcaagaagcccaagaagaccagctttgaccaggacagtgatgtggacatcttccccagcgacttccccacagagccccccagcctgcccaggacaggccgggccaggaaggaggtgaagtactttgctgagagtgatgaggaggaggatgatgtggactttgccatgttcaactag

SEQ ID NO: 22214 - DNA, 1437 bp, synthetic construct; identical to SEQ ID NO: 22213
  misc_feature 1..1437: note = Description of Artificial Sequence: Synthetic coding sequence
  source 1..1437: mol_type = other DNA

SEQ ID NO: 22215 - DNA, 3006 bp, synthetic construct
  misc_feature 1..3006: note = Description of Artificial Sequence: Synthetic coding sequence
  source 1..3006: mol_type = other DNA
atgatcttccctgtggcccgctatgccctgcgctggctgcggcggccagaagatcgggccttcagccgggccgccatggagatggccctgcggggcgtgaggaaggtgctgtgtgtggccgagaagaatgatgctgccaagggcattgctgacctgctgagcaatggaaggatgagaagaagagagggcctgagcaagttcaacaagatctatgaatttgactaccacctgtatggccagaatgtgaccatggtgatgacctctgtgtctggccacctgctggcccatgacttccagatgcagttcaggaagtggcagagctgcaaccccctggtgctgtttgaggccgagattgagaagtactgcccagagaactttgtggacatcaagaagaccctggagcgggagacccggcagtgccaggccctggtgatctggacagactgtgaccgggagggggagaacatcggctttgagatcatccacgtgtgcaaggctgtgaagcccaacctgcaggtgctgcgggcccgcttcagcgagatcacccctcatgctgtgaggacagcctgtgagaacctgacagagccagaccagagggtgtctgatgctgtggatgtgcggcaggagctggacctgcgcatcggggccgccttcacccgcttccagaccctgcggctgcagaggatcttccctgaggtgctggccgagcagctgatctcctatggcagctgccagttccccaccctgggctttgtggtggagcgcttcaaggccatccaggcctttgtgcctgagatcttccaccgcatcaaggtgacccatgaccacaaggatggcatcgtggagttcaactggaagaggcacaggctcttcaaccacacagcctgcctggtgctgtaccagctgtgtgtggaggaccccatggccaccgtggtggaggtgcgcagcaagcccaagagcaagtggaggccccaggccctggacacagtggagctggagaagctggccagcaggaagctgcgcatcaatgccaaggagaccatgagaattgctgagaagctgtacacccagggctacatctcctaccccaggacagagaccaacatcttcccccgggacctgaacctgactgtgctggtggagcagcagaccccagacccccgctggggcgcctttgcccagagcatcctggagcggggcggccccaccccaagaaatggaaacaagagtgaccaggcccacccccccatccaccccaccaagtacaccaacaacctgcagggagatgagcagaggctgtatgagttcatcgtgcgccacttcctggcctgctgcagccaggatgcccagggccaggagaccaccgtggagattgacatcgcccaggagagatttgtggcccacggcctgatgatcctggccaggaactacctggatgtgtacccctatgaccactggagcgacaagatcctgcctgtgtatgagcagggcagccacttccagcccagcacagtggagatggtggatggagagaccagcccccccaagctgctgacagaagctgacctgattgccctgatggagaagcacggcatcggcacagatgccacccatgctgagcacatcgagaccatcaaggccaggatgtatgtgggcctgaccccagacaagcgcttcctgcccggccacctgggcatgggcctggtggagggctatgacagcatgggctatgagatgagcaagccagacctgcgggcagagctggaggccgacctgaagctgatctgtgatggcaagaaggacaagtttgtggtgctgcggcagcaggtgcagaagtacaagcaggtgttcatcgaggccgtggccaaggccaagaagctggatgaggccctggcccagtactttggaaatggaacagagctggcccagcaggaggacatctacccagccatgcctgagcccatcagaaaatgtccccagtgcaacaaggacatggtgctgaagaccaagaagaatggaggcttctacctgagctgcatgggcttccctgagtgccgctctgctgtgtggctgcctgacagcgtgctggaggccagccgggacagctctgtgtgccctgtgtgccagccccaccctgtgtaccgcctgaagctgaagttcaagaggggcagcctgccccccaccatgcccctggagtttgtgtgctgcattggaggctgtgatgacaccctgcgggagatcctggacctgcgcttcagcggcggccccccccgggccagccagcccagcggccgcctgcaggccaaccagagcctgaacaggatggacaacagccagcacccccagcctgctgacagccggcagacaggcagcagcaaggccctggcccagaccctgcccccacccacagctgctggggagagcaacagcgtgacctgcaactgtggccaggaggccgtgctgctgactgtgaggaaggagggccccaacagaggccggcagttcttcaagtgcaatggaggcagctgcaacttcttcctgtgggccgacagccccaaccctggggccggcggccccccagccctggcctaccggcccctgggcgccagcctgggctgccccccaggccctggcatccacctgggcggcttcggcaaccctggagatggcagcggcagcggcaccagctgcctgtgcagccagcccagcgtgaccaggacagtgcagaaggatggccccaacaagggccggcagttccacacctgtgccaagccccgggagcagcagtgtggcttcttccagtgggtggatgagaacacagcccctggcaccagcggggcccccagctggacaggagaccggggccgcaccctggagagcgaggcccggagcaagaggccccgggccagcagcagtgacatgggcagcacagccaagaagcccaggaagtgcagcctgtgccaccagcccggccacacccggcccttctgcccccagaacagatag

SEQ ID NO: 22216 - DNA, 1170 bp, synthetic construct
  misc_feature 1..1170: note = Description of Artificial Sequence: Synthetic coding sequence
  source 1..1170: mol_type = other DNA
tgaagccgggccgccatggagatggccctgcggggcgtgaggaaggtgctgtgtgtggccgagaagaatgatgctgccaagggcattgctgacctgctgagcaatggaaggatgagaagaagagagggcctgagcaagttcaacaagatctatgaatttgactaccacctgtatggccagaatgtgaccatggtgatgacctctgtgtctggccacctgctggcccatgacttccagatgcagttcaggaagtggcagagctgcaaccccctggtgctgtttgaggccgagattgagaagtactgcccagagaactttgtggacatcaagaagaccctggagcgggagacccggcagtgccaggccctggtgatctggacagactgtgaccgggagggggagaacatcggctttgagatcatccacgtgtgcaaggctgtgaagcccaacctgcaggtgctgcgggcccgcttcagcgagatcacccctcatgctgtgaggacagcctgtgagaacctgacagagccagaccagagggtgtctgatgctgtggatgtgcggcaggagctggacctgcgcatcggggccgccttcacccgcttccagaccctgcggctgcagaggatcttccctgaggtgctggccgagcagctgatctcctatggcagctgccagttccccaccctgggctttgtggtggagcgcttcaaggccatccaggcctttgtgcctgagatcttccaccgcatcaaggtgacccatgaccacaaggatggcatcgtggagttcaactggaagaggcacaggctcttcaaccacacagcctgcctggtgctgtaccagctgtgtgtggaggaccccatggccaccgtggtggaggtgcgcagcaagcccaagagcaagtggaggccccaggccctggacacagtggagctggagaagctggccagcaggaagctgcgcatcaatgccaaggagaccatgagaattgctgagaagctgtacacccagggctacatctcctaccccaggacagagaccaacatcttcccccgggacctgaacctgactgtgctggtggagcagcagaccccagacccccgctggggcgcctttgcccagagcatcctggagcggggcggccccaccccaagaaatggaaacaagtag

SEQ ID NO: 22217 - DNA, 1596 bp, synthetic construct
  misc_feature 1..1596: note = Description of Artificial Sequence: Synthetic coding sequence
  source 1..1596: mol_type = other DNA
atgatcctggccaggaactacctggatgtgtacccctatgaccactggagcgacaagatcctgcctgtgtatgagcagggcagccacttccagcccagcacagtggagatggtggatggagagaccagcccccccaagctgctgacagaagctgacctgattgccctgatggagaagcacggcatcggcacagatgccacccatgctgagcacatcgagaccatcaaggccaggatgtatgtgggcctgaccccagacaagcgcttcctgcccggccacctgggcatgggcctggtggagggctatgacagcatgggctatgagatgagcaagccagacctgcgggcagagctggaggccgacctgaagctgatctgtgatggcaagaaggacaagtttgtggtgctgcggcagcaggtgcagaagtacaagcaggtgttcatcgaggccgtggccaaggccaagaagctggatgaggccctggcccagtactttggaaatggaacagagctggcccagcaggaggacatctacccagccatgcctgagcccatcagaaaatgtccccagtgcaacaaggacatggtgctgaagaccaagaagaatggaggcttctacctgagctgcatgggcttccctgagtgccgctctgctgtgtggctgcctgacagcgtgctggaggccagccgggacagctctgtgtgccctgtgtgccagccccaccctgtgtaccgcctgaagctgaagttcaagaggggcagcctgccccccaccatgcccctggagtttgtgtgctgcattggaggctgtgatgacaccctgcgggagatcctggacctgcgcttcagcggcggccccccccgggccagccagcccagcggccgcctgcaggccaaccagagcctgaacaggatggacaacagccagcacccccagcctgctgacagccggcagacaggcagcagcaaggccctggcccagaccctgcccccacccacagctgctggggagagcaacagcgtgacctgcaactgtggccaggaggccgtgctgctgactgtgaggaaggagggccccaacagaggccggcagttcttcaagtgcaatggaggcagctgcaacttcttcctgtgggccgacagccccaaccctggggccggcggccccccagccctggcctaccggcccctgggcgccagcctgggctgccccccaggccctggcatccacctgggcggcttcggcaaccctggagatggcagcggcagcggcaccagctgcctgtgcagccagcccagcgtgaccaggacagtgcagaaggatggccccaacaagggccggcagttccacacctgtgccaagccccgggagcagcagtgtggcttcttccagtgggtggatgagaacacagcccctggcaccagcggggcccccagctggacaggagaccggggccgcaccctggagagcgaggcccggagcaagaggccccgggccagcagcagtgacatgggcagcacagccaagaagcccaggaagtgcagcctgtgccaccagcccggccacacccggcccttctgcccccagaacagatag

SEQ ID NO: 22218 - DNA, 2721 bp, synthetic construct
  misc_feature 1..2721: note = Description of Artificial Sequence: Synthetic coding sequence
  source 1..2721: mol_type = other DNA
atgaacctgatcatcatctgcatggcccggcagagctgcaaccccctggtgctgtttgaagctgagattgagaagtactgcccagaaaattttgtggacatcaagaagaccctggagcgggagacccggcagtgccaggccctggtgatctggacagactgtgaccgggagggagaaaatattggatttgagatcatccacgtgtgcaaggctgtgaagcccaacctgcaggtgctgcgggcccgcttcagcgagatcacccctcatgctgtgaggacagcctgtgagaacctgacagagccagaccagagggtgtctgatgctgtggatgtgcggcaggagctggacctgagaattggagctgccttcacccgcttccagaccctgcggctgcagaggatcttccctgaggtgctggccgagcagctgatctcctatggcagctgccagttccccaccctgggctttgtggtggagcgcttcaaggccatccaggcctttgtgcctgagatcttccaccgcatcaaggtgacccatgaccacaaggatggcatcgtggagttcaactggaagaggcacaggctcttcaaccacacagcctgcctggtgctgtaccagctgtgtgtggaggaccccatggccaccgtggtggaggtgcgcagcaagcccaagagcaagtggaggccccaggccctggacacagtggagctggagaagctggccagcaggaagctgcgcatcaatgccaaggagaccatgagaattgctgagaagctgtacacccagggctacatctcctaccccaggacagagaccaacatcttcccccgggacctgaacctgactgtgctggtggagcagcagaccccagacccccgctggggcgcctttgcccagagcatcctggagcggggcggccccaccccaagaaatggaaacaagagtgaccaggcccacccccccatccaccccaccaagtacaccaacaacctgcagggagatgagcagaggctgtatgagttcatcgtgcgccacttcctggcctgctgcagccaggatgcccagggccaggagaccaccgtggagattgatattgcccaggagagatttgtggcccacggcctgatgatcctggccaggaactacctggatgtgtacccctatgaccactggagcgacaagatcctgcctgtgtatgagcagggcagccacttccagcccagcacagtggagatggtggatggagagaccagcccccccaagctgctgacagaggccgacctgattgccctgatggagaagcatggaattggaacagatgccacccacgccgagcacatcgagaccatcaaggccaggatgtatgtgggcctgaccccagacaagcgcttcctgcccggccacctgggcatgggcctggtggagggctatgacagcatgggctatgagatgagcaagccagacctgcgggcagagctggaggccgacctgaagctgatctgtgatggcaagaaggacaagtttgtggtgctgcggcagcaggtgcagaagtacaagcaggtgttcattgaagctgtggccaaggccaagaagctggatgaggccctggcccagtactttggaaatggaacagagctggcccagcaggaggacatctacccagccatgcctgagcccatcaggaagtgcccccagtgcaacaaggacatggtgctgaagaccaagaagaatggaggcttctacctgagctgcatgggcttcccagaatgtagatctgctgtgtggctgcctgattctgtgctggaggccagccgggacagctctgtgtgccctgtgtgccagccccaccctgtgtaccgcctgaagctgaagttcaagaggggcagcctgccccccaccatgcccctggagtttgtgtgctgcatcggcggctgtgatgacaccctgcgggagatcctggacctgcgcttcagcggcggccccccccgggccagccagcccagcggccgcctgcaggccaaccagagcctgaacaggatggacaacagccagcacccccagcctgctgacagccggcagacaggcagcagcaaggccctggcccagaccctgcccccacccacagctgctggggagagcaacagcgtgacctgcaactgtggccaggaggccgtgctgctgactgtgaggaaggagggccccaacagaggccggcagttcttcaagtgcaatggaggcagctgcaacttcttcctgtgggccgacagccccaaccctggagctgggggccccccagccctggcctaccggcccctgggcgccagcctgggctgccccccaggccctggcatccacctgggcggctttggaaatcctggagatggcagcggcagcggcaccagctgcctgtgcagccagcccagcgtgaccaggacagtgcagaaggatggccccaacaagggccggcagttccacacctgtgccaagccccgggagcagcagtgtggcttcttccagtgggtggatgaaaatacagcccctggcaccagcggggcccccagctggacaggagaccggggccgcaccctggagagcgaggcccggagcaagaggccccgggccagcagcagtgacatgggcagcacagccaagaagcccaggaagtgcagcctgtgccaccagcccggccacacccggcccttctgcccccagaacagatag

SEQ ID NO: 22219 - DNA, 2589 bp, synthetic construct
  misc_feature 1..2589: note = Description of Artificial Sequence: Synthetic coding sequence
  source 1..2589: mol_type = other DNA
atgaagacagtgctgatggtggccgagaagcccagcctggcccagagcatcgccaagatcctgagccggggcagcctgagcagccacaagggcctgaatggagcctgcagcgtgcatgagtacacaggcacctttgctggccagcctgtgcgcttcaagatgacctctgtgtgtggccacgtgatgaccctggacttcctgggcaagtacaacaagtgggacaaggtggaccctgctgagctgttcagccaggcccccacagagaagaaggaggccaaccccaagctgaacatggtgaagttcctgcaggtggagggccggggctgtgactacatcgtgctgtggctggactgtgacaaggagggggagaacatctgctttgaggtgctggatgctgtgctgcctgtgatgaacaaggcccatggaggagagaagacagtgttccgggcccgcttcagcagcatcacagacacagacatctgcaatgccatggcctgcctgggggagccagaccacaatgaggccctgtctgtggatgcccggcaggagctggacctgcgcatcggctgtgccttcacccgcttccagaccaagtacttccagggcaagtacggggacctggacagcagcctcatcagctttggcccctgccagacccccaccctgggcttctgtgtggagagacatgacaagatccagagcttcaagccagagacctactgggtgctgcaggccaaggtgaacacagacaaggacaggagcctgctgctggactgggacagagtgcgggtgtttgaccgggagatcgcccagatgttcctgaacatgaccaagctggagaaggaggcccaggtggaggccaccagcaggaaggagaaggccaagcagaggcccctggccctgaacacagtggagatgctgcgggtggccagcagcagcctgggcatgggcccccagcacgccatgcagacagctgagcggctgtacacccagggctacatctcctaccccaggacagagaccacccactacccagagaactttgacctgaagggcagcctgcggcagcaggccaaccacccctactgggccgacacagtgaagaggctgctggccgagggcatcaaccggcccaggaagggccatgatgctggggaccacccccccatcacccccatgaagagcgccacagaagctgagctgggcggagatgcctggaggctgtatgagtacatcaccaggcacttcatcgccaccgtgtcccatgactgcaagtacctgcagagcaccatctccttcagaattggccctgagctgttcacctgcagcggcaagacagtgctgagccctggcttcacagaggtgatgccctggcagagcgtgcccctggaggagagcctgcccacctgccagagaggagatgccttccctgtgggggaggtgaagatgctggagaagcagaccaaccccccagactacctgacagaagctgagctgatcaccctgatggagaagcacggcatcggcacagatgccagcatccctgtgcacatcaacaacatctgccagaggaactacgtgacagtggagagcggccgccgcctgaagcccaccaacctgggcatcgtgctggtgcacggctactacaagattgatgctgagctggtgctgcccaccatccgctctgctgtggagaagcagctgaacctgattgcccagggcaaggctgactaccggcaggtgctgggccacaccctggatgtgttcaagaggaagttccactactttgtggacagcattgctggcatggatgagctgatggaggtgtccttcagccccctggccgccaccgggaagcccctgagccgctgtgggaagtgccaccgcttcatgaagtacatccaggccaagcccagccggctgcactgcagccactgtgatgagacctacaccctgccccagaatggcaccatcaagctgtacaaggagctgcgctgccccctggatgactttgagctggtgctgtggagcagcggcagccggggcaagagctaccccctgtgcccctactgctacaaccacccccccttccgggacatgaagaagggcatgggctgcaatgaatgtacccaccccagctgccagcacagcctgtccatgctgggcatcggccagtgtgtggagtgtgagagcggcgtgctggtgctggaccccaccagcggccccaagtggaaggtggcctgcaacaagtgcaatgtggtggcccactgctttgaaaatgcccaccgggtgcgggtgtctgctgacacctgcagcgtgtgtgaggccgccctgctggatgtggacttcaacaaggccaagagccccctgcctggagatgagacccagcacatgggctgtgtgttctgtgaccctgtgttccaggagctggtggagctgaagcacgccgccagctgccaccccatgcacagaggaggccctggaagacggcagggccggggccggggccgggcccggcggcccccaggcaagcccaacccccggcggcccaaggacaagatgtctgccctggccgcctactttgtgtag

SEQ ID NO: 22220 - DNA, 2589 bp, synthetic construct; identical to SEQ ID NO: 22219
  misc_feature 1..2589: note = Description of Artificial Sequence: Synthetic coding sequence
  source 1..2589: mol_type = other DNA

SEQ ID NO: 22221 - DNA, 849 bp, synthetic construct
  misc_feature 1..849: note = Description of Artificial Sequence: Synthetic coding sequence
  source 1..849: mol_type = other DNA
atgttcctgaacatgaccaagctggagaaggaggcccaggtggaggccaccagcaggaaggagaaggccaagcagaggcccctggccctgaacacagtggagatgctgcgggtggccagcagcagcctgggcatgggcccccagcacgccatgcagacagctgagcggctgtacacccagggctacatctcctaccccaggacagagaccacccactacccagaaaattttgacctgaagggcagcctgcggcagcaggccaaccacccctactgggccgacacagtgaagaggctgctggccgagggcatcaaccggcccaggaaaggacatgatgctggggaccacccccccatcacccccatgaagagcgccacagaggccgagctgggcggagatgcctggaggctgtatgagtacatcaccaggcacttcatcgccaccgtgtcccatgactgcaagtacctgcagagcaccatctccttccgcatcggccctgagctgttcacctgcagcggcaagacagtgctgagccctggcttcacagaggtgatgccctggcagagcgtgcccctggaggagagcctgcccacctgccagagaggagatgccttccctgtgggggaggtgaagatgctggagaagcagaccaaccccccagactacctgacagaggccgagctgatcaccctgatggagaagcatggaattggaggctgtgcctgccccggccccagggctggctctgtgagcagcacccaggccagcagcctgctgaccaagctgccccggcagccctgtgtgcccagccctgcccccctgcacggcctggtgtctggcaactggtag

SEQ ID NO: 22222 - DNA, 741 bp, synthetic construct
  misc_feature 1..741: note = Description of Artificial Sequence: Synthetic coding sequence
  source 1..741: mol_type = other DNA
atgaagacagtgctgatggtggccgagaagcccagcctggcccagagcatcgccaagatcctgagccggggcagcctgagcagccacaagggcctgaatggagcctgcagcgtgcatgagtacacaggcacctttgctggccagcctgtgcgcttcaagatgacctctgtgtgtggccacgtgatgaccctggacttcctgggcaagtacaacaagtgggacaaggtggaccctgctgagctgttcagccaggcccccacagagaagaaggaggccaaccccaagctgaacatggtgaagttcctgcaggtggagggccggggctgtgactacatcgtgctgtggctggactgtgacaaggagggggagaacatctgctttgaggtgctggatgctgtgctgcctgtgatgaacaaggcccatggaggagagaagacagtgttccgggcccgcttcagcagcatcacagacacagacatctgcaatgccatggcctgcctgggggagccagaccacaatgaggccctgtctgtggatgcccggcaggagctggacctgcgcatcggctgtgccttcacccgcttccagaccaagtacttccagggcaagtacggggacctggacagcagcctcatcagctttggcccctgccagacccccaccctgggcttctgtgtggagagacatgacaagatccagagcttcaagccagagacctactgggtgctgcaggccaagtag

SEQ ID NO: 22223 - DNA, 366 bp, synthetic construct
  misc_feature 1..366: note = Description of Artificial Sequence: Synthetic coding sequence
  source 1..366: mol_type = other DNA
atgaagacagtgctgatggtggccgagaagcccagcctggcccagagcatcgccaagatcctgagccggggcagcctgagcagccacaagggcctgaatggagcctgcagcgtgcatgagtacacaggcacctttgctggccagcctgtgcgcttcaagatgacctctgtgtgtggccacgtgatgaccctggacttcctgggcaagtacaacaagtgggacaaggtggaccctgctgagctgttcagccaggcccccacagagaagaaggaggccaaccccaagctgaacatggtgaagttcctgcaggtggagggccggggctgtgactacatcgtgctgtggctggactgtgacaaggagtag

SEQ ID NO: 22224 - DNA, 66 bp, synthetic construct
  misc_feature 1..66: note = Description of Artificial Sequence: Synthetic coding sequence
  source 1..66: mol_type = other DNA
atgaagacagtgctgatggtggccgagaagcccagcctggcccagagcatcgccaagatcctgtag

SEQ ID NO: 22225 - DNA, 129 bp, synthetic construct
  misc_feature 1..129: note = Description of Artificial Sequence: Synthetic coding sequence
  source 1..129: mol_type = other DNA
atgaagacagtgctgatggtggccgagaagcccagcctggcccagagcatcgccaagatcctgagccggggcagcctgagcagccacaagggcctgaatggagcctgcagcgtgcatgagtacacctag

SEQ ID NO: 22226 - DNA, 369 bp, synthetic construct
  misc_feature 1..369: note = Description of Artificial Sequence: Synthetic coding sequence
  source 1..369: mol_type = other DNA
atgaagacagtgctgatggtggccgagaagcccagcctggcccagagcatcgccaagatcctgagccggggcagcctgagcagccacaagggcctgaatggagcctgcagcgtgcatgagtacacaggcacctttgctggccagcctgtgcgcttcaagatgacctctgtgtgtggccacgtgatgaccctggacttcctgggcaagtacaacaagtgggacaaggtggaccctgctgagctgttcagccaggcccccacagagaagaaggaggccaaccccaagctgaacatggtgaagttcctgcaggtggagggccggggctgtgactacatcgtgctgtggctggactgtgacaaggagggctag

SEQ ID NO: 22227 - DNA, 144 bp, synthetic construct
  misc_feature 1..144: note = Description of Artificial Sequence: Synthetic coding sequence
  source 1..144: mol_type = other DNA
atgaagacagtgctgatggtggccgagaagcccagcctggcccagagcatcgccaagatcctgagccggggcagcctgagcagccacaagggcctgaatggagcctgcagcgtgcatgagtacacaggcacctttgctggatag

SEQ ID NO: 22228 - DNA, 399 bp, synthetic construct
  misc_feature 1..399: note = Description of Artificial Sequence: Synthetic coding sequence
  source 1..399: mol_type = other DNA
atgaagacagtgctgatggtggccgagaagcccagcctggcccagagcatcgccaagatcctgagccggggcagcctgagcagccacaagggcctgaatggagcctgcagcgtgcatgagtacacaggcacctttgctggccagcctgtgcgcttcaagatgacctctgtgtgtggccacgtgatgaccctggacttcctgggcaagtacaacaagtgggacaaggtggaccctgctgagctgttcagccaggcccccacagagaagaaggaggccaaccccaagctgccccaggcctctgtgtgcacccaggccgcccctggggtgcggccccacccctgccccccagctgctgcccgggtggccgacagagtggtgccctgtggccctgtgacctag

SEQ ID NO: 22229 - DNA, 183 bp, synthetic construct
  misc_feature 1..183: note = Description of Artificial Sequence: Synthetic coding sequence
  source 1..183: mol_type = other DNA
atgaagacagtgctgatggtggccgagaagcccagcctggcccagagcatcgccaagatcctgagccggggcagcctgagcagccacaagggcctgaatggagcctgcagcgtgcatgagtacacaggcacctttgctggccagcctgtgcgcttcaagatgacctctgtgtgtggccactag

SEQ ID NO: 22230 - DNA, 186 bp, synthetic construct
  misc_feature 1..186: note = Description of Artificial Sequence: Synthetic coding sequence
  source 1..186: mol_type = other DNA
atgaagacagtgctgatggtggccgagaagcccagcctggcccagagcatcgccaagatcctgagccggggcagcctgagcagccacaagggcctgaatggagcctgcagcgtgcatgagtacacaggcacctttgctggccagcctgtgcgcttcaagatgacctctgtgtgtggccacgtgtag

SEQ ID NO: 22231 - DNA, 1578 bp, synthetic construct
  misc_feature 1..1578: note = Description of Artificial Sequence: Synthetic coding sequence
  source 1..1578: mol_type = other DNA
tgactggacagcagcctcatcagctttggcccctgccagacccccaccctgggcttctgtgtggagagacatgacaagatccagagcttcaagccagagacctactgggtgctgcaggccaaggtgaacacagacaaggacaggagcctgctgctggactgggacagagtgcgggtgtttgaccgggagatcgcccagatgttcctgaacatgaccaagctggagaaggaggcccaggtggaggccaccagcaggaaggagaaggccaagcagaggcccctggccctgaacacagtggagatgctgcgggtggccagcagcagcctgggcatgggcccccagcacgccatgcagacagctgagcggctgtacacccagggctacatctcctaccccaggacagagaccacccactacccagaaaattttgacctgaagggcagcctgcggcagcaggccaaccacccctactgggccgacacagtgaagaggctgctggccgagggcatcaaccggcccaggaaaggacatgatgctggggaccacccccccatcacccccatgaagagcgccacagaggccgagctgggcggagatgcctggaggctgtatgagtacatcaccaggcacttcatcgccaccgtgtcccatgactgcaagtacctgcagagcaccatctccttccgcatcggccctgagctgttcacctgcagcggcaagacagtgctgagccctggcttcacagaggtgatgccctggcagagcgtgcccctggaggagagcctgcccacctgccagagaggagatgccttccctgtgggggaggtgaagatgctggagaagcagaccaaccccccagactacctgacagaggccgagctgatcaccctgatggagaagcatggaattggaacagatgccagcatccctgtgcacatcaacaacatctgccagagaaattatgtgacagtggagagcggccggcggctgaagcccaccaacctgggcatcgtgctggtgcacggctactacaagattgatgctgagctggtgctgcccaccatccgctctgctgtggagaagcagctgaacctgattgcccagggcaaggctgactaccggcaggtgctgggccacaccctggatgtgttcaagaggaagttccactactttgtggacagcattgctggcatggatgagctgatggaggtgtccttcagccccctggccgccaccgggaagcccctgagccgctgtgggaagtgccaccgcttcatgaagtacatccaggccaagcccagccggctgcactgcagccactgtgatgagacctacaccctgccccagaatggcaccatcaagctgtacaaggagctgcgctgccccctggatgactttgagctggtgctgtggagcagcggcagccggggcaagagctaccccctgtgcccctactgctacaaccacccccccttccgggacatgaagaagggagaatgtagccacagcctgctgagcacaggcagctgcagcctcttctctgtgcccaccccagccctgcaccaggccggcctgtag

SEQ ID NO: 22232 - DNA, 951 bp, synthetic construct
  misc_feature 1..951: note = Description of Artificial Sequence: Synthetic coding sequence
  source 1..951: mol_type = other DNA
atgtctgctgaggtggagaccagcgagggcgtggatgagagcgagaagaagaacagcggggccctggagaaggagaaccagatgaggatggctgacctgtctgagctgctgaaggagggcaccaaggaggcccatgacagagctgagaacacccagtttgtgaaggacttcctgaagggcaacatcaagaaggagctgttcaagctggccaccacagccctgtacttcacctacagcgccctggaggaggagatggagaggaacaaggaccacccagcctttgcccccctgtacttccccatggagctgcacaggaaggaggccctgaccaaggacatggagtacttctttggagagaactgggaggagcaggtgcagtgccccaaggccgcccagaagtatgtggagcgcatccactacatcggccagaatgaacctgagctgctggtggcccacgcctacacccgctacatgggagacctgagcggcggccaggtgctgaagaaggtggcccagagggccctgaagctgcccagcactggagagggcacccagttctacctgtttgaaaatgtggacaatgcccagcagttcaagcagctgtaccgggccaggatgaatgccctggacctgaacatgaagaccaaggagagaattgtggaggaggccaacaaggcctttgagtacaacatgcagatcttcaatgagctggaccaggccggcagcaccctggcccgggagaccctggaggatggcttccctgtgcatgatggaaaaggagacatgaggaagtgccccttctatgctgctgagcaggacaagggggccctggagggcagcagctgccccttcagaacagccatggctgtgctgaggaagcccagcctgcagttcatcctggccgccggcgtggccctggccgccggcctgctggcctggtactacatgtag

SEQ ID NO: 22233 - DNA, 1716 bp, synthetic construct
  misc_feature 1..1716: note = Description of Artificial Sequence: Synthetic coding sequence
  source 1..1716: mol_type = other DNA
atgaagtgccagcccaggtctggggcccggcgcatcgaggagcggctgcactacctgatcaccacctacctgaagtttggaaacaacaacaactacatgaacatggccgaggccaacaatgccttctttgctgccagcgagaccttccacacccccagcctgggagatgaggagtttgagatcccccccatcaccccacctcctgagagtgaccctgccctgggcatgccagatgtgctgctgcccttccaggccctgagtgaccccctgcccagccagggcagcgagttcaccccccagttccccccccagagcctggacctgcccagcatcaccatcagcaggaacctggtggagcaggatggagtgctgcacagcagcggcctgcacatggaccagagccacacccaggtgtcccagtaccggcaggaccccagcctcatcatgaggagcatcgtgcacatgacagatgctgcccggtctggagtgatgcccccagcccagctgaccaccatcaaccagagccagctgagcgcccagctgggcctgaacctgggcggggcctccatgccccacaccagccccagccccccagccagcaagagcgccacccccagccccagcagcagcatcaatgaggaggatgctgatgaggccaacagagccatcggggagaagagagctgccccagacagcggcaagaagcccaagacccccaagaagaagaagaagaaggaccccaatgagccccagaagcctgtgtctgcctatgccctcttcttccgggacacccaggccgccatcaagggccagaaccccaatgccacctttggagaggtgtccaagatcgtggcctccatgtgggacagcctgggggaggagcagaagcaggtgtacaagaggaagacagaagctgccaagaaggagtacctgaaggccctggccgcctaccgggccagcctggtgtccaaggctgctgctgagagcgctgaggcccagaccatccgctctgtgcagcagaccctggccagcaccaacctgaccagcagcctgctgctgaacacccccctgagccagcacggcaccgtgtctgccagcccccagaccctgcagcagagcctgcccaggagcatcgcccccaagcccctgaccatgaggctgcccatgaaccagatcgtgacctctgtgaccatcgccgccaacatgcccagcaacatcggggcccccctcatcagctccatgggcaccaccatggtgggcagcgcccccagcacccaggtgagccccagcgtgcagacccagcagcaccagatgcagctgcagcagcagcagcagcagcagcagcagcagatgcagcagatgcagcagcagcagctgcagcagcaccagatgcaccagcagatccagcagcagatgcagcagcagcacttccagcaccacatgcagcagcacctgcagcagcagcagcagcacctgcagcagcagatcaaccagcagcagctgcagcagcagctgcagcagaggctgcagctgcagcagctgcagcacatgcagcaccagagccagcccagcccccggcagcacagccctgtggccagccagatcaccagccccatcccagccatcggcagcccccagcctgccagccagcagcaccagagccagatccagagccagacccagacccaggtgctgagccaggtgtccatcttctag

SEQ ID NO: 22234 - DNA, 5817 bp, synthetic construct
  misc_feature 1..5817: note = Description of Artificial Sequence: Synthetic coding sequence
  source 1..5817: mol_type = other DNA
atgcagagcttccgggagcagagcagctaccacggcaaccagcagagctacccccaggaggtgcacggcagcagccggctggaggagttcagcccccggcaggcccagatgttccagaactttggaggcaccggcggcagcagcggcagcagcggcagcggcagcggcggcggcagaagaggagctgctgctgctgctgctgccatggccagcgagaccagcggccaccagggctaccagggcttcaggaaggaggccggggacttctactacatggccggcaacaaggaccctgtgaccaccggcaccccccagcccccccagaggcggcccagcggccctgtgcagagctatggccccccccagggcagcagctttggaaaccagtatggcagcgagggccacgtgggccagttccaggcccagcacagcggcctgggcggcgtgagccactaccagcaggactacacaggccccttcagccctggcagcgcccagtaccagcagcaggccagcagccagcagcagcagcagcaggtgcagcagctgcggcagcagctgtaccagagccaccagcccctgccccaggccaccggccagcctgccagcagcagcagccacctgcagcccatgcagaggcccagcaccctgcccagcagcgctgctggctaccagctgcgggtgggccagtttggccagcactaccagagcagcgccagcagcagcagcagcagcagcttccccagcccccagcgcttcagccagagcggccagagctatgatggcagctacaacgtgaatgccggcagccagtatgagggccacaacgtgggcagcaatgcccaggcctacggcacccagagcaactacagctaccagccccagagcatgaagaactttgagcaggccaagatcccccagggcacccagcagggccagcagcagcagcagccccagcagcagcagcaccccagccagcacgtgatgcagtacaccaatgctgccaccaagctgcccctgcagagccaggtgggccagtacaaccagcctgaggtgcctgtgcgcagccccatgcagttccaccagaacttcagccccatcagcaaccccagccctgctgcctctgtggtgcagagccccagctgcagcagcacccccagccccctgatgcagacaggagagaacctgcagtgtggccagggctctgtgcccatgggcagcaggaaccgcatcctgcagctgatgccccagctgagccccacccccagcatgatgcccagccccaacagccacgccgccggcttcaagggcttcggcctggagggcgtgcctgagaagaggctgacagatcctggcctgagcagcctgagcgccctgagcacccaggtggccaacctgcccaacacagtgcagcacatgctgctgagtgatgccctgaccccccagaagaagaccagcaagaggcccagcagcagcaagaaggctgacagctgcaccaacagcgagggcagcagccagcctgaggagcagctgaagagccccatggccgagagcctggatggcggctgcagcagcagcagcgaggaccagggcgagcgggtgcggcagctgagcggccagagcaccagcagtgacaccacctacaagggcggggccagcgagaaggccggcagcagccctgcccagggcgcccagaatgagcccccccggctgaatgccagccctgctgcccgggaggaggccaccagccctggggccaaggacatgcccctgagcagtgatggcaaccccaaggtgaatgagaagacagtgggcgtgattgtgtcccgggaggccatgacaggccgggtggagaagccaggcggccaggacaagggcagccaggaggatgatcctgctgccacccagaggcctcccagcaatggaggagccaaggagaccagccacgccagcctgccccagcctgagcccccaggcggcggcggcagcaagggcaacaagaatggagacaacaacagcaaccacaacggggagggcaatggccagagcggccacagcgctgctggccctggcttcaccagcaggacagagcccagcaagagccctggcagcctgcgctacagctacaaggacagctttggatctgctgtgcccagaaatgtgtctggcttcccccagtaccccaccggccaggagaagggggacttcaccggccatggagagaggaaaggaagaaatgagaagttccccagcctgctgcaggaggtgctgcagggctaccaccaccacccagaccggcgctacagccgcagcacccaggagcaccagggcatggccggcagcctggagggcaccacccggcccaacgtgctggtgtcccagaccaatgagctggccagccggggcctgctgaacaagagcatcggcagcctgctggagaacccccactggggcccctgggagaggaagagcagcagcacagcccctgagatgaagcagatcaacctgacagactaccccatccccaggaagtttgaaattgagccccagagcagcgcccacgagcccggcggcagcctgtctgaaagaagaagtgtcatctgtgacatcagccccctgcggcagatcgtgcgggaccccggggcccacagcctgggccacatgtctgctgacacccgcatcggcagaaatgaccggctgaaccccaccctgagccagagcgtcatcctgcccggcggcctggtgtccatggagaccaagctgaagagccagagcggccagatcaaggaggaggactttgagcagagcaagagccaggccagcttcaacaacaagaagagcggggaccactgccaccccccatccatcaagcatgagagctacagaggaaatgccagccctggagctgccacccatgacagcctgagtgactatggcccccaggacagccggcccacccccatgagaagagtgcccggccgggtgggcggccgggagggcatgaggggccgcagccccagccagtaccatgactttgctgagaagctgaagatgagccctggccgcagccggggccctggaggagacccccaccacatgaacccccacatgaccttcagcgagcgggccaacagaagcagcctgcacacccccttcagccccaacagcgagaccctggccagcgcctaccacgccaacacccgggcccacgcctacggggaccccaatgccggcctgaacagccagctgcactacaagaggcagatgtaccagcagcagcctgaggagtacaaggactggagcagcggcagcgcccagggcgtgattgctgctgcccagcaccggcaggagggccccaggaagagcccccggcagcagcagttcctggacagagtgcgcagccccctgaagaatgacaaggatggcatgatgtatggcccccctgtgggcacctaccatgaccccagcgcccaggaggccggccgctgcctgatgagcagtgatggcctgcccaacaagggcatggagctgaagcacggcagccagaagctgcaggagagctgctgggacctgagccggcagaccagccctgccaagagcagcggccccccaggcatgagcagccagaagagatatggcccccctcatgaaacagatggccacggcctggccgaggccacccagagcagcaagccaggctctgtgatgctgcggctgcccggccaggaggaccacagcagccagaaccccctcatcatgagaagaagagtgcgctccttcatcagccccatccccagcaagaggcagagccaggatgtgaagaacagcagcacagaagataaaggccgcctgctgcacagcagcaaggagggcgctgacaaggccttcaacagctatgcccacctgagccacagccaggacatcaagagcatccccaagagggacagcagcaaggacctgcccagcccagacagcaggaactgcccagctgtgaccctgaccagccctgccaagaccaagatcctgccccccaggaagggccggggcctgaagctggaggccatcgtgcagaagatcaccagccccaacatcagaagaagtgccagcagcaacagcgctgaggccggcggggacacagtgaccctggatgacatcctgagcctgaagagcggccccccagagggcggctctgtggccgtgcaggatgctgacatcgagaagaggaaaggagaggtggccagtgacctggtgtccccagccaaccaggagctgcacgtggagaagcccctgcccaggagcagcgaggagtggaggggctctgtggatgacaaggtgaagacagagacccatgctgagaccgtgacagctgggaaggagcccccaggggccatgaccagcaccaccagccagaagccaggcagcaaccagggccgcccagatggcagcctgggcggcacagcccccctcatcttcccagacagcaagaatgtgccccctgtgggcatcctggcccctgaggccaaccccaaggccgaggagaaggaaaatgacacagtgaccatcagccccaagcaggagggcttcccccccaagggctacttccccagcggcaagaagaagggccggcccatcggctctgtgaacaagcagaagaagcagcagcagcccccacctcctccaccccagcccccccagatccctgagggcagcgcagatggagagcccaagcccaagaagcagaggcagaggcgggagaggaggaagccaggggcccagcccaggaagaggaagaccaagcaggccgtgcccatcgtggagccccaggagcctgagatcaagctgaagtatgccacccagcccctggacaagacagatgccaagaacaagagcttctacccctacatccacgtggtgaacaagtgtgagctgggcgctgtgtgcaccatcatcaatgctgaggaggaggagcagaccaagctggtgcggggcaggaagggccagaggagcctgaccccaccacccagcagcacagagagcaaggccctgcctgccagcagcttcatgctgcagggccctgtggtgacagagagctctgtgatgggccacctggtgtgctgcctgtgtgggaagtgggccagctacagaaacatgggagacctgtttggccccttctacccccaggactatgctgccaccctgcccaagaaccccccacccaagagggccacagagatgcagagcaaggtgaaggtgcgccacaagagcgccagcaatggcagcaagacagacacagaggaggaggaggagcagcagcagcagcagaaggagcagaggagcctggccgcccacccccgcttcaagaggaggcacagaagtgaggactgtggcggcggccccaggagcctgagccggggcctgccctgcaagaaggccgccacagagggcagcagcgagaagacagtgctggacagcaagcccagcgtgcccaccaccagcgagggcggccctgagctggagctgcagatccctgagctgcccctggacagcaatgagttctgggtgcatgagggctgcatcctgtgggccaacggcatctacctggtgtgtggccgcctgtatggcctgcaggaggccctggagatcgcccgggagatgaagtgcagccactgccaggaggccggggccaccctgggctgctacaacaagggctgcagcttccgctaccactacccctgtgccattgatgctgactgcctgctgcacgaggagaacttctctgtgcgctgccccaagcacaaggtgcggctgtggaggtag

SEQ ID NO: 22235 - DNA, 5883 bp, synthetic construct
  misc_feature 1..5883: note = Description of Artificial Sequence: Synthetic coding sequence
  source 1..5883: mol_type = other DNA
atgcagagcttccgggagcagagcagctaccacggcaaccagcagagctacccccaggaggtgcacggcagcagccggctggaggagttcagcccccggcaggcccagatgttccagaactttggaggcaccggcggcagcagcggcagcagcggcagcggcagcggcggcggcagaagaggagctgctgctgctgctgctgccatggccagcgagaccagcggccaccagggctaccagggcttcaggaaggaggccggggacttctactacatggccggcaacaaggaccctgtgaccaccggcaccccccagcccccccagaggcggcccagcggccctgtgcagagctatggccccccccagggcagcagctttggaaaccagtatggcagcgagggccacgtgggccagttccaggcccagcacagcggcctgggcggcgtgagccactaccagcaggactacacaggccccttcagccctggcagcgcccagtaccagcagcaggccagcagccagcagcagcagcagcaggtgcagcagctgcggcagcagctgtaccagagccaccagcccctgccccaggccaccggccagcctgccagcagcagcagccacctgcagcccatgcagaggcccagcaccctgcccagcagcgctgctggctaccagctgcgggtgggccagtttggccagcactaccagagcagcgccagcagcagcagcagcagcagcttccccagcccccagcgcttcagccagagcggccagagctatgatggcagctacaacgtgaatgccggcagccagtatgagggccacaacgtgggcagcaatgcccaggcctacggcacccagagcaactacagctaccagccccagagcatgaagaactttgagcaggccaagatcccccagggcacccagcagggccagcagcagcagcagccccagcagcagcagcaccccagccagcacgtgatgcagtacaccaatgctgccaccaagctgcccctgcagagccaggtgggccagtacaaccagcctgaggtgcctgtgcgcagccccatgcagttccaccagaacttcagccccatcagcaaccccagccctgctgcctctgtggtgcagagccccagctgcagcagcacccccagccccctgatgcagacaggagagaacctgcagtgtggccagggctctgtgcccatgggcagcaggaaccgcatcctgcagctgatgccccagctgagccccacccccagcatgatgcccagccccaacagccacgccgccggcttcaagggcttcggcctggagggcgtgcctgagaagaggctgacagatcctggcctgagcagcctgagcgccctgagcacccaggtggccaacctgcccaacacagtgcagcacatgctgctgagtgatgccctgaccccccagaagaagaccagcaagaggcccagcagcagcaagaaggctgacagctgcaccaacagcgagggcagcagccagcctgaggagcagctgaagagccccatggccgagagcctggatggcggctgcagcagcagcagcgaggaccagggcgagcgggtgcggcagctgagcggccagagcaccagcagtgacaccacctacaagggcggggccagcgagaaggccggcagcagccctgcccagggcgcccagaatgagcccccccggctgaatgccagccctgctgcccgggaggaggccaccagccctggggccaaggacatgcccctgagcagtgatggcaaccccaaggtgaatgagaagacagtgggcgtgattgtgtcccgggaggccatgacaggccgggtggagaagccaggcggccaggacaagggcagccaggaggatgatcctgctgccacccagaggcctcccagcaatggaggagccaaggagaccagccacgccagcctgccccagcctgagcccccaggcggcggcggcagcaagggcaacaagaatggagacaacaacagcaaccacaacggggagggcaatggccagagcggccacagcgctgctggccctggcttcaccagcaggacagagcccagcaagagccctggcagcctgcgctacagctacaaggacagctttggatctgctgtgcccagaaatgtgtctggcttcccccagtaccccaccggccaggagaagggggacttcaccggccatggagagaggaaaggaagaaatgagaagttccccagcctgctgcaggaggtgctgcagggctaccaccaccacccagaccggcgctacagccgcagcacccaggagcaccagggcatggccggcagcctggagggcaccacccggcccaacgtgctggtgtcccagaccaatgagctggccagccggggcctgctgaacaagagcatcggcagcctgctggagaacccccactggggcccctgggagaggaagagcagcagcacagcccctgagatgaagcagatcaacctgacagactaccccatccccaggaagtttgaaattgagccccagagcagcgcccacgagcccggcggcagcctgtctgaaagaagaagtgtcatctgtgacatcagccccctgcggcagatcgtgcgggaccccggggcccacagcctgggccacatgtctgctgacacccgcatcggcagaaatgaccggctgaaccccaccctgagccagagcgtcatcctgcccggcggcctggtgtccatggagaccaagctgaagagccagagcggccagatcaaggaggaggactttgagcagagcaagagccaggccagcttcaacaacaagaagagcggggaccactgccaccccccatccatcaagcatgagagctacagaggaaatgccagccctggagctgccacccatgacagcctgagtgactatggcccccaggacagccggcccacccccatgagaagagtgcccggccgggtgggcggccgggagggcatgaggggccgcagccccagccagtaccatgactttgctgagaagctgaagatgagccctggccgcagccggggccctggaggagacccccaccacatgaacccccacatgaccttcagcgagcgggccaacagaagcagcctgcacacccccttcagccccaacagcgagaccctggccagcgcctaccacgccaacacccgggcccacgcctacggggaccccaatgccggcctgaacagccagctgcactacaagaggcagatgtaccagcagcagcctgaggagtacaaggactggagcagcggcagcgcccagggcgtgattgctgctgcccagcaccggcaggagggccccaggaagagcccccggcagcagcagttcctggacagagtgcgcagccccctgaagaatgacaaggatggcatgatgtatggcccccctgtgggcacctaccatgaccccagcgcccaggaggccggccgctgcctgatgagcagtgatggcctgcccaacaagggcatggagctgaagcacggcagccagaagctgcaggagagctgctgggacctgagccggcagaccagccctgccaagagcagcggccccccaggcatgagcagccagaagagatatggcccccctcatgaaacagatggccacggcctggccgaggccacccagagcagcaagccaggctctgtgatgctgcggctgcccggccaggaggaccacagcagccagaaccccctcatcatgagaagaagagtgcgctccttcatcagccccatccccagcaagaggcagagccaggatgtgaagaacagcagcacagaagataaaggccgcctgctgcacagcagcaaggagggcgctgacaaggccttcaacagctatgcccacctgagccacagccaggacatcaagagcatccccaagagggacagcagcaaggacctgcccagcccagacagcaggaactgcccagctgtgaccctgaccagccctgccaagaccaagatcctgccccccaggaagggccggggcctgaagctggaggccatcgtgcagaagatcaccagccccaacatcagaagaagtgccagcagcaacagcgctgaggccggcggggacacagtgaccctggatgacatcctgagcctgaagagcggccccccagagggcggctctgtggccgtgcaggatgctgacatcgagaagaggaaaggagaggtggccagtgacctggtgtccccagccaaccaggagctgcacgtggagaagcccctgcccaggagcagcgaggagtggaggggctctgtggatgacaaggtgaagacagagacccatgctgagaccgtgacagctgggaaggagcccccaggggccatgaccagcaccaccagccagaagccaggcagcaaccagggccgcccagatggcagcctgggcggcacagcccccctcatcttcccagacagcaagaatgtgccccctgtgggcatcctggcccctgaggccaaccccaaggccgaggagaaggaaaatgacacagtgaccatcagccccaagcaggagggcttcccccccaagggctacttccccagcggcaagaagaagggccggcccatcggctctgtgaacaagcagaagaagcagcagcagcccccacctcctccaccccagcccccccagatccctgagggcagcgcagatggagagcccaagcccaagaagcagaggcagaggcgggagaggaggaagccaggggcccagcccaggaagaggaagaccaagcaggccgtgcccatcgtggagccccaggagcctgagatcaagctgaagtatgccacccagcccctggacaagacagatgccaagaacaagagcttctacccctacatccacgtggtgaacaagtgtgagctgggcgctgtgtgcaccatcatcaatgctgaggaggaggagcagaccaagctggtgcggggcaggaagggccagaggagcctgaccccaccacccagcagcacagagagcaaggccctgcctgccagcagcttcatgctgcagggccctgtggtgacagagagctctgtgatgggccacctggtgtgctgcctgtgtgggaagtgggccagctacagaaacatgggagacctgtttggccccttctacccccaggactatgctgccaccctgcccaagaaccccccacccaagagggccacagagatgcagagcaaggtgaaggtgcgccacaagagcgccagcaatggcagcaagacagacacagaggaggaggaggagcagcagcagcagcagaaggagcagaggagcctggccgcccacccccgcttcaagaggaggcacagaagtgaggactgtggcggcggccccaggagcctgagccggggcctgccctgcaagaaggccgccacagagggcagcagcgagaagacagtgctggacagcaagcccagcgtgcccaccaccagcgagggcggccctgagctggagctgcagatccctgagctgcccctggacagcaatgagttctgggtgcatgagggctgcatcctgtgggccaacggcatctacctggtgtgtggccgcctgtatggcctgcaggaggccctggagatcgcccgggagatgaagtgcagccactgccaggaggccggggccaccctgggctgctacaacaagggctgcagcttccgctaccactacccctgtgccattgatgctgactgcctgctgcacgaggagaacttctctgtgcgctgccccaagcacaagccacccctgccctgccccctgccccccctgcagaacaagacagccaagggcagcctgagcacagagcagagcgagcggggctag

SEQ ID NO: 22236 - DNA, 540 bp, synthetic construct
  misc_feature 1..540: note = Description of Artificial Sequence: Synthetic coding sequence
  source 1..540: mol_type = other DNA
atgagcacaggcagcctgagtgatgtggaggacctgcaggaggtggagatgctggagtgtgatggcctgaagatggacagcaacaaggagtttgtgaccagcaatgaaagcacagaggagagcagcaactgtgaaaatggcagcccccagaagggccggggcggcctgggcaagaggaggaaggcccccaccaagaagagccccctgagcggcgtgtcccaggagggcaagcaggtgcagagaaatgctgccaatgcccgggagcgggccaggatgagggtgctgagcaaggccttcagccggctgaagaccaccctgccctgggtgcccccagacaccaagctgagcaagctggacaccctgcggctggccagcagctacatcgcccacctgcggcagatcctggccaatgacaagtatgaaaatggctacatccaccctgtgaacctgacctggcccttcatggtggccggcaagccagagagtgacctgaaggaggtggtgacagccagccggctgtgtggcaccacagccagctag

SEQ ID NO: 22237 - DNA, 540 bp, synthetic construct; identical to SEQ ID NO: 22236
  misc_feature 1..540: note = Description of Artificial Sequence: Synthetic coding sequence
  source 1..540: mol_type = other DNA

SEQ ID NO: 22238 - DNA, 1965 bp, synthetic construct
  misc_feature 1..1965: note = Description of Artificial Sequence: Synthetic coding sequence
  source 1..1965: mol_type = other DNA
atgaaccagccccagaggatggcccctgtgggcacagacaaggagctgagtgacctgctggacttctccatgatgttccccctgcctgtgaccaacgggaagggccgcccagccagcctggccggggcccagtttggaggcagcggcctggaggaccggcccagcagcggctcctggggcagcggggaccagagcagcagcagctttgaccccagcaggaccttcagcgagggcacccacttcacagagagccacagcagcctgagcagcagcaccttcctgggccctggcctgggcggcaagagcggggagcggggggcctatgccagctttggaagagatgctggggtgggcggcctgacccaggccggcttcctgtctggagagctggccctgaacagccctggccccctgagccccagcggcatgaagggcaccagccagtactaccccagctacagcggcagcagcagaagaagagctgctgatggcagcctggacacccagcccaagaaggtgaggaaggtgcccccaggcctgcccagctctgtgtacccacccagcagtggagaagattatggaagagatgccacagcctaccccagcgccaagacccccagcagcacctacccagcccccttctacgtggctgatggcagcctgcaccccagcgctgagctgtggagccccccaggccaggccggcttcggccccatgctgggcggcggcagcagccccctgcccctgcccccaggcagcggccctgtgggcagcagcggcagcagcagcacctttggaggcctgcaccagcacgagaggatgggctaccagctgcatggagctgaggtgaatggaggcctgcccagcgccagcagcttcagcagcgcccctggggccacctatggaggagtgagcagccacaccccacctgtgtctggagctgacagcctgctgggcagccggggcaccacagctggcagcagtggagatgccctgggcaaggccctggccagcatctacagcccagaccacagcagcaacaacttcagcagcagccccagcacccctgtgggcagcccccagggcctggccggcaccagccagtggccccgggccggggcccctggggccctgagccccagctatgatggcggcctgcacggcctgcagagcaagattgaggaccacctggatgaggccatccacgtgctgcggagccatgctgtgggcacagctggggacatgcacaccctgctgcccggccacggggccctggccagcggcttcaccggccccatgagcctgggcggcagacatgctggcctggtgggcggcagccacccagaagatggcctggccggcagcaccagcctgatgcacaaccacgccgccctgcccagccagcccggcaccctgcctgacctgagccggcccccagacagctacagcggcctgggccgggccggggccacagctgctgccagcgagatcaagcgggaggagaaggaggatgaggagaacaccagcgctgctgaccacagcgaggaggagaagaaggagctgaaggccccccgggcccggaccagcccagatgaagatgaagatgacctgctgcccccagagcagaaggccgagcgggagaaggagcggcgggtggccaacaatgcccgggagcggctgcgggtgcgggacatcaatgaggccttcaaggagctgggccgcatgtgccagctgcacctgaacagcgagaagccccagaccaagctgctgatcctgcaccaggccgtgtctgtcatcctgaacctggagcagcaggtgcgggagaggaacctgaaccccaaggccgcctgcctgaagaggcgggaggaggagaaggtgtctggagtggtgggggacccccagatggtgctgagcgccccccaccctggcctgtctgaggcccacaacccagctggccacatgtag

SEQ ID NO: 22239 - DNA, 1956 bp, synthetic construct
  misc_feature 1..1956: note = Description of Artificial Sequence: Synthetic coding sequence
  source 1..1956: mol_type = other DNA
atgaaccagccccagaggatggcccctgtgggcacagacaaggagctgagtgacctgctggacttctccatgatgttccccctgcctgtgaccaacgggaagggccgcccagccagcctggccggggcccagtttggaggcagcggcctggaggaccggcccagcagcggctcctggggcagcggggaccagagcagcagcagctttgaccccagcaggaccttcagcgagggcacccacttcacagagagccacagcagcctgagcagcagcaccttcctgggccctggcctgggcggcaagagcggggagcggggggcctatgccagctttggaagagatgctggggtgggcggcctgacccaggccggcttcctgtctggagagctggccctgaacagccctggccccctgagccccagcggcatgaagggcaccagccagtactaccccagctacagcggcagcagcagaagaagagctgctgatggcagcctggacacccagcccaagaaggtgaggaaggtgcccccaggcctgcccagctctgtgtacccacccagcagtggagaagattatggaagagatgccacagcctaccccagcgccaagacccccagcagcacctacccagcccccttctacgtggctgatggcagcctgcaccccagcgctgagctgtggagccccccaggccaggccggcttcggccccatgctgggcggcggcagcagccccctgcccctgcccccaggcagcggccctgtgggcagcagcggcagcagcagcacctttggaggcctgcaccagcacgagaggatgggctaccagctgcatggagctgaggtgaatggaggcctgcccagcgccagcagcttcagcagcgcccctggggccacctatggaggagtgagcagccacaccccacctgtgtctggagctgacagcctgctgggcagccggggcaccacagctggcagcagtggagatgccctgggcaaggccctggccagcatctacagcccagaccacagcagcaacaacttcagcagcagccccagcacccctgtgggcagcccccagggcctggccggcaccagccagtggccccgggccggggcccctggggccctgagccccagctatgatggcggcctgcacggcctgcagagcaagattgaggaccacctggatgaggccatccacgtgctgcggagccatgctgtgggcacagctggggacatgcacaccctgctgcccggccacggggccctggccagcggcttcaccggccccatgagcctgggcggcagacatgctggcctggtgggcggcagccacccagaagatggcctggccggcagcaccagcctgatgcacaaccacgccgccctgcccagccagcccggcaccctgcctgacctgagccggcccccagacagctacagcggcctgggccgggccggggccacagctgctgccagcgagatcaagcgggaggagaaggaggatgaggagaacaccagcgctgctgaccacagcgaggaggagaagaaggagctgaaggccccccgggcccggaccagcagcacagatgaggtgctgagcctggaggagaaggacctgcgggaccgggagaggaggatggccaacaatgcccgggagcgggtgcgggtgcgggacatcaatgaggccttccgggagctgggccgcatgtgccagatgcacctgaagagtgacaaggcccagaccaagctgctgatcctgcagcaggccgtgcaggtgatcctgggcctggagcagcaggtgcgggagaggaacctgaaccccaaggccgcctgcctgaagagaagagaggaggagaaggtgtctggagtggtgggggacccccagatggtgctgagcgccccccaccctggcctgtctgaggcccacaacccagctggccacatgtag

SEQ ID NO: 22240 - DNA, 1977 bp, synthetic construct
  misc_feature 1..1977: note = Description of Artificial Sequence: Synthetic coding sequence
  source 1..1977: mol_type = other DNA
atgaaccagccccagaggatggcccctgtgggcacagacaaggagctgagtgacctgctggacttctccatgatgttccccctgcctgtgaccaacgggaagggccgcccagccagcctggccggggcccagtttggaggcagcggcaagtctggagagcggggggcctatgccagctttggaagagatgctggggtgggcggcctgacccaggccggcttcctgagcggggagctggccctgaacagccctggccccctgagccccagcggcatgaagggcaccagccagtactaccccagctacagcggcagcagcagaagaagagctgctgatggcagcctggacacccagcccaagaaggtgaggaaggtgcccccaggcctgcccagctctgtgtacccacccagcagcggggaggactatggaagagatgccacagcctaccccagcgccaagacccccagcagcacctacccagcccccttctacgtggctgatggcagcctgcaccccagcgctgagctgtggagccccccaggccaggccggcttcggccccatgctgggcggcggcagcagccccctgcccctgcccccaggcagcggccctgtgggcagcagcggcagcagcagcaccttcggcggcctgcaccagcacgagaggatgggctaccagctgcacggggctgaggtgaatggaggcctgcccagcgccagcagcttcagcagcgcccctggggccacctacggcggcgtgagcagccacaccccacctgtgtctggagctgacagcctgctgggcagccggggcaccacagctggcagcagtggagatgccctgggcaaggccctggccagcatctacagcccagaccacagcagcaacaacttcagcagcagccccagcacccctgtgggcagcccccagggcctggccggcaccagccagtggcccagggctggggcccctggggccctgagccccagctatgatggcggcctgcacggcctgcagagcaagattgaggaccacctggatgaggccatccacgtgctgcggagccatgctgtgggcacagctggggacatgcacaccctgctgcccggccatggagccctggccagcggcttcaccggccccatgagcctgggcggcagacatgctggcctggtgggcggcagccacccagaagatggcctggccggcagcaccagcctgatgcacaaccacgccgccctgcccagccagcccggcaccctgcctgacctgagccggcccccagacagctacagcggcctgggccgggccggggccacagctgctgccagcgagatcaagcgggaggagaaggaggatgaggagaacaccagcgctgctgaccacagcgaggaggagaagaaggagctgaaggccccccgggcccggacccgctgccagcccacccccaggcacagcccccccagcccccaccaggatgcccacgtgcaccggccccacgcccacaggacccacacaggccggcccagcgctggccccaccctcttcccccagccccactgcctgcccctggcccccagccggcggcccccccacagcccagatgaagatgaagatgacctgctgcccccagagcagaaggccgagcgggagaaggagcggcgggtggccaacaatgcccgggagcggctgcgggtgcgggacatcaatgaggccttcaaggagctgggccgcatgtgccagctgcacctgaacagcgagaagccccagaccaagctgctgatcctgcaccaggccgtgtctgtcatcctgaacctggagcagcaggtgcgggagaggaacctgaaccccaaggccgcctgcctgaagaggcgggaggaggagaaggtgtctggagtggtgggggacccccagatggtgctgagcgccccccaccctggcctgtctgaggcccacaacccagctggccacatgtag

SEQ ID NO: 22241 - DNA, 1956 bp, synthetic construct; identical to SEQ ID NO: 22239
  misc_feature 1..1956: note = Description of Artificial Sequence: Synthetic coding sequence
  source 1..1956: mol_type = other DNA

SEQ ID NO: 22242 - DNA, 474 bp, synthetic construct
  misc_feature 1..474: note = Description of Artificial Sequence: Synthetic coding sequence
  source 1..474: mol_type = other DNA
atgggctaccagctgcacggggctgaggtgaatggaggcctgcccagcgccagcagcttcagcagcgcccctggggccacctacggcggcgtgagcagccacaccccacctgtgtctggagctgacagcctgctgggcagccggggcaccacagctggcagcagtggagatgccctgggcaaggccctggccagcatctacagcccagaccacagcagcaacaacttcagcagcagccccagcacccctgtgggcagcccccagggcctggccggcaccagccagtggcccagggctggggcccctggggccctgagccccagctatgatggcggcctgcacggcctggtgggcggcagccacccagaagatggcctggccggcagcaccagcctgatgcacaaccacgccgccctgcccagccagcccggcaccctgcctgacctgagccggcccccagacagctacagctag

SEQ ID NO: 22243 - DNA, 2016 bp, synthetic construct
  misc_feature 1..2016: note = Description of Artificial Sequence: Synthetic coding sequence
  source 1..2016: mol_type = other DNA
atgcaccaccagcagaggatggccgccctgggcacagacaaggagctgagtgacctgctggacttcagcgccatgttcagcccccctgtgagcagcggcaagaatggccccaccagcctggccagcggccacttcaccggcagcaatgtggaggacaggagcagcagcggctcctggggcaatggaggccaccccagccccagcagaaattatggagatggcaccccctatgaccacatgaccagccgggacctgggcagccatgacaacctgagccccccatttgtgaacagccgcatccagagcaagacagagcggggcagctacagcagctatggccgggagagcaacctgcagggctgccaccagcagagcctgctgggcggggacatggacatgggcaaccctggcaccctgagccccaccaagccaggcagccagtactaccagtacagcagcaacaacccccggcggcggcccctgcacagcagcgccatggaggtgcagaccaagaaggtgaggaaggtgcccccaggcctgcccagctctgtgtatgcccccagcgccagcacagctgactacaacagagacagccctggctaccccagcagcaagccagccaccagcaccttccccagcagcttcttcatgcaggacggccaccacagcagtgacccctggagcagcagcagcggcatgaaccagcccggctacgccggcatgctgggcaacagcagccacatcccccagagcagcagctactgcagcctgcacccccatgagcggctgagctaccccagccacagcagcgctgacatcaacagcagcctgccccccatgagcaccttccacaggagcggcaccaaccactacagcaccagcagctgcaccccaccagccaatggaacagacagcatcatggccaacagaggcagcggggctgctggcagcagccagacaggagatgccctgggcaaggccctggccagcatctacagcccagaccacaccaacaacagcttcagcagcaaccccagcacccctgtgggcagcccccccagcctgtctgctggaacagctgtgtggagcagaaatggaggccaggccagcagcagccccaactatgagggccccctgcacagcctgcagagcagaattgaagatcggctggagcggctggatgatgccatccacgtgctgagaaatcatgctgtgggccccagcacagccatgcctgggggccatggagacatgcacggcatcatcggccccagccacaatggagccatgggcggcctgggcagcggctatggaacaggcctgctgagcgccaacagacacagcctgatggtgggcacccaccgggaggatggagtggccctgcggggcagccacagcctgctgcccaaccaggtgcctgtgccccagctgcctgtgcagagcgccaccagcccagacctgaaccccccccaggacccctaccggggcatgcctcctggcctgcagggccagagcgtgagcagcggcagcagcgagatcaagagtgatgatgaaggagatgagaacctgcaggacaccaagagcagcgaggacaagaagctggatgatgacaagaaggacatcaagagcatcaccaggagccgcagcagcaacaatgatgatgaggacctgaccccagagcagaaggccgagcgggagaaggagaggaggatggccaacaatgcccgggagcggctgcgggtgcgggacatcaatgaggccttcaaggagctgggccgcatggtgcagctgcacctgaagagtgacaagccccagaccaagctgctgatcctgcaccaggccgtggccgtcatcctgagcctggagcagcaggtgcgggagaggaacctgaaccccaaggccgcctgcctgaagagaagagaggaggagaaggtgtcctctgagcccccacccctgagcctggccggcccccaccctggcatgggagatgccagcaaccacatgggccagatgtag

SEQ ID NO: 22244 - DNA, 2004 bp, synthetic construct
  misc_feature 1..2004: note = Description of Artificial Sequence: Synthetic coding sequence
  source 1..2004: mol_type = other DNA
atgcaccaccagcagaggatggccgccctgggcacagacaaggagctgagtgacctgctggacttcagcgccatgttcagcccccctgtgagcagcggcaagaatggccccaccagcctggccagcggccacttcaccggcagcaatgtggaggacaggagcagcagcggctcctggggcaatggaggccaccccagccccagcagaaattatggagatggcaccccctatgaccacatgaccagccgggacctgggcagccatgacaacctgagccccccatttgtgaacagccgcatccagagcaagacagagcggggcagctacagcagctatggccgggagagcaacctgcagggctgccaccagcagagcctgctgggcggggacatggacatgggcaaccctggcaccctgagccccaccaagccaggcagccagtactaccagtacagcagcaacaacccccggcggcggcccctgcacagcagcgccatggaggtgcagaccaagaaggtgaggaaggtgcccccaggcctgcccagctctgtgtatgcccccagcgccagcacagctgactacaacagagacagccctggctaccccagcagcaagccagccaccagcaccttccccagcagcttcttcatgcaggacggccaccacagcagtgacccctggagcagcagcagcggcatgaaccagcccggctacgccggcatgctgggcaacagcagccacatcccccagagcagcagctactgcagcctgcacccccatgagcggctgagctaccccagccacagcagcgctgacatcaacagcagcctgccccccatgagcaccttccacaggagcggcaccaaccactacagcaccagcagctgcaccccaccagccaatggaacagacagcatcatggccaacagaggcagcggggctgctggcagcagccagacaggagatgccctgggcaaggccctggccagcatctacagcccagaccacaccaacaacagcttcagcagcaaccccagcacccctgtgggcagcccccccagcctgtctgctggaacagctgtgtggagcagaaatggaggccaggccagcagcagccccaactatgagggccccctgcacagcctgcagagcagaattgaagatcggctggagcggctggatgatgccatccacgtgctgagaaatcatgctgtgggccccagcacagccatgcctgggggccatggagacatgcacggcatcatcggccccagccacaatggagccatgggcggcctgggcagcggctatggaacaggcctgctgagcgccaacagacacagcctgatggtgggcacccaccgggaggatggagtggccctgcggggcagccacagcctgctgcccaaccaggtgcctgtgccccagctgcctgtgcagagcgccaccagcccagacctgaaccccccccaggacccctaccggggcatgcctcctggcctgcagggccagagcgtgagcagcggcagcagcgagatcaagagtgatgatgaaggagatgagaacctgcaggacaccaagagcagcgaggacaagaagctggatgatgacaagaaggacatcaagagcatcaccagcaacaatgatgatgaggacctgaccccagagcagaaggccgagcgggagaaggagaggaggatggccaacaatgcccgggagcggctgcgggtgcgggacatcaatgaggccttcaaggagctgggccgcatggtgcagctgcacctgaagagtgacaagccccagaccaagctgctgatcctgcaccaggccgtggccgtcatcctgagcctggagcagcaggtgcgggagaggaacctgaaccccaaggccgcctgcctgaagagaagagaggaggagaaggtgtcctctgagcccccacccctgagcctggccggcccccaccctggcatgggagatgccagcaaccacatgggccagatgtag

SEQ ID NO: 22245 - DNA, 2322 bp, synthetic construct
  misc_feature 1..2322: note = Description of Artificial Sequence: Synthetic coding sequence
  source 1..2322: mol_type = other DNA
atgttcagcaagaggctggagaagatcgcccaggtgcccctgctcttccccttcatcttcatcatcctgaccaactacagcaagatggagggcgctgtggagagccagcccagcttcttcaagaccagccaggacatcgtgacctgcacctgggtggagaactgctacagcagcttcagcagaagacccctggagcagatgttctgcaagcaccagagcaagaacatcatctcctggacaggcatggtggcccacacctgcaaccccagcaccctgggcggccagggcctgtgtgactttgccaagatgcaccaccagcagaggatggccgccctgggcacagacaaggagctgagtgacctgctggacttcagcgccatgttcagcccccctgtgagcagcggcaagaatggccccaccagcctggccagcggccacttcaccggcagcaatgtggaggacaggagcagcagcggctcctggggcaatggaggccaccccagccccagcagaaattatggagatggcaccccctatgaccacatgaccagccgggacctgggcagccatgacaacctgagccccccatttgtgaacagccgcatccagagcaagacagagcggggcagctacagcagctatggccgggagagcaacctgcagggctgccaccagcagagcctgctgggcggggacatggacatgggcaaccctggcaccctgagccccaccaagccaggcagccagtactaccagtacagcagcaacaacccccggcggcggcccctgcacagcagcgccatggaggtgcagaccaagaaggtgaggaaggtgcccccaggcctgcccagctctgtgtatgcccccagcgccagcacagctgactacaacagagacagccctggctaccccagcagcaagccagccaccagcaccttccccagcagcttcttcatgcaggacggccaccacagcagtgacccctggagcagcagcagcggcatgaaccagcccggctacgccggcatgctgggcaacagcagccacatcccccagagcagcagctactgcagcctgcacccccatgagcggctgagctaccccagccacagcagcgctgacatcaacagcagcctgccccccatgagcaccttccacaggagcggcaccaaccactacagcaccagcagctgcaccccaccagccaatggaacagacagcatcatggccaacagaggcagcggggctgctggcagcagccagacaggagatgccctgggcaaggccctggccagcatctacagcccagaccacaccaacaacagcttcagcagcaaccccagcacccctgtgggcagcccccccagcctgtctgctggaacagctgtgtggagcagaaatggaggccaggccagcagcagccccaactatgagggccccctgcacagcctgcagagcagaattgaagatcggctggagcggctggatgatgccatccacgtgctgagaaatcatgctgtgggccccagcacagccatgcctgggggccatggagacatgcacggcatcatcggccccagccacaatggagccatgggcggcctgggcagcggctatggaacaggcctgctgagcgccaacagacacagcctgatggtgggcacccaccgggaggatggagtggccctgcggggcagccacagcctgctgcccaaccaggtgcctgtgccccagctgcctgtgcagagcgccaccagcccagacctgaaccccccccaggacccctaccggggcatgcctcctggcctgcagggccagagcgtgagcagcggcagcagcgagatcaagagtgatgatgaaggagatgagaacctgcaggacaccaagagcagcgaggacaagaagctggatgatgacaagaaggacatcaagagcatcaccaggagccgcagcagcaacaatgatgatgaggacctgaccccagagcagaaggccgagcgggagaaggagaggaggatggccaacaatgcccgggagcggctgcgggtgcgggacatcaatgaggccttcaaggagctgggccgcatggtgcagctgcacctgaagagtgacaagccccagaccaagctgctgatcctgcaccaggccgtggccgtcatcctgagcctggagcagcaggtgcgggagaggaacctgaaccccaaggccgcctgcctgaagagaagagaggaggagaaggtgtcctctgagcccccacccctgagcctggccggcccccaccctggcatgggagatgccagcaaccacatgggccagatgtag

SEQ ID NO: 22246 - DNA, 1536 bp, synthetic construct
  misc_feature 1..1536: note = Description of Artificial Sequence: Synthetic coding sequence
  source 1..1536: mol_type = other DNA
atgtactgtgcctacaccatccctggcatgggcggcaacagcctgatgtactactacaacgggaaggctgtgtatgcccccagcgccagcacagctgactacaacagagacagccctggctaccccagcagcaagccagccaccagcaccttccccagcagcttcttcatgcaggacggccaccacagcagtgacccctggagcagcagcagcggcatgaaccagcccggctacgccggcatgctgggcaacagcagccacatcccccagagcagcagctactgcagcctgcacccccatgagcggctgagctaccccagccacagcagcgctgacatcaacagcagcctgccccccatgagcaccttccacaggagcggcaccaaccactacagcaccagcagctgcaccccaccagccaatggaacagacagcatcatggccaacagaggcagcggggctgctggcagcagccagacaggagatgccctgggcaaggccctggccagcatctacagcccagaccacaccaacaacagcttcagcagcaaccccagcacccctgtgggcagcccccccagcctgtctgctggaacagctgtgtggagcagaaatggaggccaggccagcagcagccccaactatgagggccccctgcacagcctgcagagcagaattgaagatcggctggagcggctggatgatgccatccacgtgctgagaaatcatgctgtgggccccagcacagccatgcctgggggccatggagacatgcacggcatcatcggccccagccacaatggagccatgggcggcctgggcagcggctatggaacaggcctgctgagcgccaacagacacagcctgatggtgggcacccaccgggaggatggagtggccctgcggggcagccacagcctgctgcccaaccaggtgcctgtgccccagctgcctgtgcagagcgccaccagcccagacctgaaccccccccaggacccctaccggggcatgcctcctggcctgcagggccagagcgtgagcagcggcagcagcgagatcaagagtgatgatgaaggagatgagaacctgcaggacaccaagagcagcgaggacaagaagctggatgatgacaagaaggacatcaagagcatcaccaggagccgcagcagcaacaatgatgatgaggacctgaccccagagcagaaggccgagcgggagaaggagaggaggatggccaacaatgcccgggagcggctgcgggtgcgggacatcaatgaggccttcaaggagctgggccgcatggtgcagctgcacctgaagagtgacaagccccagaccaagctgctgatcctgcaccaggccgtggccgtcatcctgagcctggagcagcaggtgcgggagaggaacctgaaccccaaggccgcctgcctgaagagaagagaggaggagaaggtgtcctctgagcccccacccctgagcctggccggcccccaccctggcatgggagatgccagcaaccacatgggccagatgtag

SEQ ID NO: 22247 - DNA, 1944 bp, synthetic construct
  misc_feature 1..1944: note = Description of Artificial Sequence: Synthetic coding sequence
  source 1..1944: mol_type = other DNA
atgttcagcccccctgtgagcagcggcaagaatggccccaccagcctggccagcggccacttcaccggcagcaatgtggaggacaggagcagcagcggctcctggggcaatggaggccaccccagccccagcagaaattatggagatggcaccccctatgaccacatgaccagccgggacctgggcagccatgacaacctgagccccccatttgtgaacagccgcatccagagcaagacagagcggggcagctacagcagctatggccgggagagcaacctgcagggctgccaccagcagagcctgctgggcggggacatggacatgggcaaccctggcaccctgagccccaccaagccaggcagccagtactaccagtacagcagcaacaacccccggcggcggcccctgcacagcagcgccatggaggtgcagaccaagaaggtgaggaaggtgcccccaggcctgcccagctctgtgtatgcccccagcgccagcacagctgactacaacagagacagccctggctaccccagcagcaagccagccaccagcaccttccccagcagcttcttcatgcaggacggccaccacagcagtgacccctggagcagcagcagcggcatgaaccagcccggctacgccggcatgctgggcaacagcagccacatcccccagagcagcagctactgcagcctgcacccccatgagcggctgagctaccccagccacagcagcgctgacatcaacagcagcctgccccccatgagcaccttccacaggagcggcaccaaccactacagcaccagcagctgcaccccaccagccaatggaacagacagcatcatggccaacagaggcagcggggctgctggcagcagccagacaggagatgccctgggcaaggccctggccagcatctacagcccagaccacaccaacaacagcttcagcagcaaccccagcacccctgtgggcagcccccccagcctgtctgctggaacagctgtgtggagcagaaatggaggccaggccagcagcagccccaactatgagggccccctgcacagcctgcagagcagaattgaagatcggctggagcggctggatgatgccatccacgtgctgagaaatcatgctgtgggccccagcacagccatgcctgggggccatggagacatgcacggcatcatcggccccagccacaatggagccatgggcggcctgggcagcggctatggaacaggcctgctgagcgccaacagacacagcctgatggtgggcacccaccgggaggatggagtggccctgcggggcagccacagcctgctgcccaaccaggtgcctgtgccccagctgcctgtgcagagcgccaccagcccagacctgaaccccccccaggacccctaccggggcatgcctcctggcctgcagggccagagcgtgagcagcggcagcagcgagatcaagagtgatgatgaaggagatgagaacctgcaggacaccaagagcagcgaggacaagaagctggatgatgacaagaaggacatcaagagcatcaccaggagccgcagcagcaacaatgatgatgaggacctgaccccagagcagaaggccgagcgggagaaggagaggaggatggccaacaatgcccgggagcggctgcgggtgcgggacatcaatgaggccttcaaggagctgggccgcatggtgcagctgcacctgaagagtgacaagccccagaccaagctgctgatcctgcaccaggccgtggccgtcatcctgagcctggagcagcaggtgcgggagaggaacctgaaccccaaggccgcctgcctgaagagaagagaggaggagaaggtgtcctctgagcccccacccctgagcctggccggcccccaccctggcatgggagatgccagcaaccacatgggccagatgtag

SEQ ID NO: 22248 - DNA, 1614 bp, synthetic construct
  misc_feature 1..1614: note = Description of Artificial Sequence: Synthetic coding sequence
  source 1..1614: mol_type = other DNA
atggacatgggcaaccctggcaccctgagccccaccaagccaggcagccagtactaccagtacagcagcaacaacccccggcggcggcccctgcacagcagcgccatggaggtgcagaccaagaaggtgaggaaggtgcccccaggcctgcccagctctgtgtatgcccccagcgccagcacagctgactacaacagagacagccctggctaccccagcagcaagccagccaccagcaccttccccagcagcttcttcatgcaggacggccaccacagcagtgacccctggagcagcagcagcggcatgaaccagcccggctacgccggcatgctgggcaacagcagccacatcccccagagcagcagctactgcagcctgcacccccatgagcggctgagctaccccagccacagcagcgctgacatcaacagcagcctgccccccatgagcaccttccacaggagcggcaccaaccactacagcaccagcagctgcaccccaccagccaatggaacagacagcatcatggccaacagaggcagcggggctgctggcagcagccagacaggagatgccctgggcaaggccctggccagcatctacagcccagaccacaccaacaacagcttcagcagcaaccccagcacccctgtgggcagcccccccagcctgtctgctggaacagctgtgtggagcagaaatggaggccaggccagcagcagccccaactatgagggccccctgcacagcctgcagagcagaattgaagatcggctggagcggctggatgatgccatccacgtgctgagaaatcatgctgtgggccccagcacagccatgcctgggggccatggagacatgcacggcatcatcggccccagccacaatggagccatgggcggcctgggcagcggctatggaacaggcctgctgagcgccaacagacacagcctgatggtgggcacccaccgggaggatggagtggccctgcggggcagccacagcctgctgcccaaccaggtgcctgtgccccagctgcctgtgcagagcgccaccagcccagacctgaaccccccccaggacccctaccggggcatgcctcctggcctgcagggccagagcgtgagcagcggcagcagcgagatcaagagtgatgatgaaggagatgagaacctgcaggacaccaagagcagcgaggacaagaagctggatgatgacaagaaggacatcaagagcatcaccagcaacaatgatgatgaggacctgaccccagagcagaaggccgagcgggagaaggagaggaggatggccaacaatgcccgggagcggctgcgggtgcgggacatcaatgaggccttcaaggagctgggccgcatggtgcagctgcacctgaagagtgacaagccccagaccaagctgctgatcctgcaccaggccgtggccgtcatcctgagcctggagcagcaggtgcgggagaggaacctgaaccccaaggccgcctgcctgaagagaagagaggaggagaaggtgtcctctgagcccccacccctgagcctggccggcccccaccctggcatgggagatgccagcaaccacatgggccagatgtag

SEQ ID NO: 22249 - DNA, 1932 bp, synthetic construct
  misc_feature 1..1932: note = Description of Artificial Sequence: Synthetic coding sequence
  source 1..1932: mol_type = other DNA
atgttcagcccccctgtgagcagcggcaagaatggccccaccagcctggccagcggccacttcaccggcagcaatgtggaggacaggagcagcagcggctcctggggcaatggaggccaccccagccccagcagaaattatggagatggcaccccctatgaccacatgaccagccgggacctgggcagccatgacaacctgagccccccatttgtgaacagccgcatccagagcaagacagagcggggcagctacagcagctatggccgggagagcaacctgcagggctgccaccagcagagcctgctgggcggggacatggacatgggcaaccctggcaccctgagccccaccaagccaggcagccagtactaccagtacagcagcaacaacccccggcggcggcccctgcacagcagcgccatggaggtgcagaccaagaaggtgaggaaggtgcccccaggcctgcccagctctgtgtatgcccccagcgccagcacagctgactacaacagagacagccctggctaccccagcagcaagccagccaccagcaccttccccagcagcttcttcatgcaggacggccaccacagcagtgacccctggagcagcagcagcggcatgaaccagcccggctacgccggcatgctgggcaacagcagccacatcccccagagcagcagctactgcagcctgcacccccatgagcggctgagctaccccagccacagcagcgctgacatcaacagcagcctgccccccatgagcaccttccacaggagcggcaccaaccactacagcaccagcagctgcaccccaccagccaatggaacagacagcatcatggccaacagaggcagcggggctgctggcagcagccagacaggagatgccctgggcaaggccctggccagcatctacagcccagaccacaccaacaacagcttcagcagcaaccccagcacccctgtgggcagcccccccagcctgtctgctggaacagctgtgtggagcagaaatggaggccaggccagcagcagccccaactatgagggccccctgcacagcctgcagagcagaattgaagatcggctggagcggctggatgatgccatccacgtgctgagaaatcatgctgtgggccccagcacagccatgcctgggggccatggagacatgcacggcatcatcggccccagccacaatggagccatgggcggcctgggcagcggctatggaacaggcctgctgagcgccaacagacacagcctgatggtgggcacccaccgggaggatggagtggccctgcggggcagccacagcctgctgcccaaccaggtgcctgtgccccagctgcctgtgcagagcgccaccagcccagacctgaaccccccccaggacccctaccggggcatgcctcctggcctgcagggccagagcgtgagcagcggcagcagcgagatcaagagtgatgatgaaggagatgagaacctgcaggacaccaagagcagcgaggacaagaagctggatgatgacaagaaggacatcaagagcatcaccagcaacaatgatgatgaggacctgaccccagagcagaaggccgagcgggagaaggagaggaggatggccaacaatgcccgggagcggctgcgggtgcgggacatcaatgaggccttcaaggagctgggccgcatggtgcagctgcacctgaagagtgacaagccccagaccaagctgctgatcctgcaccaggccgtggccgtcatcctgagcctggagcagcaggtgcgggagaggaacctgaaccccaaggccgcctgcctgaagagaagagaggaggagaaggtgtcctctgagcccccacccctgagcctggccggcccccaccctggcatgggagatgccagcaaccacatgggccagatgtag

SEQ ID NO: 22250 - DNA, 1878 bp, synthetic construct
  misc_feature 1..1878: note = Description of Artificial Sequence: Synthetic coding sequence
  source 1..1878: mol_type = other DNA
atggaggaggacagcagagatgtggaggacaggagcagcagcggctcctggggcaatggaggccaccccagccccagcagaaattatggagatggcaccccctatgaccacatgaccagccgggacctgggcagccatgacaacctgagccccccatttgtgaacagccgcatccagagcaagacagagcggggcagctacagcagctatggccgggagagcaacctgcagggctgccaccagcagagcctgctgggcggggacatggacatgggcaaccctggcaccctgagccccaccaagccaggcagccagtactaccagtacagcagcaacaacccccggcggcggcccctgcacagcagcgccatggaggtgcagaccaagaaggtgaggaaggtgcccccaggcctgcccagctctgtgtatgcccccagcgccagcacagctgactacaacagagacagccctggctaccccagcagcaagccagccaccagcaccttccccagcagcttcttcatgcaggacggccaccacagcagtgacccctggagcagcagcagcggcatgaaccagcccggctacgccggcatgctgggcaacagcagccacatcccccagagcagcagctactgcagcctgcacccccatgagcggctgagctaccccagccacagcagcgctgacatcaacagcagcctgccccccatgagcaccttccacaggagcggcaccaaccactacagcaccagcagctgcaccccaccagccaatggaacagacagcatcatggccaacagaggcagcggggctgctggcagcagccagacaggagatgccctgggcaaggccctggccagcatctacagcccagaccacaccaacaacagcttcagcagcaaccccagcacccctgtgggcagcccccccagcctgtctgctggaacagctgtgtggagcagaaatggaggccaggccagcagcagccccaactatgagggccccctgcacagcctgcagagcagaattgaagatcggctggagcggctggatgatgccatccacgtgctgagaaatcatgctgtgggccccagcacagccatgcctgggggccatggagacatgcacggcatcatcggccccagccacaatggagccatgggcggcctgggcagcggctatggaacaggcctgctgagcgccaacagacacagcctgatggtgggcacccaccgggaggatggagtggccctgcggggcagccacagcctgctgcccaaccaggtgcctgtgccccagctgcctgtgcagagcgccaccagcccagacctgaaccccccccaggacccctaccggggcatgcctcctggcctgcagggccagagcgtgagcagcggcagcagcgagatcaagagtgatgatgaaggagatgagaacctgcaggacaccaagagcagcgaggacaagaagctggatgatgacaagaaggacatcaagagcatcaccagcaacaatgatgatgaggacctgaccccagagcagaaggccgagcgggagaaggagaggaggatggccaacaatgcccgggagcggctgcgggtgcgggacatcaatgaggccttcaaggagctgggccgcatggtgcagctgcacctgaagagtgacaagccccagaccaagctgctgatcctgcaccaggccgtggccgtcatcctgagcctggagcagcaggtgcgggagaggaacctgaaccccaaggccgcctgcctgaagagaagagaggaggagaaggtgtcctctgagcccccacccctgagcctggccggcccccaccctggcatgggagatgccagcaaccacatgggccagatgtag

SEQ ID NO: 22251 - DNA, 1803 bp, synthetic construct
  misc_feature 1..1803: note = Description of Artificial Sequence: Synthetic coding sequence
  source 1..1803: mol_type = other DNA
atgaaggacatcttcttccagttcatcatcgcccgggtgaggaagtgctacagcctgagctgcctgcacaccctgcctgtggtgcccaccctgaggaagacagagcggggcagctacagcagctatggccgggagagcaacctgcagggctgccaccagagcctgctgggcggggacatggacatgggcaaccctggcaccctgagccccaccaagccaggcagccagtactaccagtacagcagcaacaaccccaggagaagacccctgcacagcagcgccatggaggtgcagaccaagaaggtgaggaaggtgcccccaggcctgcccagctctgtgtatgcccccagcgccagcacagctgactacaacagagacagccctggctaccccagcagcaagccagccaccagcaccttccccagcagcttcttcatgcaggacggccaccacagcagtgacccctggagcagcagcagcggcatgaaccagcccggctacgccggcatgctgggcaacagcagccacatcccccagagcagcagctactgcagcctgcacccccatgagcggctgagctaccccagccacagcagcgctgacatcaacagcagcctgccccccatgagcaccttccacaggagcggcaccaaccactacagcaccagcagctgcaccccaccagccaacggcacagacagcatcatggccaacagaggcagcggggccgccggcagcagccagacaggagatgccctgggcaaggccctggccagcatctacagcccagaccacaccaacaacagcttcagcagcaaccccagcacccctgtgggcagcccccccagcctgtctgctggaacagctgtgtggagcagaaatggaggccaggccagcagcagccccaactatgagggccccctgcacagcctgcagagcagaattgaggaccggctggagcggctggatgatgccatccacgtgctgaggaaccacgctgtgggccccagcacagccatgcctgggggccacggggacatgcacggcatcatcggccccagccacaacggggccatgggcggcctgggcagcggctacggcaccggcctgctgagcgccaacagacacagcctgatggtgggcacccacagagaagatggagtggccctgcggggcagccacagcctgctgcccaaccaggtgcctgtgccccagctgcctgtgcagagcgccaccagcccagacctgaaccccccccaggacccctaccggggcatgcctcctggcctgcagggccagagcgtgagcagcggcagcagcgagatcaagagtgatgatgaaggagatgagaacctgcaggacaccaagagcagcgaggacaagaagctggatgatgacaagaaggacatcaagagcatcaccaggagccgcagcagcaacaatgatgatgaggacctgaccccagagcagaaggccgagcgggagaaggagaggaggatggccaacaatgcccgggagcggctgcgggtgcgggacatcaatgaggccttcaaggagctgggccgcatggtgcagctgcacctgaagagtgacaagccccagaccaagctgctgatcctgcaccaggccgtggccgtcatcctgagcctggagcagcaggtgcgggagaggaacctgaaccccaaggccgcctgcctgaagaggcgggaggaggagaaggtgagcagcgagcccccacccctgagcctggccggcccccaccctggcatgggagatgccagcaaccacatgggccagatgtag

SEQ ID NO: 22252 - DNA, 1233 bp, synthetic construct
  misc_feature 1..1233: note = Description of Artificial Sequence: Synthetic coding sequence
  source 1..1233: mol_type = other DNA
atggccaaggatgctggcctcatcgaggccaatggagagctgaaggtgttcatcgaccagaacctgagccctgggaagggcgtggtgtccctggtggccgtgcaccccagcacagtgaaccccctgggcaagcagctgctgcccaagaccttcggccagagcaatgtgaacatcgcccagcaggtggtgattggcaccccccagaggcctgctgccagcaacaccctggtggtgggcagcccccacacccccagcacccactttgccagccagaaccagcccagcgacagcagcccctggagcgctgggaagaggaacaggaagggggagaagaatggcaagggcctgcggcacttctccatgaaggtgtgtgagaaggtgcagaggaagggcaccaccagctacaatgaggtggctgatgagctggtggccgagttctctgctgctgacaaccacatcctgcccaatgaaagtgcctatgaccagaagaacatcagaagaagagtgtatgatgccctgaatgtgctgatggccatgaacatcatcagcaaggagaagaaggagatcaagtggattggcctgcccaccaacagcgcccaggagtgccagaacctggaggtggagcggcagaggcggctggagcgcatcaagcagaagcagagccagctgcaggagctgatcctgcagcagatcgccttcaagaacctggtgcagaggaacagacatgctgagcagcaggccagccggcccccaccacccaacagcgtcatccacctgcccttcatcatcgtgaacaccagcaagaagacagtcatcgactgcagcatcagcaatgacaagtttgagtacctgttcaactttgacaacacctttgagatccatgatgacatcgaggtgctgaagaggatgggcatggcctgtggcctggagagcggcagctgcagcgctgaggacctgaagatggcccggagcctggtgcccaaggccctggagccctacgtgacagagatggcccagggcaccgtgggcggcgtcttcatcaccacagctggcagcaccagcaatggcacccgcttcagcgccagtgacctgaccaacggggctgatggcatgctggccaccagcagcaatggcagccagtacagcggcagccgggtggagacccctgtgtcctatgtgggagaagatgatgaagaagatgatgacttcaatgaaaatgatgaagatgactag

SEQ ID NO: 22253 - DNA, 711 bp, synthetic construct
  misc_feature 1..711: note = Description of Artificial Sequence: Synthetic coding sequence
  source 1..711: mol_type = other DNA
atggccaaggatgctggcctcatcgaggccaatggagagctgaaggtgttcatcgaccagaacctgagccctgggaagggcgtggtgtccctggtggccgtgcaccccagcacagtgaaccccctgggcaagcagctgctgcccaagaccttcggccagagcaatgtgaacatcgcccagcaggtggtgattggcaccccccagaggcctgctgccagcaacaccctggtggtgggcagcccccacacccccagcacccactttgccagccagaaccagcccagcgacagcagcccctggagcgctgggaagaggaacaggaagggggagaagaatggcaagggcctgcggcacttctccatgaaggtgtgtgagaaggtgcagaggaagggcaccaccagctacaatgaggtggctgatgagctggtggccgagttctctgctgctgacaaccacatcctgcccaatgaaagtgcctatgaccagaagaacatcagaagaagagtgtatgatgccctgaatgtgctgatggccatgaacatcatcagcaaggagaagaaggagatcaagtggattggcctgcccaccaacagcgcccaggagtgccagaacctggaggtggagcggcagaggcggctggagcgcatcaagcagaagcagagccagctgcaggagctgatcctgcagcagatcgccttcaagaacctgtag

SEQ ID NO: 22254 - DNA, 480 bp, synthetic construct
  misc_feature 1..480: note = Description of Artificial Sequence: Synthetic coding sequence
  source 1..480: mol_type = other DNA
atggccaaggatgctggcctcatcgaggccaatggagagctgaaggtgttcatcgaccagaacctgagccctgggaagggcgtggtgtccctggtggccgtgcaccccagcacagtgaaccccctgggcaagcagctgctgcccaagaccttcggccagagcaatgtgaacatcgcccagcaggtggtgattggcaccccccagaggcctgctgccagcaacaccctggtggtgggcagcccccacacccccagcacccactttgccagccagaaccagcccagcgacagcagcccctggagcgctgggaagaggaacaggaagggggagaagaatggcaagggcctgcggcacttctccatgaaggtgtgtgagaaggtgcagaggaagggcaccaccagctacaatgaggtggctgatgagctggtggccgagttctctgctgctgacaaccacatcctgcccaatgaatctgtgtag

SEQ ID NO: 22255 - DNA, 936 bp, synthetic construct
  misc_feature 1..936: note = Description of Artificial Sequence: Synthetic coding sequence
  source 1..936: mol_type = other DNA
atgagcaccctgcccagcaagtggaagaggaacagaaaaggagagaagaatggcaagggcctgcggcacttctccatgaaggtgtgtgagaaggtgcagaggaagggcaccaccagctacaatgaggtggctgatgagctggtggccgagttctctgctgctgacaaccacatcctgcccaatgaaagtgcctatgaccagaagaacatcagaagaagagtgtatgatgccctgaatgtgctgatggccatgaacatcatcagcaaggagaagaaggagatcaagtggattggcctgcccaccaacagcgcccaggagtgccagaacctggaggtggagcggcagaggcggctggagcgcatcaagcagaagcagagccagctgcaggagctgatcctgcagcagatcgccttcaagaacctggtgcagaggaacagacatgctgagcagcaggccagcaggcctcctccacccaacagcgtcatccacctgcccttcatcatcgtgaacaccagcaagaagacagtgattgactgcagcatcagcaatgacaagtttgagtacctgttcaactttgacaacacctttgagatccatgatgacatcgaggtgctgaagaggatgggcatggcctgtggcctggagagcggcagctgcagcgctgaggacctgaagatggcccggagcctggtgcccaaggccctggagccctacgtgacagagatggcccagggcaccgtgggcggcgtcttcatcaccacagctggcagcaccagcaatggcaccagtgacctgaccaatggagcagatggcatgctggccaccagcagcaatggcagccagtacagcggcagccgggtggagacccctgtgtcctatgtgggggaggatgatgaggaggatgatgacttcaatgaaaatgatgaagatgactag

SEQ ID NO: 22256 - DNA, 1146 bp, synthetic construct
  misc_feature 1..1146: note = Description of Artificial Sequence: Synthetic coding sequence
  source 1..1146: mol_type = other DNA
atgagcaccctgcccagcaagtggaagaggaacagaaaaggagagaagaatggcaagggcctgcggcacttctccatgaaggtgtgtgagaaggtgcagaggaagggcaccaccagctacaatgaggtggctgatgagctggtggccgagttctctgctgctgacaaccacatcctgcccaatgaaagtgcctatgaccagaagaacatcagaagaagagtgtatgatgccctgaatgtgctgatggccatgaacatcatcagcaaggagaagaaggagatcaagtggattggcctgcccaccaacagcgcccaggagtgccagaacctggaggtggagcggcagaggcggctggagcgcatcaagcagaagcagagccagctgcaggagctgatcctgcagcagatcgccttcaagaacctggtgcagaggaacagacatgctgagcagcaggccagcaggcctcctccacccaacagcgtcatccacctgcccttcatcatcgtgaacaccagcaagaagacagtgattgactgcagcatcagcaatgacaagtttgagtacctgttcaactttgacaacacctttgagatccatgatgacatcgaggtgctgaagaggatgggcatggcctgtggcctggagagcggcagctgcagcgctgaggacctgaagatggcccggagcctggtgcccaaggccctggagccctacgtgacagagaagacaggcctgtgtgactgcacagctggctgcccagccccctggaggtctgtggagaacacaggccaggccaaggacatcaggaagctgctgcagcccagcgtgctgtggaactgtgccagcttctgctggctgcctgtgcggctggtgctcttcctgttccatgaccacagcctcatcttcttccccttcagcgagatggcccagggcaccgtgggcggcgtcttcatcaccacagctggcagcaccagcaatggcacccgcttcagcgccagtgacctgaccaatggagcagatggcatgctggccaccagcagcaatggcagccagtacagcggcagccgggtggagacccctgtgtcctatgtgggggaggatgatgaggaggatgatgacttcaatgaaaatgatgaagatgactag

SEQ ID NO: 22257 - DNA, 1161 bp, synthetic construct
  misc_feature 1..1161: note = Description of Artificial Sequence: Synthetic coding sequence
  source 1..1161: mol_type = other DNA
atgatcatcagcaccccccagaggctgaccagcagcggctctgtgctgattggcagcccctacaccccagccccagccatggtgacccagacccacatcgccgaggccaccggctgggtgcctggggacaggaagagggccaggaagttcatcgacagcgacttcagcgagagcaagaggagcaagaagggggacaagaatggcaagggcctgcggcacttctccatgaaggtgtgtgagaaggtgcagaggaagggcaccaccagctacaatgaggtggctgatgagctggtgtctgagttcaccaacagcaacaaccacctggccgctgacagccaggcctatgaccagaagaacatcagaagaagagtgtatgatgccctgaatgtgctgatggccatgaacatcatcagcaaggagaagaaggagatcaagtggattggcctgcccaccaacagcgcccaggagtgccagaacctggagattgagaagcagaggcgcatcgagcgcatcaagcagaagagggcccagctgcaggagctgctgctgcagcagatcgccttcaagaacctggtgcagaggaaccggcagaatgagcagcagaaccagggccccccagccctgaacagcaccatccagctgcccttcatcatcatcaacaccagcaggaagacagtgattgactgcagcatcagcagtgacaagtttgagtacctgttcaactttgacaacacctttgagatccatgatgacatcgaggtgctgaagaggatgggcatgagctttggcctggagagcggcaagtgcagcctggaggacctgaagctggccaagagcctggtgcccaaggccctggagggctacatcacagacatcagcacaggccccagctggctgaaccagggcctgctgctgaacagcacccagagcgtgagcaacctggacctgaccaccggggccaccctgccccagagctctgtgaaccagggcctgtgcctggatgctgaggtggccctggccaccggccagttcctggcccccaacagccaccagagcagcagcgctgccagccactgcagcgagagcagaggagagaccccctgcagcttcaatgatgaagatgaggaggatgatgaggaggacagcagcagccctgagtag

SEQ ID NO: 22258 - DNA, 1113 bp, synthetic construct
  misc_feature 1..1113: note = Description of Artificial Sequence: Synthetic coding sequence
  source 1..1113: mol_type = other DNA
atgatcatcagcaccccccagaggctgaccagcagcggctctgtgctgattggcagcccctacaccccagccccagccatggtgacccagacccacatcgccgaggccaccggctgggtgcctgggaagaggagcaagaagggggacaagaatggcaagggcctgcggcacttctccatgaaggtgtgtgagaaggtgcagaggaagggcaccaccagctacaatgaggtggctgatgagctggtgtctgagttcaccaacagcaacaaccacctggccgctgacagccaggcctatgaccagaagaacatcagaagaagagtgtatgatgccctgaatgtgctgatggccatgaacatcatcagcaaggagaagaaggagatcaagtggattggcctgcccaccaacagcgcccaggagtgccagaacctggagattgagaagcagaggcgcatcgagcgcatcaagcagaagagggcccagctgcaggagctgctgctgcagcagatcgccttcaagaacctggtgcagaggaaccggcagaatgagcagcagaaccagggccccccagccctgaacagcaccatccagctgcccttcatcatcatcaacaccagcaggaagacagtgattgactgcagcatcagcagtgacaagtttgagtacctgttcaactttgacaacacctttgagatccatgatgacatcgaggtgctgaagaggatgggcatgagctttggcctggagagcggcaagtgcagcctggaggacctgaagctggccaagagcctggtgcccaaggccctggagggctacatcacagacatcagcacaggccccagctggctgaaccagggcctgctgctgaacagcacccagagcgtgagcaacctggacctgaccaccggggccaccctgccccagagctctgtgaaccagggcctgtgcctggatgctgaggtggccctggccaccggccagttcctggcccccaacagccaccagagcagcagcgctgccagccactgcagcgagagcagaggagagaccccctgcagcttcaatgatgaagatgaggaggatgatgaggaggacagcagcagccctgagtag

SEQ ID NO: 22259 - DNA, 1257 bp, synthetic construct
  misc_feature 1..1257: note = Description of Artificial Sequence: Synthetic coding sequence
  source 1..1257: mol_type = other DNA
atgcagcctgagggcatcatctttgaagctgagaacaagcccagccctggaacagagagcgctggcaccttcatcctggacctgagcgccaccagcaggaccatcatcagcaccccccagaggctgaccagcagcggctctgtgctgattggcagcccctacaccccagccccagccatggtgacccagacccacatcgccgaggccaccggctgggtgcctggggacaggaagagggccaggaagttcatcgacagcgacttcagcgagagcaagaggagcaagaagggggacaagaatggcaagggcctgcggcacttctccatgaaggtgtgtgagaaggtgcagaggaagggcaccaccagctacaatgaggtggctgatgagctggtgtctgagttcaccaacagcaacaaccacctggccgctgacagcgcctatgaccagaagaacatcagaagaagagtgtatgatgccctgaatgtgctgatggccatgaacatcatcagcaaggagaagaaggagatcaagtggattggcctgcccaccaacagcgcccaggagtgccagaacctggagattgagaagcagaggcgcatcgagcgcatcaagcagaagagggcccagctgcaggagctgctgctgcagcagatcgccttcaagaacctggtgcagaggaaccggcagaatgagcagcagaaccagggccccccagccctgaacagcaccatccagctgcccttcatcatcatcaacaccagcaggaagacagtgattgactgcagcatcagcagtgacaagtttgagtacctgttcaactttgacaacacctttgagatccatgatgacatcgaggtgctgaagaggatgggcatgagctttggcctggagagcggcaagtgcagcctggaggacctgaagctggccaagagcctggtgcccaaggccctggagggctacatcacagacatcagcacaggccccagctggctgaaccagggcctgctgctgaacagcacccagagcgtgagcaacctggacctgaccaccggggccaccctgccccagagctctgtgaaccagggcctgtgcctggatgctgaggtggccctggccaccggccagttcctggcccccaacagccaccagagcagcagcgctgccagccactgcagcgagagcagaggagagaccccctgcagcttcaatgatgaagatgaggaggatgatgaggaggacagcagcagccctgagtag

SEQ ID NO: 22260 - DNA, 1161 bp, synthetic construct; identical to SEQ ID NO: 22257
  misc_feature 1..1161: note = Description of Artificial Sequence: Synthetic coding sequence
  source 1..1161: mol_type = other DNA

SEQ ID NO: 22261 - DNA, 261 bp, synthetic construct
  misc_feature 1..261: note = Description of Artificial Sequence: Synthetic coding sequence
  source 1..261: mol_type = other DNA
atgacagccaagaatgtgggcctgaccagcaccaatgctgaggtgcggggcttcatcgaccagaacctgagccccaccaagggcaacatcagctttgtggccttccctgtgagcaacaccaacagccccaccaagatcctgcccaagaccctgggccccatcaacgtgaatgtgggcccccagatgatcatcagcaccccccagaggctgaccagcagcggctctgtgctgattggcagcccctacaccccagccccctag

SEQ ID NO: 22262 - DNA, 141 bp, synthetic construct
  misc_feature 1..141: note = Description of Artificial Sequence: Synthetic coding sequence
  source 1..141: mol_type = other DNA
atgatcatcagcaccccccagaggctgaccagcagcggctctgtgctgattggcagcccctacaccccagccccagccatggtgacccagacccacatcgccgaggccaccggctgggtgcctggggacaggaagaggtag

SEQ ID NO: 22263 - DNA, 1158 bp, synthetic construct
  misc_feature 1..1158: note = Description of Artificial Sequence: Synthetic coding sequence
  source 1..1158: mol_type = other DNA
atgatcatcagcaccccccagaggctgaccagcagcggctctgtgctgattggcagcccctacaccccagccccagccatggtgacccagacccacatcgccgaggccaccggctgggtgcctggggacaggaagagggccaggaagttcatcgacagcgacttcagcgagagcaagaggagcaagaagggggacaagaatggcaagggcctgcggcacttctccatgaaggtgtgtgagaaggtgcagaggaagggcaccaccagctacaatgaggtggctgatgagctggtgtctgagttcaccaacagcaacaaccacctggccgctgacagcgcctatgaccagaagaacatcagaagaagagtgtatgatgccctgaatgtgctgatggccatgaacatcatcagcaaggagaagaaggagatcaagtggattggcctgcccaccaacagcgcccaggagtgccagaacctggagattgagaagcagaggagaattgagcgcatcaagcagaagagggcccagctgcaggagctgctgctgcagcagatcgccttcaagaacctggtgcagaggaaccggcagaatgagcagcagaaccagggccccccagccctgaacagcaccatccagctgcccttcatcatcatcaacaccagcaggaagacagtcatcgactgcagcatcagcagtgacaagtttgagtacctgttcaactttgacaacacctttgagatccatgatgacatcgaggtgctgaagaggatgggcatgagctttggcctggagagcggcaagtgcagcctggaggacctgaagctggccaagagcctggtgcccaaggccctggagggctacatcacagacatcagcacaggccccagctggctgaaccagggcctgctgctgaacagcacccagagcgtgagcaacctggacctgaccactggagccaccctgccccagagctctgtgaaccagggcctgtgcctggatgctgaggtggccctggccaccggccagttcctggcccccaacagccaccagagcagcagcgctgccagccactgcagcgagagcagaggagagaccccctgcagcttcaatgatgaagatgaagaagatgatgaggaggacagcagcagccctgagtag

SEQ ID NO: 22264 - DNA, 270 bp, synthetic construct
  misc_feature 1..270: note = Description of Artificial Sequence: Synthetic coding sequence
  source 1..270: mol_type = other DNA
atgatcatcagcaccccccagaggctgaccagcagcggctctgtgctgattggcagcccctacaccccagccccagccatggtgacccagacccacatcgccgaggccaccggctgggtgcctggggacaggaagagggccaggaagttcatcgacagcgacttcagcgagagcaagaggagcaagaagggggacaagaatggcaagggcctgcggcacttctccatgaaggtgtgtgagaaggtgcagaggaagggcaccaccagctag

SEQ ID NO: 22265 - DNA, 1341 bp, synthetic construct
  misc_feature 1..1341: note = Description of Artificial Sequence: Synthetic coding sequence
  source 1..1341: mol_type = other DNA
atgacagccaagaatgtgggcctgaccagcaccaatgctgaggtgcggggcttcatcgaccagaacctgagccccaccaagggcaacatcagctttgtggccttccctgtgagcaacaccaacagccccaccaagatcctgcccaagaccctgggccccatcaacgtgaatgtgggcccccagatgatcatcagcaccccccagaggctgaccagcagcggctctgtgctgattggcagcccctacaccccagccccagccatggtgacccagacccacatcgccgaggccaccggctgggtgcctggggacaggaagagggccaggaagttcatcgacagcgacttcagcgagagcaagaggagcaagaagggggacaagaatggcaagggcctgcggcacttctccatgaaggtgtgtgagaaggtgcagaggaagggcaccaccagctacaatgaggtggctgatgagctggtgtctgagttcaccaacagcaacaaccacctggccgctgacagcgcctatgaccagaagaacatcagaagaagagtgtatgatgccctgaatgtgctgatggccatgaacatcatcagcaaggagaagaaggagatcaagtggattggcctgcccaccaacagcgcccaggagtgccagaacctggagattgagaagcagaggcgcatcgagcgcatcaagcagaagagggcccagctgcaggagctgctgctgcagcagatcgccttcaagaacctggtgcagaggaaccggcagaatgagcagcagaaccagggccccccagccctgaacagcaccatccagctgcccttcatcatcatcaacaccagcaggaagacagtgattgactgcagcatcagcagtgacaagtttgagtacctgttcaactttgacaacacctttgagatccatgatgacatcgaggtgctgaagaggatgggcatgagctttggcctggagagcggcaagtgcagcctggaggacctgaagctggccaagagcctggtgcccaaggccctggagggctacatcacagacatcagcacaggccccagctggctgaaccagggcctgctgctgaacagcacccagagcgtgagcaacctggacctgaccaccggggccaccctgccccagagctctgtgaaccagggcctgtgcctggatgctgaggtggccctggccaccggccagttcctggcccccaacagccaccagagcagcagcgctgccagccactgcagcgagagcagaggagagaccccctgcagcttcaatgatgaagatgaggaggatgatgaggaggacagcagcagccctgagtag

SEQ ID NO: 22266 - DNA, 84 bp, synthetic construct
  misc_feature 1..84: note = Description of Artificial Sequence: Synthetic coding sequence
  source 1..84: mol_type = other DNA
atgatcatcagcaccccccagaggctgaccagcagcggctctgtgctgattggcagcccctacaccccagccccagccatgtag

SEQ ID NO: 22267 - DNA, 1050 bp, synthetic construct
  misc_feature 1..1050: note = Description of Artificial Sequence: Synthetic coding sequence
  source 1..1050: mol_type = other DNA
atgctggaccccaagtgtgacaggaagagggccaggaagttcatcgacagcgacttcagcgagagcaagaggagcaagaagggggacaagaatggcaagggcctgcggcacttctccatgaaggtgtgtgagaaggtgcagaggaagggcaccaccagctacaatgaggtggctgatgagctggtgtctgagttcaccaacagcaacaaccacctggccgctgacagcgcctatgaccagaagaacatcagaagaagagtgtatgatgccctgaatgtgctgatggccatgaacatcatcagcaaggagaagaaggagatcaagtggattggcctgcccaccaacagcgcccaggagtgccagaacctggagattgagaagcagaggagaattgagcgcatcaagcagaagagggcccagctgcaggagctgctgctgcagcagatcgccttcaagaacctggtgcagaggaaccggcagaatgagcagcagaaccagggccccccagccctgaacagcaccatccagctgcccttcatcatcatcaacaccagcaggaagacagtcatcgactgcagcatcagcagtgacaagtttgagtacctgttcaactttgacaacacctttgagatccatgatgacatcgaggtgctgaagaggatgggcatgagctttggcctggagagcggcaagtgcagcctggaggacctgaagctggccaagagcctggtgcccaaggccctggagggctacatcacagacatcagcacaggccccagctggctgaaccagggcctgctgctgaacagcacccagagcgtgagcaacctggacctgaccactggagccaccctgccccagagctctgtgaaccagggcctgtgcctggatgctgaggtggccctggccaccggccagttcctggcccccaacagccaccagagcagcagcgctgccagccactgcagcgagagcagaggagagaccccctgcagcttcaatgatgaagatgaagaagatgatgaggaggacagcagcagccctgagtag

SEQ ID NO: 22268 - DNA, 663 bp, synthetic construct
  misc_feature 1..663: note = Description of Artificial Sequence: Synthetic coding sequence
  source 1..663: mol_type = other DNA
atgatcatcagcaccccccagaggctgaccagcagcggctctgtgctgattggcagcccctacaccccagccccagccatggtgacccagacccacatcgccgaggccaccggctgggtgcctggggacaggaagagggccaggaagttcatcgacagcgacttcagcgagagcaagaggagcaagaagggggacaagaatggcaagggcctgcggcacttctccatgaaggtgtgtgagaaggtgcagaggaagggcaccaccagctacaatgaggtggctgatgagctggtgtctgagttcaccaacagcaacaaccacctggccgctgacagcgcctatgaccagaagaacatcagaagaagagtgtatgatgccctgaatgtgctgatggccatgaacatcatcagcaaggagaagaaggagatcaagtggattggcctgcccaccaacagcgcccaggagtgccagaacctggagattgagaagcagaggagaattgagcgcatcaagcagaagagggcccagctgcaggagctgctgctgcagcagatcgccttcaagaacctggtgcagaggaaccggcagaatgagcagcagaaccagggccccccagccctgaacagcaccatccagctgcccttcatcatcatcaacacctag

SEQ ID NO: 22269 - DNA, 1161 bp, synthetic construct; identical to SEQ ID NO: 22257
  misc_feature 1..1161: note = Description of Artificial Sequence: Synthetic coding sequence
  source 1..1161: mol_type = other DNA

SEQ ID NO: 22270 - DNA, 933 bp, synthetic construct
  misc_feature 1..933: note = Description of Artificial Sequence: Synthetic coding sequence
  source 1..933: mol_type = other DNA
atgaaggtgtgtgagaaggtgcagaggaagggcaccaccagctacaatgaggtggctgatgagctggtgtctgagttcaccaacagcaacaaccacctggccgctgacagcgcctatgaccagaagaacatcagaagaagagtgtatgatgccctgaatgtgctgatggccatgaacatcatcagcaaggagaagaaggagatcaagtggattggcctgcccaccaacagcgcccaggagtgccagaacctggagattgagaagcagaggcgcatcgagcgcatcaagcagaagagggcccagctgcaggagctgctgctgcagcagatcgccttcaagaacctggtgcagaggaaccggcagaatgagcagcagaaccagggccccccagccctgaacagcaccatccagctgcccttcatcatcatcaacaccagcaggaagacagtgattgactgcagcatcagcagtgacaagtttgagtacctgttcaactttgacaacacctttgagatccatgatgacatcgaggtgctgaagaggatgggcatgagctttggcctggagagcggcaagtgcagcctggaggacctgaagctggccaagagcctggtgcccaaggccctggagggctacatcacagacatcagcacaggccccagctggctgaaccagggcctgctgctgaacagcacccagagcgtgagcaacctggacctgaccaccggggccaccctgccccagagctctgtgaaccagggcctgtgcctggatgctgaggtggccctggccaccggccagttcctggcccccaacagccaccagagcagcagcgctgccagccactgcagcgagagcagaggagagaccccctgcagcttcaatgatgaagatgaggaggatgatgaggaggacagcagcagccctgagtag

SEQ ID NO: 22271 - DNA, 1335 bp, synthetic construct
  misc_feature 1..1335: note = Description of Artificial Sequence: Synthetic coding sequence
  source 1..1335: mol_type = other DNA
atgcccaggtctggggcccccaaggagaggcctgctgagcccctgaccccaccacccagctatggccaccagccccagacaggcagcggggagagcagcggggccagcggggacaaggaccacctgtacagcacagtgtgcaagcccaggagccccaagccagctgccccagctgccccacccttcagcagcagcagcggcgtgctgggcaccggcctgtgtgagctggaccggctgctgcaggagctgaatgccacccagttcaacatcacagatgagatcatgagccagttccccagcagcaaggtggccagcggggagcagaaggaggaccagagcgaggacaagaagaggcccagcctgcccagcagccccagccctggcctgcccaaggccagcgccaccagcgccaccctggagctggaccggctgatggccagcctgagtgacttccgggtgcagaaccacctgcctgccagcggccccacccagccccctgtggtgagcagcaccaatgaaggcagccccagccccccagagcccaccgggaagggcagcctggacaccatgctgggcctgctgcagagcgacctgagccggcggggcgtgcccacccaggccaagggcctgtgtggcagctgcaacaagcccatcgccggccaggtggtgacagccctgggccgggcctggcaccctgagcactttgtgtgtggcggctgcagcacagccctgggcggcagcagcttctttgagaaggatggagcccccttctgcccagagtgctactttgagcgcttcagcccccgctgtggcttctgcaaccagcccatccgccacaagatggtgacagccctgggcacccactggcaccctgagcacttctgctgcgtgtcctgtggggagccctttggagatgagggcttccacgagcgggagggccggccctactgccggcgggacttcctgcagctgtttgccccccgctgccagggctgccagggccccatcctggacaactacatcagcgccctgagcgccctgtggcacccagactgctttgtgtgcagagaatgttttgcccccttcagcggcggcagcttctttgagcacgagggccggcccctgtgtgagaaccacttccacgcccggcggggcagcctgtgtgccacctgtggcctgcctgtgacaggccgctgtgtgtctgccctgggccgccgcttccacccagaccacttcacctgcaccttctgcctgcggcccctgaccaagggcagcttccaggagcgggccggcaagccctactgccagccctgcttcctgaagctgtttggatag

SEQ ID NO: 22272 - DNA, 1335 bp, synthetic construct; identical to SEQ ID NO: 22271
  misc_feature 1..1335: note = Description of Artificial Sequence: Synthetic coding sequence
  source 1..1335: mol_type = other DNA

SEQ ID NO: 22273 - DNA, 1386 bp, synthetic construct
  misc_feature 1..1386: note = Description of Artificial Sequence: Synthetic coding sequence
  source 1..1386: mol_type = other DNA
atggaggacctggatgccctgctgagtgacctggagaccaccaccagccacatgcccaggtctggggcccccaaggagaggcctgctgagcccctgaccccacctccttcctatggccaccagccccagacaggcagcggggagagcagcggggccagcggggacaaggaccacctgtacagcacagtgtgcaagcccaggagccccaagccagctgccccagctgccccacccttcagcagcagcagtggagtgctgggcaccggcctgtgtgagctggaccggctgctgcaggagctgaatgccacccagttcaacatcacagatgagatcatgagccagttccccagcagcaaggtggccagcggggagcagaaggaggaccagagcgaggacaagaagaggcccagcctgcccagcagccccagccctggcctgcccaaggccagcgccaccagcgccaccctggagctggaccggctgatggccagcctgagtgacttccgggtgcagaaccacctgcctgccagcggccccacccagccccctgtggtgagcagcaccaatgaaggcagccccagccccccagagcccaccgggaagggcagcctggacaccatgctgggcctgctgcagagcgacctgagcagaagaggagtgcccacccaggccaagggcctgtgtggcagctgcaacaagcccatcgccggccaggtggtgacagccctgggccgggcctggcaccctgagcactttgtgtgtggcggctgcagcacagccctgggcggcagcagcttctttgagaaggatggagcccccttctgcccagagtgctactttgagcgcttcagcccccgctgtggcttctgcaaccagcccatccgccacaagatggtgacagccctgggcacccactggcaccctgagcacttctgctgcgtgtcctgtggggagccctttggagatgagggcttccacgagcgggagggccggccctactgcagaagagacttcctgcagctgtttgccccccgctgccagggctgccagggccccatcctggacaactacatcagcgccctgagcgccctgtggcacccagactgctttgtgtgccgggagtgctttgcccccttcagcggcggcagcttctttgaacatgagggccggcccctgtgtgagaaccacttccacgcccggcggggcagcctgtgtgccacctgtggcctgcctgtgacaggccgctgtgtgtctgccctgggccgccgcttccacccagaccacttcacctgcaccttctgcctgcggcccctgaccaagggcagcttccaggagagagctgggaagccctactgccagccctgcttcctgaagctgtttggatag

SEQ ID NO: 22274 - DNA, 783 bp, synthetic construct
  misc_feature 1..783: note = Description of Artificial Sequence: Synthetic coding sequence
  source 1..783: mol_type = other DNA
atggtgtggccagccctgtgggagctgtaccgggagctgggcctcttccagggccctgccctgggcctgaggaaccacctgggcaggaagctgcggcggaggaagaagaagaaggccaagaggaccaccaactggaagatcatcacagaccggcccggcttccatgatgagagcgccatctaccctgtgggctactgcagcacccgcatctatgcctccatgaagtgcccagaccagaagtgcctgtacacctgccagatcaaggatggaggagtgcagccccagtttgagatcgtgcctgaagatgacccccagaatgccatcgtgagcagcagcgcagatgcctgccacgccgagctgctgcggaccatcagcaccaccatgggcaagctgatgcccaacctgctgcctgctggagctgacttcttcggcttcagccacccagccatccacaacctgatccagagctgccctggggccaggaagtgcatcaactaccagtgggtgaagtttgatgtgtgcaagccaggagatggccagctgcctgagggcctgcctgaaaatgatgctgccatgagctttgaggccttccagaggcagatctttgatgaggaccagaatgaccccctgctgcccggcagcctggacctgcctgagctgcagcctgctgcctttgtgagcagctaccagcccatgtacctgacccatgagcccctggtggacacccacctgcagcacctgaagagccccagccagggcagccccatccagagcagtgactag

SEQ ID NO: 22275 - DNA, 1236 bp, synthetic construct
  misc_feature 1..1236: note = Description of Artificial Sequence: Synthetic coding sequence
  source 1..1236: mol_type = other DNA
atgagcctgctggatggcctggccagcagcccccgggcccccctgcagagcagcaaggccaggatgaagaagctgcccaagaagagccagaatgagaagtaccgcctgaagtacctgcggctgaggaaggccgccaaggccaccgtgtttgaaaatgctgccatctgtgatgaaattgcccggctggaggagaagttcctgaaggccaaggaggagcggcgctacctgctgaagaagctgctgcagctgcaggccctgacagaaggagaggtgcaggccgccgcccccagccacagcagcagcctgcccctgacctacggcgtggccagctctgtgggcaccatccagggcgccggccccatcagcggccccagcactggagctgaggagccctttgggaagaagaccaagaaggagaagaaggagaagggcaaggagaacaacaagctggaggtgctgaagaagacctgcaagaagaagaagatggccggcggggccaggaagctggtgcagcccatcgccctggaccccagcggccggcctgtgttccccatcggcctgggcggcctgactgtgtacagcctgggggagatcatcacagacaggcctggcttccatgatgaaagtgccatctaccctgtgggctactgcagcacccgcatctatgcctccatgaagtgcccagaccagaagtgcctgtacacctgccagatcaaggatggcggcgtgcagccccagtttgaaattgtgcctgaagatgacccccagaatgccatcgtgagcagcagcgcagatgcctgccacgccgagctgctgcggaccatcagcaccaccatgggcaagctgatgcccaacctgctgcctgctggagctgacttcttcggcttcagccacccagccatccacaacctgatccagagctgccctggggccaggaagtgcatcaactaccagtgggtgaagtttgatgtgtgcaagccaggagatggccagctgcctgagggcctgcctgaaaatgatgctgccatgagctttgaggccttccagaggcagatctttgatgaggaccagaatgaccccctgctgcccggcagcctggacctgcctgagctgcagcctgctgcctttgtgtcctcctaccagcccatgtacctgacccatgagcccctggtggacacccacctgcagcacctgaagagccccagccagggcagccccatccagagcagtgactag

SEQ ID NO: 22276 - DNA, 1281 bp, synthetic construct
  misc_feature 1..1281: note = Description of Artificial Sequence: Synthetic coding sequence
  source 1..1281: mol_type = other DNA
atggaggccgctgtggccgccccccggccccggctgctgctgctggtgctggccgctgctgctgctgctgctgctgccctgctgcccggggccacagccctgcagtgcttctgccacctgtgcaccaaggacaacttcacctgtgtgacagatggcctgtgctttgtgtctgtgacagagaccacagacaaggtgatccacaacagcatgtgcatcgccgagattgacctgatcccccgggaccggccctttgtgtgtgcccccagcagcaagacaggctctgtgaccaccacctactgctgcaaccaggaccactgcaacaagattgagctgcccaccaccggcctgcccctgctggtgcagaggaccatcgcccggaccatcgtgctgcaggagagcatcggcaagggccgctttggagaggtgtggaggggcaagtggagaggagaggaggtggccgtgaagatcttcagcagccgggaggagaggtcctggttccgggaggccgagatctaccagacagtgatgctgcggcatgagaacatcctgggcttcatcgctgctgacaacaaggacaatggcacctggacccagctgtggctggtgtctgactaccacgagcacggcagcctgtttgactacctgaaccgctacacagtgacagtggagggcatgatcaagctggccctgagcacagccagcggcctggcccacctgcacatggagatcgtgggcacccagggcaagccagccatcgcccaccgggacctgaagagcaagaacatcctggtgaagaagaatggcacctgctgcatcgctgacctgggcctggccgtgagacatgattctgccacagacaccatcgacatcgcccccaaccaccgggtgggcaccaagcgctacatggcccctgaggtgctggatgacagcatcaacatgaagcactttgagagcttcaagagagctgacatctatgccatgggcctggtgttctgggagatcgcccggcgctgcagcatcggcggcatccacgaggactaccagctgccctactatgacctggtgcccagcgaccccagcgtggaggagatgaggaaggtggtgtgtgagcagaagctgcggcccaacatccccaaccgctggcagagctgtgaggccctgcgggtgatggccaagatcatgagggagtgctggtacgccaatggagctgcccggctgacagccctgcgcatcaagaagaccctgagccagctgagccagcaggagggcatcaagatgtag

SEQ ID NO: 22277 - DNA, 1512 bp, synthetic construct
  misc_feature 1..1512: note = Description of Artificial Sequence: Synthetic coding sequence
  source 1..1512: mol_type = other DNA
atggaggccgctgtggccgccccccggccccggctgctgctgctggtgctggccgctgctgctgctgctgctgctgccctgctgcccggggccacagccctgcagtgcttctgccacctgtgcaccaaggacaacttcacctgtgtgacagatggcctgtgctttgtgtctgtgacagagaccacagacaaggtgatccacaacagcatgtgcatcgccgagattgacctgatcccccgggaccggccctttgtgtgtgcccccagcagcaagacaggctctgtgaccaccacctactgctgcaaccaggaccactgcaacaagattgagctgcccaccaccgtgaagagcagccctggcctgggccctgtggagctggccgctgtgattgctggccctgtgtgctttgtgtgcatcagcctgatgctgatggtgtacatctgccacaacagaactgtcatccaccaccgggtgcccaatgaggaggaccccagcctggaccggcccttcatcagcgagggcaccaccctgaaggacctgatctatgacatgaccaccagcggcagcggcagcggcctgcccctgctggtgcagaggaccatcgcccggaccatcgtgctgcaggagagcatcggcaagggccgctttggagaggtgtggaggggcaagtggagaggagaggaggtggccgtgaagatcttcagcagccgggaggagaggtcctggttccgggaggccgagatctaccagacagtgatgctgcggcatgagaacatcctgggcttcatcgctgctgacaacaaggacaatggcacctggacccagctgtggctggtgtctgactaccatgaacatggcagcctgtttgactacctgaaccgctacacagtgacagtggagggcatgatcaagctggccctgagcacagccagcggcctggcccacctgcacatggagatcgtgggcacccagggcaagccagccatcgcccaccgggacctgaagagcaagaacatcctggtgaagaagaatggcacctgctgcatcgctgacctgggcctggccgtgagacatgacagcgccacagacaccattgatattgcccccaaccaccgggtgggcaccaagcgctacatggcccctgaggtgctggatgacagcatcaacatgaagcactttgagagcttcaagagagctgacatctatgccatgggcctggtgttctgggagatcgcccggcgctgcagcattggaggcatccacgaggactaccagctgccctactatgacctggtgcccagcgaccccagcgtggaggagatgaggaaggtggtgtgtgagcagaagctgcggcccaacatccccaaccgctggcagagctgtgaggccctgcgggtgatggccaagatcatgagggagtgctggtacgccaacggggccgcccggctgacagccctgcgcatcaagaagaccctgagccagctgagccagcaggagggcatcaagatgtag

SEQ ID NO: 22278 - DNA, 1398 bp, synthetic construct
  misc_feature 1..1398: note = Description of Artificial Sequence: Synthetic coding sequence
  source 1..1398: mol_type = other DNA
atggaggccgctgtggccgccccccggccccggctgctgctgctggtgctggccgctgctgctgctgctgctgctgccctgctgcccggggccacagccctgcagtgcttctgccacctgtgcaccaaggacaacttcacctgtgtgacagatggcctgtgctttgtgtctgtgacagagaccacagacaaggtgatccacaacagcatgtgcatcgccgagattgacctgatcccccgggaccggccctttgtgtgtgcccccagcagcaagacaggctctgtgaccaccacctactgctgcaaccaggaccactgcaacaagattgagctgcccaccaccgtgaagagcagccctggcctgggccctgtggagctggccgctgtgattgctggccctgtgtgctttgtgtgcatcagcctgatgctgatggtgtacatctgccacaacagaactgtcatccaccaccgggtgcccaatgaggaggaccccagcctggaccggcccttcatcagcgagggcaccaccctgaaggacctgatctatgacatgaccaccagcggcagcggcagcggcctgcccctgctggtgcagaggaccatcgcccggaccatcgtgctgcaggagagcatcggcaagggccgctttggagaggtgtggaggggcaagtggagaggagaggaggtggccgtgaagatcttcagcagccgggaggagaggtcctggttccgggaggccgagatctaccagacagtgatgctgcggcatgagaacatcctgggcttcatcgctgctgacaacaaggacaatggcacctggacccagctgtggctggtgtctgactaccatgaacatggcagcctgtttgactacctgaaccgctacacagtgacagtggagggcatgatcaagctggccctgagcacagccagcggcctggcccacctgcacatggagatcgtgggcacccagggcaagccagccatcgcccccaaccaccgggtgggcaccaagcgctacatggcccctgaggtgctggatgacagcatcaacatgaagcactttgagagcttcaagagagctgacatctatgccatgggcctggtgttctgggagatcgcccggcgctgcagcattggaggcatccacgaggactaccagctgccctactatgacctggtgcccagcgaccccagcgtggaggagatgaggaaggtggtgtgtgagcagaagctgcggcccaacatccccaaccgctggcagagctgtgaggccctgcgggtgatggccaagatcatgagggagtgctggtacgccaacggggccgcccggctgacagccctgcgcatcaagaagaccctgagccagctgagccagcaggagggcatcaagatgtag

SEQ ID NO: 22279 - DNA, 216 bp, synthetic construct
  misc_feature 1..216: note = Description of Artificial Sequence: Synthetic coding sequence
  source 1..216: mol_type = other DNA
atggaggccgctgtggccgccccccggccccggctgctgctggccagcaccagcctgcagtgcttctgccacctgtgcaccaaggacaacttcacctgtgtgacagatggcctgtgctttgtgtctgtgacagagaccacagacaaggtgatccacaacagcatgtgcatcgccgagattgacctgatcccccgggaccggccctttgtgtgctag

SEQ ID NO: 22280 - DNA, 1305 bp, synthetic construct
  misc_feature 1..1305: note = Description of Artificial Sequence: Synthetic coding sequence
  source 1..1305: mol_type = other DNA
atgtgcatcgccgagattgacctgatcccccgggaccggccctttgtgtgtgcccccagcagcaagacaggctctgtgaccaccacctactgctgcaaccaggaccactgcaacaagattgagctgcccaccaccgtgaagagcagccctggcctgggccctgtggagctggccgctgtgattgctggccctgtgtgctttgtgtgcatcagcctgatgctgatggtgtacatctgccacaacagaactgtcatccaccaccgggtgcccaatgaggaggaccccagcctggaccggcccttcatcagcgagggcaccaccctgaaggacctgatctatgacatgaccaccagcggcagcggcagcggcctgcccctgctggtgcagaggaccatcgcccggaccatcgtgctgcaggagagcatcggcaagggccgctttggagaggtgtggaggggcaagtggagaggagaggaggtggccgtgaagatcttcagcagccgggaggagaggtcctggttccgggaggccgagatctaccagacagtgatgctgcggcatgagaacatcctgggcttcatcgctgctgacaacaaggacaatggcacctggacccagctgtggctggtgtctgactaccacgagcacggcagcctgtttgactacctgaaccgctacacagtgacagtggagggcatgatcaagctggccctgagcacagccagcggcctggcccacctgcacatggagatcgtgggcacccagggcaagccagccatcgcccaccgggacctgaagagcaagaacatcctggtgaagaagaatggcacctgctgcatcgctgacctgggcctggccgtgagacatgattctgccacagacaccatcgacatcgcccccaaccaccgggtgggcaccaagcgctacatggcccctgaggtgctggatgacagcatcaacatgaagcactttgagagcttcaagagagctgacatctatgccatgggcctggtgttctgggagatcgcccggcgctgcagcatcggcggcatccacgaggactaccagctgccctactatgacctggtgcccagcgaccccagcgtggaggagatgaggaaggtggtgtgtgagcagaagctgcggcccaacatccccaaccgctggcagagctgtgaggccctgcgggtgatggccaagatcatgagggagtgctggtacgccaatggagctgcccggctgacagccctgcgcatcaagaagaccctgagccagctgagccagcaggagggcatcaagatgtag

SEQ ID NO: 22281 - DNA, 411 bp, synthetic construct
  misc_feature 1..411: note = Description of Artificial Sequence: Synthetic coding sequence
  source 1..411: mol_type = other DNA
atgaaggacagcaaccgctgctgctgcggccagttcaccaaccagcacatcccccccctgcccagcgccacccccagcaagaatgaggaggagagcaagcaggtggagacccagcctgagaagtggagcgtggccaagcacacccagagctaccccacagacagctatggagtgctggagttccagggcggcggctacagcaacaaggccatggtgaggaaggccttccgccacggggccacccgcatcacagccttcatcggcggccagagccccagccccaagctgcagatccctggcctgctgcacggctgcggcagcatcttcctggacatcagcctgaagaaccaggagatctacctgtgcacctggctgctggccatgaggctgggcaactggacccccctgtag

SEQ ID NO: 22282 - DNA, 4878 bp, synthetic construct
  misc_feature 1..4878: note = Description of Artificial Sequence: Synthetic coding sequence
  source 1..4878: mol_type = other DNA
atgggccagaagtcctggattgagaagaccttctgcaagcgggagtgcatcttcgtcatccccagcatgaaggacagcaaccgctgctgctgcggccagttcaccaaccagcacatcccccccctgcccagcgccacccccagcaagaatgaggaggagagcaagcaggtggagacccagcctgagaagtggagcgtggccaagcacacccagagctaccccacagacagctatggagtgctggagttccagggcggcggctacagcaacaaggccatgtacatccgggtgtcctatgacaccaagccagacagcctgctgcacctgatggtgaaggactggcagctggagctgcccaagctgctgatctctgtgcacggcggcctgcagaactttgagatgcagcccaagctgaagcaggtgtttgggaagggcctcatcaaggccgccatgaccactggagcctggatcttcaccggaggagtgtccactggagtcatcagccacgtgggagatgccctgaaggaccacagcagcaagagccggggccgggtgtgtgccatcggcatcgccccctggggcatcgtggagaacaaggaggacctggtgggcaaggatgtgaccagggtgtaccagaccatgagcaaccccctgagcaagctgtctgtgctgaacaacagccacacccacttcatcctggccgacaatggcaccctgggcaagtacggggctgaggtgaagctgcggcggctgctggagaagcacatcagcctgcagaagatcaacacccggctgggccagggcgtgcccctggtgggcctggtggtggagggcggccccaacgtggtgtccatcgtgctggagtacctgcaggaggagccccccatccctgtggtgatctgtgatggcagcggccgggccagtgacatcctgagctttgcccacaagtactgtgaggagggcggcatcatcaatgaaagcctgcgggagcagctgctggtgaccatccagaagaccttcaactacaacaaggcccagagccaccagctgtttgccatcatcatggagtgcatgaagaagaaggagctggtgacagtgttcaggatgggcagcgagggccagcaggacatcgagatggccatcctgacagccctgctgaagggcaccaacgtgtctgccccagaccagctgagcctggccctggcctggaacagagtggacatcgcccggagccagatctttgtgtttggcccccactggccacccctgggcagcctggccccacccacagacagcaaggccacagagaaggagaagaagccacccatggccaccaccaagggcggccggggcaagggcaagggcaagaagaagggcaaggtgaaggaggaggtggaggaggagacagaccccaggaagattgagctgctgaactgggtgaatgccctggagcaggccatgctggatgccctggtgctggacagagtggactttgtgaagctgctgattgaaaatggagtgaacatgcagcacttcctgaccatcccccggctggaggagctgtacaacacccggctgggcccccccaacaccctgcacctgctggtgagagatgtgaagaagagcaacctgcccccagactaccacatcagcctgattgatattggcctggtgctggagtacctgatgggcggggcctaccgctgcaactacaccaggaagaacttccgcaccctgtacaacaacctgtttggccccaagaggcccaaggccctgaagctgctgggcatggaggatgatgagcccccagccaagggcaagaagaagaagaagaagaagaaggaggaggagattgatattgatgtggatgatcctgctgtgagccgcttccagtaccccttccacgagctgatggtgtgggccgtgctgatgaagaggcagaagatggctgtgttcctgtggcagagaggagaggagagcatggccaaggccctggtggcctgcaagctgtacaaggccatggcccacgagagcagcgagagtgacctggtggatgacatcagccaggacctggacaacaacagcaaggactttggccagctggccctggagctgctggaccagagctacaagcatgatgagcagatcgccatgaagctgctgacctatgagctgaagaactggagcaacagcacctgcctgaagctggccgtggccgccaagcaccgggacttcatcgcccacacctgcagccagatgctgctgacagacatgtggatgggccgcctgaggatgaggaagaaccctggcctgaaggtgatcatgggcatcctgctgccccccaccatcctcttcctggagttccgcacctatgatgacttctcctaccagaccagcaaagaaaatgaagatggcaaggagaaggaggaggagaacacagatgccaatgctgatgctggcagcaggaaaggagatgaagaaaatgagcacaagaagcagaggagcatccccatcggcaccaagatctgtgagttctacaatgcccccatcgtgaagttctggttctacaccatctcctacctgggctacctgctgctcttcaactacgtgatcctggtgaggatggatggctggcccagcctgcaggagtggatcgtcatctcctacatcgtgtccctggccctggagaagatccgggagatcctgatgtctgagcccgggaagctgagccagaagatcaaggtgtggctgcaggagtactggaacatcacagacctggtggccatcagcaccttcatgattggagccatcctgcggctgcagaaccagccctacatgggctacggccgggtcatctactgtgtggacatcatcttctggtacatccgggtgctggacatcttcggcgtgaacaagtacctgggcccctacgtgatgatgattggcaagatgatgattgacatgctgtactttgtggtgatcatgctggtggtgctgatgagctttggagtggcccggcaggccatcctgcaccctgaggagaagcccagctggaagctggccaggaacatcttctacatgccctactggatgatctatggagaggtgtttgctgaccagattgacctgtatgccatggagatcaaccccccctgtggggagaacctgtatgatgaggagggcaagaggctgcccccctgcatccctggggcctggctgaccccagccctgatggcctgctacctgctggtggccaacatcctgctggtgaacctgctgattgctgtgttcaacaacaccttctttgaggtgaagagcatcagcaaccaggtgtggaagttccagcgctaccagctgatcatgaccttccatgacaggcctgtgctgcccccacccatgatcatcctgagccacatctacatcatcatcatgaggctgagcggccgctgcaggaagaagcgggagggggaccaggaggagcgggaccggggcctgaagctgttcctgagtgatgaggagctgaagaggctgcacgagtttgaggagcagtgtgtgcaggagcacttccgggagaaggaggatgagcagcagagcagcagtgatgagcgcatccgggtgaccagcgagcgggtggagaacatgtccatgaggctggaggagatcaatgaaagagagaccttcatgaagaccagcctgcagacagtggacctgcggctggcccagctggaggagctgagcaacaggatggtgaatgccctggagaacctggccggcatcgacagaagtgacctgatccaggcccggagccgggccagcagtgaatgtgaggccacctacctgctgcggcagagcagcatcaacagcgcagatggctacagcctgtaccgctaccacttcaacggggaggagctgctgtttgaggacaccagcctgagcaccagccctggcactggagtgaggaagaagacctgcagcttccgcatcaaggaggagaaggatgtgaagacccacctggtgcctgagtgccagaacagcctgcacctgagcctgggcaccagcaccagcgccaccccagatggcagccacctggccgtggatgacctgaagaatgctgaggagagcaagctgggccctgacatcggcatcagcaaagaagatgatgagcggcagacagacagcaagaaggaggagaccatcagccccagcctgaacaagacagatgtgatccacggccaggacaagagtgatgtgcagaacacccagctgactgtggagaccaccaacatcgagggcaccatctcctaccccctggaggagaccaagatcacccgctacttcccagatgagaccatcaatgcctgcaagaccatgaagagccgcagctttgtgtacagccggggcaggaagctggtgggcggcgtgaaccaggatgtggagtacagcagcatcacagaccagcagctgaccacagagtggcagtgccaggtgcagaagatcaccaggagccacagcacagacatcccctacatcgtgtctgaggccgctgtgcaggccgagcacaaggagcagtttgctgacatgcaggatgagcaccacgtggccgaggccatcccccgcatcccccggctgagcctgaccatcacagacagaaatggcatggagaacctgctgtctgtgaagccagaccagaccctgggcttccccagcctgcggagcaagagcctgcacggccaccccagaaatgtgaagagcatccagggcaagctggacaggagcggccacgccagctctgtgagcagcctggtgattgtgtctggcatgacagctgaggagaagaaggtgaagaaggagaaggccagcacagaaacagagtgctag

SEQ ID NO: 22283 - DNA, 4812 bp, synthetic construct
  misc_feature 1..4812: note = Description of Artificial Sequence: Synthetic coding sequence
  source 1..4812: mol_type = other DNA
atcaagaccagcaagcgctgctgctgcggccagttcaccaaccagcacatcccccccctgcccagcgccacccccagcaagaatgaggaggagagcaagcaggtggagacccagcctgagaagtggagcgtggccaagcacacccagagctaccccacagacagctatggagtgctggagttccagggcggcggctacagcaacaaggccatgtacatccgggtgtcctatgacaccaagccagacagcctgctgcacctgatggtgaaggactggcagctggagctgcccaagctgctgatctctgtgcacggcggcctgcagaactttgagatgcagcccaagctgaagcaggtgtttgggaagggcctcatcaaggccgccatgaccactggagcctggatcttcaccggaggagtgtccactggagtcatcagccacgtgggagatgccctgaaggaccacagcagcaagagccggggccgggtgtgtgccatcggcatcgccccctggggcatcgtggagaacaaggaggacctggtgggcaaggatgtgaccagggtgtaccagaccatgagcaaccccctgagcaagctgtctgtgctgaacaacagccacacccacttcatcctggccgacaatggcaccctgggcaagtacggggctgaggtgaagctgcggcggctgctggagaagcacatcagcctgcagaagatcaacacccggctgggccagggcgtgcccctggtgggcctggtggtggagggcggccccaacgtggtgtccatcgtgctggagtacctgcaggaggagccccccatccctgtggtgatctgtgatggcagcggccgggccagtgacatcctgagctttgcccacaagtactgtgaggagggcggcatcatcaatgaaagcctgcgggagcagctgctggtgaccatccagaagaccttcaactacaacaaggcccagagccaccagctgtttgccatcatcatggagtgcatgaagaagaaggagctggtgacagtgttcaggatgggcagcgagggccagcaggacatcgagatggccatcctgacagccctgctgaagggcaccaacgtgtctgccccagaccagctgagcctggccctggcctggaacagagtggacatcgcccggagccagatctttgtgtttggcccccactggccacccctgggcagcctggccccacccacagacagcaaggccacagagaaggagaagaagccacccatggccaccaccaagggcggccggggcaagggcaagggcaagaagaagggcaaggtgaaggaggaggtggaggaggagacagaccccaggaagattgagctgctgaactgggtgaatgccctggagcaggccatgctggatgccctggtgctggacagagtggactttgtgaagctgctgattgaaaatggagtgaacatgcagcacttcctgaccatcccccggctggaggagctgtacaacacccggctgggcccccccaacaccctgcacctgctggtgagagatgtgaagaagagcaacctgcccccagactaccacatcagcctgattgatattggcctggtgctggagtacctgatgggcggggcctaccgctgcaactacaccaggaagaacttccgcaccctgtacaacaacctgtttggccccaagaggcccaaggccctgaagctgctgggcatggaggatgatgagcccccagccaagggcaagaagaagaagaagaagaagaaggaggaggagattgatattgatgtggatgatcctgctgtgagccgcttccagtaccccttccacgagctgatggtgtgggccgtgctgatgaagaggcagaagatggctgtgttcctgtggcagagaggagaggagagcatggccaaggccctggtggcctgcaagctgtacaaggccatggcccacgagagcagcgagagtgacctggtggatgacatcagccaggacctggacaacaacagcaaggactttggccagctggccctggagctgctggaccagagctacaagcatgatgagcagatcgccatgaagctgctgacctatgagctgaagaactggagcaacagcacctgcctgaagctggccgtggccgccaagcaccgggacttcatcgcccacacctgcagccagatgctgctgacagacatgtggatgggccgcctgaggatgaggaagaaccctggcctgaaggtgatcatgggcatcctgctgccccccaccatcctcttcctggagttccgcacctatgatgacttctcctaccagaccagcaaagaaaatgaagatggcaaggagaaggaggaggagaacacagatgccaatgctgatgctggcagcaggaaaggagatgaagaaaatgagcacaagaagcagaggagcatccccatcggcaccaagatctgtgagttctacaatgcccccatcgtgaagttctggttctacaccatctcctacctgggctacctgctgctcttcaactacgtgatcctggtgaggatggatggctggcccagcctgcaggagtggatcgtcatctcctacatcgtgtccctggccctggagaagatccgggagatcctgatgtctgagcccgggaagctgagccagaagatcaaggtgtggctgcaggagtactggaacatcacagacctggtggccatcagcaccttcatgattggagccatcctgcggctgcagaaccagccctacatgggctacggccgggtcatctactgtgtggacatcatcttctggtacatccgggtgctggacatcttcggcgtgaacaagtacctgggcccctacgtgatgatgattggcaagatgatgattgacatgctgtactttgtggtgatcatgctggtggtgctgatgagctttggagtggcccggcaggccatcctgcaccctgaggagaagcccagctggaagctggccaggaacatcttctacatgccctactggatgatctatggagaggtgtttgctgaccagattgacctgtatgccatggagatcaaccccccctgtggggagaacctgtatgatgaggagggcaagaggctgcccccctgcatccctggggcctggctgaccccagccctgatggcctgctacctgctggtggccaacatcctgctggtgaacctgctgattgctgtgttcaacaacaccttctttgaggtgaagagcatcagcaaccaggtgtggaagttccagcgctaccagctgatcatgaccttccatgacaggcctgtgctgcccccacccatgatcatcctgagccacatctacatcatcatcatgaggctgagcggccgctgcaggaagaagcgggagggggaccaggaggagcgggaccggggcctgaagctgttcctgagtgatgaggagctgaagaggctgcacgagtttgaggagcagtgtgtgcaggagcacttccgggagaaggaggatgagcagcagagcagcagtgatgagcgcatccgggtgaccagcgagcgggtggagaacatgtccatgaggctggaggagatcaatgaaagagagaccttcatgaagaccagcctgcagacagtggacctgcggctggcccagctggaggagctgagcaacaggatggtgaatgccctggagaacctggccggcatcgacagaagtgacctgatccaggcccggagccgggccagcagtgaatgtgaggccacctacctgctgcggcagagcagcatcaacagcgcagatggctacagcctgtaccgctaccacttcaacggggaggagctgctgtttgaggacaccagcctgagcaccagccctggcactggagtgaggaagaagacctgcagcttccgcatcaaggaggagaaggatgtgaagacccacctggtgcctgagtgccagaacagcctgcacctgagcctgggcaccagcaccagcgccaccccagatggcagccacctggccgtggatgacctgaagaatgctgaggagagcaagctgggccctgacatcggcatcagcaaagaagatgatgagcggcagacagacagcaagaaggaggagaccatcagccccagcctgaacaagacagatgtgatccacggccaggacaagagtgatgtgcagaacacccagctgactgtggagaccaccaacatcgagggcaccatctcctaccccctggaggagaccaagatcacccgctacttcccagatgagaccatcaatgcctgcaagaccatgaagagccgcagctttgtgtacagccggggcaggaagctggtgggcggcgtgaaccaggatgtggagtacagcagcatcacagaccagcagctgaccacagagtggcagtgccaggtgcagaagatcaccaggagccacagcacagacatcccctacatcgtgtctgaggccgctgtgcaggccgagcacaaggagcagtttgctgacatgcaggatgagcaccacgtggccgaggccatcccccgcatcccccggctgagcctgaccatcacagacagaaatggcatggagaacctgctgtctgtgaagccagaccagaccctgggcttccccagcctgcggagcaagagcctgcacggccaccccagaaatgtgaagagcatccagggcaagctggacaggagcggccacgccagctctgtgagcagcctggtgattgtgtctggcatgacagctgaggagaagaaggtgaagaaggagaaggccagcacagaaacagagtgctag

SEQ ID NO: 22284 - DNA, 4812 bp, synthetic construct
  misc_feature 1..4812: note = Description of Artificial Sequence: Synthetic coding sequence
  source 1..4812: mol_type = other DNA
atgaaggacagcaaccgctgctgctgcggccagttcaccaaccagcacatcccccccctgcccagcgccacccccagcaagaatgaggaggagagcaagcaggtggagacccagcctgagaagtggagcgtggccaagcacacccagagctaccccacagacagctatggagtgctggagttccagggcggcggctacagcaacaaggccatgtacatccgggtgtcctatgacaccaagccagacagcctgctgcacctgatggtgaaggactggcagctggagctgcccaagctgctgatctctgtgcacggcggcctgcagaactttgagatgcagcccaagctgaagcaggtgtttgggaagggcctcatcaaggccgccatgaccactggagcctggatcttcaccggaggagtgtccactggagtcatcagccacgtgggagatgccctgaaggaccacagcagcaagagccggggccgggtgtgtgccatcggcatcgccccctggggcatcgtggagaacaaggaggacctggtgggcaaggatgtgaccagggtgtaccagaccatgagcaaccccctgagcaagctgtctgtgctgaacaacagccacacccacttcatcctggccgacaatggcaccctgggcaagtacggggctgaggtgaagctgcggcggctgctggagaagcacatcagcctgcagaagatcaacacccggctgggccagggcgtgcccctggtgggcctggtggtggagggcggccccaacgtggtgtccatcgtgctggagtacctgcaggaggagccccccatccctgtggtgatctgtgatggcagcggccgggccagtgacatcctgagctttgcccacaagtactgtgaggagggcggcatcatcaatgaaagcctgcgggagcagctgctggtgaccatccagaagaccttcaactacaacaaggcccagagccaccagctgtttgccatcatcatggagtgcatgaagaagaaggagctggtgacagtgttcaggatgggcagcgagggccagcaggacatcgagatggccatcctgacagccctgctgaagggcaccaacgtgtctgccccagaccagctgagcctggccctggcctggaacagagtggacatcgcccggagccagatctttgtgtttggcccccactggccacccctgggcagcctggccccacccacagacagcaaggccacagagaaggagaagaagccacccatggccaccaccaagggcggccggggcaagggcaagggcaagaagaagggcaaggtgaaggaggaggtggaggaggagacagaccccaggaagattgagctgctgaactgggtgaatgccctggagcaggccatgctggatgccctggtgctggacagagtggactttgtgaagctgctgattgaaaatggagtgaacatgcagcacttcctgaccatcccccggctggaggagctgtacaacacccggctgggcccccccaacaccctgcacctgctggtgagagatgtgaagaagagcaacctgcccccagactaccacatcagcctgattgatattggcctggtgctggagtacctgatgggcggggcctaccgctgcaactacaccaggaagaacttccgcaccctgtacaacaacctgtttggccccaagaggcccaaggccctgaagctgctgggcatggaggatgatgagcccccagccaagggcaagaagaagaagaagaagaagaaggaggaggagattgatattgatgtggatgatcctgctgtgagccgcttccagtaccccttccacgagctgatggtgtgggccgtgctgatgaagaggcagaagatggctgtgttcctgtggcagagaggagaggagagcatggccaaggccctggtggcctgcaagctgtacaaggccatggcccacgagagcagcgagagtgacctggtggatgacatcagccaggacctggacaacaacagcaaggactttggccagctggccctggagctgctggaccagagctacaagcatgatgagcagatcgccatgaagctgctgacctatgagctgaagaactggagcaacagcacctgcctgaagctggccgtggccgccaagcaccgggacttcatcgcccacacctgcagccagatgctgctgacagacatgtggatgggccgcctgaggatgaggaagaaccctggcctgaaggtgatcatgggcatcctgctgccccccaccatcctcttcctggagttccgcacctatgatgacttctcctaccagaccagcaaagaaaatgaagatggcaaggagaaggaggaggagaacacagatgccaatgctgatgctggcagcaggaaaggagatgaagaaaatgagcacaagaagcagaggagcatccccatcggcaccaagatctgtgagttctacaatgcccccatcgtgaagttctggttctacaccatctcctacctgggctacctgctgctcttcaactacgtgatcctggtgaggatggatggctggcccagcctgcaggagtggatcgtcatctcctacatcgtgtccctggccctggagaagatccgggagatcctgatgtctgagcccgggaagctgagccagaagatcaaggtgtggctgcaggagtactggaacatcacagacctggtggccatcagcaccttcatgattggagccatcctgcggctgcagaaccagccctacatgggctacggccgggtcatctactgtgtggacatcatcttctggtacatccgggtgctggacatcttcggcgtgaacaagtacctgggcccctacgtgatgatgattggcaagatgatgattgacatgctgtactttgtggtgatcatgctggtggtgctgatgagctttggagtggcccggcaggccatcctgcaccctgaggagaagcccagctggaagctggccaggaacatcttctacatgccctactggatgatctatggagaggtgtttgctgaccagattgacctgtatgccatggagatcaaccccccctgtggggagaacctgtatgatgaggagggcaagaggctgcccccctgcatccctggggcctggctgaccccagccctgatggcctgctacctgctggtggccaacatcctgctggtgaacctgctgattgctgtgttcaacaacaccttctttgaggtgaagagcatcagcaaccaggtgtggaagttccagcgctaccagctgatcatgaccttccatgacaggcctgtgctgcccccacccatgatcatcctgagccacatctacatcatcatcatgaggctgagcggccgctgcaggaagaagcgggagggggaccaggaggagcgggaccggggcctgaagctgttcctgagtgatgaggagctgaagaggctgcacgagtttgaggagcagtgtgtgcaggagcacttccgggagaaggaggatgagcagcagagcagcagtgatgagcgcatccgggtgaccagcgagcgggtggagaacatgtccatgaggctggaggagatcaatgaaagagagaccttcatgaagaccagcctgcagacagtggacctgcggctggcccagctggaggagctgagcaacaggatggtgaatgccctggagaacctggccggcatcgacagaagtgacctgatccaggcccggagccgggccagcagtgaatgtgaggccacctacctgctgcggcagagcagcatcaacagcgcagatggctacagcctgtaccgctaccacttcaacggggaggagctgctgtttgaggacaccagcctgagcaccagccctggcactggagtgaggaagaagacctgcagcttccgcatcaaggaggagaaggatgtgaagacccacctggtgcctgagtgccagaacagcctgcacctgagcctgggcaccagcaccagcgccaccccagatggcagccacctggccgtggatgacctgaagaatgctgaggagagcaagctgggccctgacatcggcatcagcaaagaagatgatgagcggcagacagacagcaagaaggaggagaccatcagccccagcctgaacaagacagatgtgatccacggccaggacaagagtgatgtgcagaacacccagctgactgtggagaccaccaacatcgagggcaccatctcctaccccctggaggagaccaagatcacccgctacttcccagatgagaccatcaatgcctgcaagaccatgaagagccgcagctttgtgtacagccggggcaggaagctggtgggcggcgtgaaccaggatgtggagtacagcagcatcacagaccagcagctgaccacagagtggcagtgccaggtgcagaagatcaccaggagccacagcacagacatcccctacatcgtgtctgaggccgctgtgcaggccgagcacaaggagcagtttgctgacatgcaggatgagcaccacgtggccgaggccatcccccgcatcccccggctgagcctgaccatcacagacagaaatggcatggagaacctgctgtctgtgaagccagaccagaccctgggcttccccagcctgcggagcaagagcctgcacggccaccccagaaatgtgaagagcatccagggcaagctggacaggagcggccacgccagctctgtgagcagcctggtgattgtgtctggcatgacagctgaggagaagaaggtgaagaaggagaaggccagcacagaaacagagtgctag

SEQ ID NO: 22285 - DNA, 4929 bp, synthetic construct
  misc_feature 1..4929: note = Description of Artificial Sequence: Synthetic coding sequence
  source 1..4929: mol_type = other DNA
atgagcagcttcaagaggggcagcctgaagagcagcaccagcggcagccagaagggccagaagtcctggattgagaagaccttctgcaagcgggagtgcatctttgtgatccccagcatgaaggacagcaaccgctgctgctgcggccagttcaccaaccagcacatcccccccctgcccagcgccacccccagcaagaatgaggaggagagcaagcaggtggagacccagcctgagaagtggagcgtggccaagcacacccagagctaccccacagacagctatggagtgctggagttccagggcggcggctacagcaacaaggccatgtacatccgggtgtcctatgacaccaagccagacagcctgctgcacctgatggtgaaggactggcagctggagctgcccaagctgctgatctctgtgcatggaggcctgcagaactttgagatgcagcccaagctgaagcaggtgtttgggaagggcctcatcaaggccgccatgaccaccggggcctggatcttcaccggcggcgtgtccactggagtcatcagccacgtgggagatgccctgaaggaccacagcagcaagagccggggccgggtgtgtgccatcggcatcgccccctggggcatcgtggagaacaaggaggacctggtgggcaaggatgtgaccagggtgtaccagaccatgagcaaccccctgagcaagctgtctgtgctgaacaacagccacacccacttcatcctggccgacaatggcaccctgggcaagtatggagctgaggtgaagctgcggcggctgctggagaagcacatcagcctgcagaagatcaacacccggctgggccagggcgtgcccctggtgggcctggtggtggagggcggccccaacgtggtgtccatcgtgctggagtacctgcaggaggagccccccatccctgtggtgatctgtgatggcagcggccgggccagtgacatcctgagctttgcccacaagtactgtgaggagggcggcatcatcaatgaaagcctgcgggagcagctgctggtgaccatccagaagaccttcaactacaacaaggcccagagccaccagctgtttgccatcatcatggagtgcatgaagaagaaggagctggtgaccgtcttcaggatgggcagcgagggccagcaggacatcgagatggccatcctgacagccctgctgaagggcaccaacgtgtctgccccagaccagctgagcctggccctggcctggaacagagtggacatcgcccggagccagatctttgtgtttggcccccactggccacccctgggcagcctggccccacccacagacagcaaggccacagagaaggagaagaagccacccatggccaccaccaagggcggccggggcaagggcaagggcaagaagaagggcaaggtgaaggaggaggtggaggaggagacagaccccaggaagattgagctgctgaactgggtgaatgccctggagcaggccatgctggatgccctggtgctggacagagtggactttgtgaagctgctgattgaaaatggagtgaacatgcagcacttcctgaccatcccccggctggaggagctgtacaacacccggctgggcccccccaacaccctgcacctgctggtgagagatgtgaagaagagcaacctgcccccagactaccacatcagcctgattgacatcggcctggtgctggagtacctgatgggcggggcctaccgctgcaactacaccaggaagaacttccgcaccctgtacaacaacctgtttggccccaagaggcccaaggccctgaagctgctgggcatggaggatgatgagcccccagccaagggcaagaagaagaagaagaagaagaaggaggaggagattgatattgatgtggatgatcctgctgtgagccgcttccagtaccccttccacgagctgatggtgtgggccgtgctgatgaagaggcagaagatggctgtgttcctgtggcagagaggagaggagagcatggccaaggccctggtggcctgcaagctgtacaaggccatggcccacgagagcagcgagagtgacctggtggatgacatcagccaggacctggacaacaacagcaaggactttggccagctggccctggagctgctggaccagagctacaagcatgatgagcagatcgccatgaagctgctgacctatgagctgaagaactggagcaacagcacctgcctgaagctggccgtggccgccaagcaccgggacttcatcgcccacacctgcagccagatgctgctgacagacatgtggatgggccgcctgaggatgaggaagaaccctggcctgaaggtgatcatgggcatcctgctgccccccaccatcctcttcctggagttccgcacctatgatgacttctcctaccagaccagcaaagaaaatgaagatggcaaggagaaggaggaggagaacacagatgccaatgctgatgctggcagcaggaaaggagatgaggagaatgagcacaagaagcagaggagcatccccatcggcaccaagatctgtgagttctacaatgcccccatcgtgaagttctggttctacaccatctcctacctgggctacctgctgctcttcaactacgtgatcctggtgaggatggatggctggcccagcctgcaggagtggatcgtcatctcctacatcgtgtccctggccctggagaagatccgggagatcctgatgtctgagcccgggaagctgagccagaagatcaaggtgtggctgcaggagtactggaacatcacagacctggtggccatcagcaccttcatgattggagccatcctgcggctgcagaaccagccctacatgggctacggccgggtcatctactgtgtggacatcatcttctggtacatccgggtgctggacatctttggagtgaacaagtacctgggcccctacgtgatgatgattggcaagatgatgattgacatgctgtactttgtggtgatcatgctggtggtgctgatgagctttggagtggcccggcaggccatcctgcaccctgaggagaagcccagctggaagctggccaggaacatcttctacatgccctactggatgatctacggggaggtgtttgctgaccagattgacctgtatgccatggagatcaaccccccctgtggggagaacctgtatgatgaggagggcaagaggctgcccccctgcatccctggggcctggctgaccccagccctgatggcctgctacctgctggtggccaacatcctgctggtgaacctgctgattgctgtgttcaacaacaccttctttgaggtgaagagcatcagcaaccaggtgtggaagttccagcgctaccagctgatcatgaccttccatgacaggcctgtgctgcccccacccatgatcatcctgagccacatctacatcatcatcatgaggctgagcggccgctgcaggaagaagcgggagggggaccaggaggagcgggaccggggcctgaagctgttcctgagtgatgaggagctgaagaggctgcatgaatttgaggagcagtgtgtgcaggagcacttccgggagaaggaggatgagcagcagagcagcagtgatgagcgcatccgggtgaccagcgagcgggtggagaacatgtccatgaggctggaggagatcaatgaaagagagaccttcatgaagaccagcctgcagacagtggacctgcggctggcccagctggaggagctgagcaacaggatggtgaatgccctggagaacctggccggcatcgacagaagtgacctgatccaggcccggagccgggccagcagtgaatgtgaggccacctacctgctgcggcagagcagcatcaacagcgcagatggctacagcctgtaccgctaccacttcaatggagaggagctgctgtttgaggacaccagcctgagcaccagccctggcaccggggtgaggaagaagacctgcagcttccgcatcaaggaggagaaggatgtgaagacccacctggtgcctgagtgccagaacagcctgcacctgagcctgggcaccagcaccagcgccaccccagatggcagccacctggccgtggatgacctgaagaatgctgaggagagcaagctgggccctgacatcggcatcagcaaggaggatgatgagcggcagacagacagcaagaaggaggagaccatcagccccagcctgaacaagacagatgtgattcatggccaggacaagagtgatgtgcagaacacccagctgactgtggagaccaccaacatcgagggcaccatctcctaccccctggaggagaccaagatcacccgctacttcccagatgagaccatcaatgcctgcaagaccatgaagagccgcagctttgtgtacagccggggcaggaagctggtgggcggcgtgaaccaggatgtggagtacagcagcatcacagaccagcagctgaccacagagtggcagtgccaggtgcagaagatcaccaggagccacagcacagacatcccctacatcgtgtctgaggccgctgtgcaggccgagcacaaggagcagtttgctgacatgcaggatgagcaccacgtggccgaggccatcccccgcatcccccggctgagcctgaccatcacagacagaaatggcatggagaacctgctgtctgtgaagccagaccagaccctgggcttccccagcctgcggagcaagagcctgcacggccaccccagaaatgtgaagagcatccagggcaagctggacagaagtggccacgccagctctgtgagcagcctggtgattgtgtctggcatgacagctgaggagaagaaggtgaagaaggagaaggccagcacagaaacagaatgttag

SEQ ID NO: 22286 - DNA, 4173 bp, synthetic construct
  misc_feature 1..4173: note = Description of Artificial Sequence: Synthetic coding sequence
  source 1..4173: mol_type = other DNA
atgaaggacagcaaccgctgctgctgcggccagttcaccaaccagcacatcccccccctgcccagcgccacccccagcaagaatgaggaggagagcaagcaggtggagacccagcctgagaagtggagcgtggccaagcacacccagagctaccccacagacagctatggagtgctggagttccagggcggcggctacagcaacaaggccatgtacatccgggtgtcctatgacaccaagccagacagcctgctgcacctgatggtgaaggactggcagctggagctgcccaagctgctgatctctgtgcacggcggcctgcagaactttgagatgcagcccaagctgaagcaggtgtttgggaagggcctcatcaaggccgccatgaccactggagcctggatcttcaccggaggagtgtccactggagtcatcagccacgtgggagatgccctgaaggaccacagcagcaagagccggggccgggtgtgtgccatcggcatcgccccctggggcatcgtggagaacaaggaggacctggtgggcaaggatgtgaccagggtgtaccagaccatgagcaaccccctgagcaagctgtctgtgctgaacaacagccacacccacttcatcctggccgacaatggcaccctgggcaagtacggggctgaggtgaagctgcggcggctgctggagaagcacatcagcctgcagaagatcaacacccggctgggccagggcgtgcccctggtgggcctggtggtggagggcggccccaacgtggtgtccatcgtgctggagtacctgcaggaggagccccccatccctgtggtgatctgtgatggcagcggccgggccagtgacatcctgagctttgcccacaagtactgtgaggagggcggcatcatcaatgaaagcctgcgggagcagctgctggtgaccatccagaagaccttcaactacaacaaggcccagagccaccagctgtttgccatcatcatggagtgcatgaagaagaaggagctggtgacagtgttcaggatgggcagcgagggccagcaggacatcgagatggccatcctgacagccctgctgaagggcaccaacgtgtctgccccagaccagctgagcctggccctggcctggaacagagtggacatcgcccggagccagatctttgtgtttggcccccactggccacccctgggcagcctggccccacccacagacagcaaggccacagagaaggagaagaagccacccatggccaccaccaagggcggccggggcaagggcaagggcaagaagaagggcaaggtgaaggaggaggtggaggaggagacagaccccaggaagattgagctgctgaactgggtgaatgccctggagcaggccatgctggatgccctggtgctggacagagtggactttgtgaagctgctgattgaaaatggagtgaacatgcagcacttcctgaccatcccccggctggaggagctgtacaacacccggctgggcccccccaacaccctgcacctgctggtgagagatgtgaagaagagcaacctgcccccagactaccacatcagcctgattgatattggcctggtgctggagtacctgatgggcggggcctaccgctgcaactacaccaggaagaacttccgcaccctgtacaacaacctgtttggccccaagaggcccaaggccctgaagctgctgggcatggaggatgatgagcccccagccaagggcaagaagaagaagaagaagaagaaggaggaggagattgatattgatgtggatgatcctgctgtgagccgcttccagtaccccttccacgagctgatggtgtgggccgtgctgatgaagaggcagaagatggctgtgttcctgtggcagagaggagaggagagcatggccaaggccctggtggcctgcaagctgtacaaggccatggcccacgagagcagcgagagtgacctggtggatgacatcagccaggacctggacaacaacagcaaggactttggccagctggccctggagctgctggaccagagctacaagcatgatgagcagatcgccatgaagctgctgacctatgagctgaagaactggagcaacagcacctgcctgaagctggccgtggccgccaagcaccgggacttcatcgcccacacctgcagccagatgctgctgacagacatgtggatgggccgcctgaggatgaggaagaaccctggcctgaaggtgatcatgggcatcctgctgccccccaccatcctcttcctggagttccgcacctatgatgacttctcctaccagaccagcaaagaaaatgaagatggcaaggagaaggaggaggagaacacagatgccaatgctgatgctggcagcaggaaaggagatgaagaaaatgagcacaagaagcagaggagcatccccatcggcaccaagatctgtgagttctacaatgcccccatcgtgaagttctggttctacaccatctcctacctgggctacctgctgctcttcaactacgtgatcctggtgaggatggatggctggcccagcctgcaggagtggatcgtcatctcctacatcgtgtccctggccctggagaagatccgggagatcctgatgtctgagcccgggaagctgagccagaagatcaaggtgtggctgcaggagtactggaacatcacagacctggtggccatcagcaccttcatgattggagccatcctgcggctgcagaaccagccctacatgggctacggccgggtcatctactgtgtggacatcatcttctggtacatccgggtgctggacatcttcggcgtgaacaagtacctgggcccctacgtgatgatgattggcaagatgatgattgacatgctgtactttgtggtgatcatgctggtggtgctgatgagctttggagtggcccggcaggccatcctgcaccctgaggagaagcccagctggaagctggccaggaacatcttctacatgccctactggatgatctatggagaggtgtttgctgaccagattgacctgtatgccatggagatcaaccccccctgtggggagaacctgtatgatgaggagggcaagaggctgcccccctgcatccctggggcctggctgaccccagccctgatggcctgctacctgctggtggccaacatcctgctggtgaacctgctgattgctgtgttcaacaacaccttctttgaggtgaagagcatcagcaaccaggtgtggaagttccagcgctaccagctgatcatgaccttccatgacaggcctgtgctgcccccacccatgatcatcctgagccacatctacatcatcatcatgaggctgagcggccgctgcaggaagaagcgggagggggaccaggaggagcgggaccggggcctgaagctgttcctgagtgatgaggagctgaagaggctgcacgagtttgaggagcagtgtgtgcaggagcacttccgggagaaggaggatgagcagcagagcagcagtgatgagcgcatccgggtgaccagcgagcgggtggagaacatgtccatgaggctggaggagatcaatgaaagagagaccttcatgaagaccagcctgcagacagtggacctgcggctggcccagctggaggagctgagcaacaggatggtgaatgccctggagaacctggccggcatcgacagaagtgacctgatccaggcccggagccgggccagcagtgaatgtgaggccacctacctgctgcggcagagcagcatcaacagcgcagatggctacagcctgtaccgctaccacttcaacggggaggagctgctgtttgaggacaccagcctgagcaccagccctggcactggagtgaggaagaagacctgcagcttccgcatcaaggaggagaaggatgtgaagacccacctggtgcctgagtgccagaacagcctgcacctgagcctgggcaccagcaccagcgccaccccagatggcagccacctggccgtggatgacctgaagaatgctgaggagagcaagctgggccctgacatcggcatcagcaaagaagatgatgagcggcagacagacagcaagaaggaggagaccatcagccccagcctgaacaagacagatgtgatccacggccagtag

SEQ ID NO: 22287 - DNA, 4584 bp, synthetic construct
  misc_feature 1..4584: note = Description of Artificial Sequence: Synthetic coding sequence
  source 1..4584: mol_type = other DNA
atgtacatccgggtgtcctatgacaccaagccagacagcctgctgcacctgatggtgaaggactggcagctggagctgcccaagctgctgatctctgtgcacggcggcctgcagaactttgagatgcagcccaagctgaagcaggtgtttgggaagggcctcatcaaggccgccatgaccactggagcctggatcttcaccggaggagtgtccactggagtcatcagccacgtgggagatgccctgaaggaccacagcagcaagagccggggccgggtgtgtgccatcggcatcgccccctggggcatcgtggagaacaaggaggacctggtgggcaaggatgtgaccagggtgtaccagaccatgagcaaccccctgagcaagctgtctgtgctgaacaacagccacacccacttcatcctggccgacaatggcaccctgggcaagtacggggctgaggtgaagctgcggcggctgctggagaagcacatcagcctgcagaagatcaacacccggctgggccagggcgtgcccctggtgggcctggtggtggagggcggccccaacgtggtgtccatcgtgctggagtacctgcaggaggagccccccatccctgtggtgatctgtgatggcagcggccgggccagtgacatcctgagctttgcccacaagatcatcaatgaaagcctgcgggagcagctgctggtgaccatccagaagaccttcaactacaacaaggcccagagccaccagctgtttgccatcatcatggagtgcatgaagaagaaggagctggtgacagtgttcaggatgggcagcgagggccagcaggacatcgagatggccatcctgacagccctgctgaagggcaccaacgtgtctgccccagaccagctgagcctggccctggcctggaacagagtggacatcgcccggagccagatctttgtgtttggcccccactggccacccctgggcagcctggccccacccacagacagcaaggccacagagaaggagaagaagccacccatggccaccaccaagggcggccggggcaagggcaagggcaagaagaagggcaaggtgaaggaggaggtggaggaggagacagaccccaggaagattgagctgctgaactgggtgaatgccctggagcaggccatgctggatgccctggtgctggacagagtggactttgtgaagctgctgattgaaaatggagtgaacatgcagcacttcctgaccatcccccggctggaggagctgtacaacacccggctgggcccccccaacaccctgcacctgctggtgagagatgtgaagaagagcaacctgcccccagactaccacatcagcctgattgatattggcctggtgctggagtacctgatgggcggggcctaccgctgcaactacaccaggaagaacttccgcaccctgtacaacaacctgtttggccccaagaggcccaaggccctgaagctgctgggcatggaggatgatgagcccccagccaagggcaagaagaagaagaagaagaagaaggaggaggagattgatattgatgtggatgatcctgctgtgagccgcttccagtaccccttccacgagctgatggtgtgggccgtgctgatgaagaggcagaagatggctgtgttcctgtggcagagaggagaggagagcatggccaaggccctggtggcctgcaagctgtacaaggccatggcccacgagagcagcgagagtgacctggtggatgacatcagccaggacctggacaacaacagcaaggactttggccagctggccctggagctgctggaccagagctacaagcatgatgagcagatcgccatgaagctgctgacctatgagctgaagaactggagcaacagcacctgcctgaagctggccgtggccgccaagcaccgggacttcatcgcccacacctgcagccagatgctgctgacagacatgtggatgggccgcctgaggatgaggaagaaccctggcctgaaggtgatcatgggcatcctgctgccccccaccatcctcttcctggagttccgcacctatgatgacttctcctaccagaccagcaaagaaaatgaagatggcaaggagaaggaggaggagaacacagatgccaatgctgatgctggcagcaggaaaggagatgaagaaaatgagcacaagaagcagaggagcatccccatcggcaccaagatctgtgagttctacaatgcccccatcgtgaagttctggttctacaccatctcctacctgggctacctgctgctcttcaactacgtgatcctggtgaggatggatggctggcccagcctgcaggagtggatcgtcatctcctacatcgtgtccctggccctggagaagatccgggagatcctgatgtctgagcccgggaagctgagccagaagatcaaggtgtggctgcaggagtactggaacatcacagacctggtggccatcagcaccttcatgattggagccatcctgcggctgcagaaccagccctacatgggctacggccgggtcatctactgtgtggacatcatcttctggtacatccgggtgctggacatcttcggcgtgaacaagtacctgggcccctacgtgatgatgattggcaagatgatgattgacatgctgtactttgtggtgatcatgctggtggtgctgatgagctttggagtggcccggcaggccatcctgcaccctgaggagaagcccagctggaagctggccaggaacatcttctacatgccctactggatgatctatggagaggtgtttgctgaccagattgacctgtatgccatggagatcaaccccccctgtggggagaacctgtatgatgaggagggcaagaggctgcccccctgcatccctggggcctggctgaccccagccctgatggcctgctacctgctggtggccaacatcctgctggtgaacctgctgattgctgtgttcaacaacaccttctttgaggtgaagagcatcagcaaccaggtgtggaagttccagcgctaccagctgatcatgaccttccatgacaggcctgtgctgcccccacccatgatcatcctgagccacatctacatcatcatcatgaggctgagcggccgctgcaggaagaagcgggagggggaccaggaggagcgggaccggggcctgaagctgttcctgagtgatgaggagctgaagaggctgcacgagtttgaggagcagtgtgtgcaggagcacttccgggagaaggaggatgagcagcagagcagcagtgatgagcgcatccgggtgaccagcgagcgggtggagaacatgtccatgaggctggaggagatcaatgaaagagagaccttcatgaagaccagcctgcagacagtggacctgcggctggcccagctggaggagctgagcaacaggatggtgaatgccctggagaacctggccggcatcgacagaagtgacctgatccaggcccggagccgggccagcagtgaatgtgaggccacctacctgctgcggcagagcagcatcaacagcgcagatggctacagcctgtaccgctaccacttcaacggggaggagctgctgtttgaggacaccagcctgagcaccagccctggcactggagtgaggaagaagacctgcagcttccgcatcaaggaggagaaggatgtgaagacccacctggtgcctgagtgccagaacagcctgcacctgagcctgggcaccagcaccagcgccaccccagatggcagccacctggccgtggatgacctgaagaatgctgaggagagcaagctgggccctgacatcggcatcagcaaagaagatgatgagcggcagacagacagcaagaaggaggagaccatcagccccagcctgaacaagacagatgtgatccacggccaggacaagagtgatgtgcagaacacccagctgactgtggagaccaccaacatcgagggcaccatctcctaccccctggaggagaccaagatcacccgctacttcccagatgagaccatcaatgcctgcaagaccatgaagagccgcagctttgtgtacagccggggcaggaagctggtgggcggcgtgaaccaggatgtggagtacagcagcatcacagaccagcagctgaccacagagtggcagtgccaggtgcagaagatcaccaggagccacagcacagacatcccctacatcgtgtctgaggccgctgtgcaggccgagcacaaggagcagtttgctgacatgcaggatgagcaccacgtggccgaggccatcccccgcatcccccggctgagcctgaccatcacagacagaaatggcatggagaacctgctgtctgtgaagccagaccagaccctgggcttccccagcctgcggagcaagagcctgcacggccaccccagaaatgtgaagagcatccagggcaagctggacaggagcggccacgccagctctgtgagcagcctggtgattgtgtctggcatgacagctgaggagaagaaggtgaagaaggagaaggccagcacagaaacagagtgctag

SEQ ID NO: 22288 - DNA, 1479 bp, synthetic construct
  misc_feature 1..1479: note = Description of Artificial Sequence: Synthetic coding sequence
  source 1..1479: mol_type = other DNA
atggccctgaacagcggcagccccccagccatcggcccctactatgagaaccacggctaccagcctgagaacccctacccagcccagcccaccgtggtgcccaccgtgtatgaggtgcacccagcccagtactaccccagccctgtgccccagtatgccccccgggtgctgacccaggccagcaaccctgtggtgtgcacccagcccaagagccccagcggcaccgtgtgcaccagcaagaccaagaaggccctgtgcatcaccctgaccctgggcaccttcctggtgggcgccgccctggccgccggcctgctgtggaagttcatgggcagcaagtgcagcaacagcggcattgaatgtgacagcagcggcacctgcatcaaccccagcaactggtgtgatggagtgagccactgccctggaggagaagatgaaaatagatgtgtgcggctgtatggccccaacttcatcctgcaggtgtacagcagccagaggaagtcctggcaccctgtgtgccaggatgactggaatgaaaactacggccgggccgcctgccgggacatgggctacaagaacaacttctacagcagccagggcatcgtggatgacagcggcagcaccagcttcatgaagctgaacaccagcgctggaaatgtggacatctacaagaagctgtaccacagtgatgcctgcagcagcaaggctgtggtgtccctgcgctgcatcgcctgtggggtgaacctgaacagcagccggcagagccgcatcgtgggcggggagagcgccctgcccggggcctggccctggcaggtgtccctgcacgtgcagaatgtgcacgtgtgtggcggcagcatcatcaccccagagtggatcgtgacagctgcccactgtgtggagaagcccctgaacaacccctggcactggacagcctttgctggcatcctgcggcagagcttcatgttctacggggccggctaccaggtggagaaggtgatcagccaccccaactatgacagcaagaccaagaacaatgacatcgccctgatgaagctgcagaagcccctgaccttcaatgacctggtgaagcctgtgtgcctgcccaaccctggcatgatgctgcagcctgagcagctgtgctggatcagcggctggggcgccacagaggagaagggcaagaccagcgaggtgctgaatgctgccaaggtgctgctgattgagacccagcgctgcaacagccgctacgtgtatgacaacctgatcaccccagccatgatctgtgccggcttcctgcagggcaatgtggacagctgccagggcgacagcggcggccccctggtgaccagcaagaacaacatctggtggctgattggagacacctcctggggcagcggctgtgccaaggcctacagacctggggtgtatggaaatgtgatggtgttcacagactggatctaccggcagatgagagcagatggatag

SEQ ID NO: 22289 - DNA, 1590 bp, synthetic construct
  misc_feature 1..1590: note = Description of Artificial Sequence: Synthetic coding sequence
  source 1..1590: mol_type = other DNA
atgcccccagcccctcctggaggagagagcggctgtgaggagagaggagctgctggccacatcgagcacagccgctacctgagcctgctggatgctgtggacaacagcaagatggccctgaacagcggcagccccccagccatcggcccctactatgaaaatcatggctaccagcctgagaacccctacccagcccagcccaccgtggtgcccaccgtgtatgaggtgcacccagcccagtactaccccagccctgtgccccagtatgccccccgggtgctgacccaggccagcaaccctgtggtgtgcacccagcccaagagccccagcggcaccgtgtgcaccagcaagaccaagaaggccctgtgcatcaccctgaccctgggcaccttcctggtgggcgccgccctggccgccggcctgctgtggaagttcatgggcagcaagtgcagcaacagcggcattgaatgtgacagcagcggcacctgcatcaaccccagcaactggtgtgatggagtgagccactgccctggaggagaagatgagaacagatgtgtgcggctgtatggccccaacttcatcctgcaggtgtacagcagccagaggaagtcctggcaccctgtgtgccaggatgactggaatgaaaattatggccgggccgcctgccgggacatgggctacaagaacaacttctacagcagccagggcatcgtggatgattctggcagcaccagcttcatgaagctgaacaccagcgctggaaatgtggacatctacaagaagctgtaccacagtgatgcctgcagcagcaaggctgtggtgtccctgcgctgcatcgcctgtggggtgaacctgaacagcagccggcagagcagaattgtgggcggggagagcgccctgcccggggcctggccctggcaggtgtccctgcacgtgcagaatgtgcacgtgtgtggcggcagcatcatcaccccagagtggatcgtgacagctgcccactgtgtggagaagcccctgaacaacccctggcactggacagcctttgctggcatcctgcggcagagcttcatgttttatggagctggctaccaggtggagaaggtgatcagccaccccaactatgacagcaagaccaagaacaatgacatcgccctgatgaagctgcagaagcccctgaccttcaatgacctggtgaagcctgtgtgcctgcccaaccctggcatgatgctgcagcctgagcagctgtgctggatcagcggctggggcgccacagaggagaagggcaagaccagcgaggtgctgaatgctgccaaggtgctgctgattgagacccagcgctgcaacagccgctacgtgtatgacaacctgatcaccccagccatgatctgtgccggcttcctgcagggcaatgtggacagctgccagggcgacagcggcggccccctggtgaccagcaagaacaacatctggtggctgattggagacacctcctggggcagcggctgtgccaaggcctacagacctggggtgtatggaaatgtgatggtgttcacagactggatctaccggcagatgagagcagatggatag

SEQ ID NO: 22290 - DNA, 1470 bp, synthetic construct
  misc_feature 1..1470: note = Description of Artificial Sequence: Synthetic coding sequence
  source 1..1470: mol_type = other DNA
atggccctgaacagcggcagccccccagccatcggcccctactatgagaaccacggctaccagcctgagaacccctacccagcccagcccaccgtggtgcccaccgtgtatgaggtgcacccagcccagtactaccccagccctgtgccccagtatgccccccgggtgctgacccaggccagcaaccctgtggtgtgcacccagcccaagagccccagcggcaccgtgtgcaccagcaagaccaagaaggccctgtgcatcaccctgaccctgggcaccttcctggtgggcgccgccctggccgccggcctgctgtggaagttcatgggcagcaagtgcagcaacagcggcattgaatgtgacagcagcggcacctgcatcaaccccagcaactggtgtgatggagtgagccactgccctggaggagaagatgaaaatagatgtgtgcggctgtatggccccaacttcatcctgcaggtgtacagcagccagaggaagtcctggcaccctgtgtgccaggatgactggaatgaaaactacggccgggccgcctgccgggacatgggctacaagaacaacttctacagcagccagggcatcgtggatgacagcggcagcaccagcttcatgaagctgaacaccagcgctggaaatgtggacatctacaagaagctgtaccacagtgatgcctgcagcagcaaggctgtggtgtccctgcgctgcatcgcctgtggggtgaacctgaacagcagccggcagagccgcatcgtgggcggggagagcgccctgcccggggcctggccctggcaggtgtccctgcacgtgcagaatgtgcacgtgtgtggcggcagcatcatcaccccagagtggatcgtgacagctgcccactgtgtggagaagcccctgaacaacccctggcactggacagcctttgctggcatcctgcggcagagcttcatgttctacggggccggctaccaggtggagaaggtgatcagccaccccaactatgacagcaagaccaagaacaatgacatcgccctgatgaagctgcagaagcccctgaccttcaatgacctggtgaagcctgtgtgcctgcccaaccctggcatgatgctgcagcctgagcagctgtgctggatcagcggctggggcgccacagaggagaagggcaagaccagcgaggtgctgaatgctgccaaggtgctgctgattgagacccagcgctgcaacagccgctacgtgtatgacaacctgatcaccccagccatgatctgtgccggcttcctgcagggcaatgtggacagctgccagggcgacagcggcggccccctggtgaccagcaagaacaacatctggtggctgattggagacacctcctggggcagcggctgtgccaaggcctacagacctggggtgtatggaaatgtgatggtgttcacagactggatctaccggcagatgaggtag

SEQ ID NO: 22291 - DNA, 240 bp, synthetic construct
  misc_feature 1..240: note = Description of Artificial Sequence: Synthetic coding sequence
  source 1..240: mol_type = other DNA
atggccctgaacagcggcagccccccagccatcggcccctactatgagaaccacggctaccagcctgagaacccctacccagcccagcccaccgtggtgcccaccgtgtatgaggtgcacccagcccagtactaccccagccctgtgccccagtatgccccccgggtgctgacccaggccagcaaccctgtggtgtgcacccagcccaagagccccagcggcaccgtgtgcaccagctag

SEQ ID NO: 22292 - DNA, 1479 bp, synthetic construct; identical to SEQ ID NO: 22288
  misc_feature 1..1479: note = Description of Artificial Sequence: Synthetic coding sequence
  source 1..1479: mol_type = other DNA

SEQ ID NO: 22293 - DNA, 717 bp, synthetic construct
  misc_feature 1..717: note = Description of Artificial Sequence: Synthetic coding sequence
  source 1..717: mol_type = other DNA
atgtatgcccctgggggcgccggcctgcccggcggcagaagaagaagaagccctgggggcagcgccctgcccaagcagcctgagaggagcctggccagcgccctgcccggggccctgagcatcacagccctgtgcacagccctggccgagcccgcctggctgcacatccatggaggcacctgcagccggcaggagctgggcgtgtctgatgtgctgggctacgtgcacccagacctgctgaaggacttctgcatgaacccccagacagtgctgctgctgcgggtgattgctgccttctgcttcctgggcatcctgtgcagcctgagcgccttcctgctggatgtgtttggccccaagcacccagccctgaagatcaccaggagatatgcctttgcccacatcctgactgtgctgcagtgtgccaccgtcatcggcttctcctactgggccagcgagctgatcctggcccagcagcagcagcacaagaagtaccacggcagccaggtgtatgtgacctttgctgtgtccttctacctggtggccggggccggcggggccagcatcctggccacagctgccaacctgctgcggcactaccccacagaggaggaggagcaggccctggagctgctgtctgagatggaggagaatgagccctacccagcagaatatgaggtgatcaaccagttccagcccccaccagcctacaccccctag

SEQ ID NO: 22294 - DNA, 717 bp, synthetic construct; identical to SEQ ID NO: 22293
  misc_feature 1..717: note = Description of Artificial Sequence: Synthetic coding sequence
  source 1..717: mol_type = other DNA

SEQ ID NO: 22295 - DNA, 3075 bp, synthetic construct
  misc_feature 1..3075: note = Description of Artificial Sequence: Synthetic coding sequence
  source 1..3075: mol_type = other DNA
atgtgtgccaggatggccggccgcaccacagctgccccccggggcccctacggcccctggctgtgcctgctggtggccctggccctggatgtggtgcgggtggactgtggccaggcccccctggaccctgtgtacctgcctgctgccctggagctgctggatgcccctgagcacttccgggtgcagcaggtgggccactaccccccagccaacagcagcctgagcagccgctctgagaccttcctgctgctgcagccctggccccgggcccagcccctgctgcgggccagctaccccccatttgccacccagcaggtggtgcccccccgggtgacagagccccaccagaggcctgtgccctgggatgtgcgggctgtgtctgtggaggccgctgtgaccccagctgagccctatgcccgggtgctcttccacctgaagggccaggactggcccccaggcagcggcagcctgccctgtgcccggctgcacgccacccaccctgctggaacagcccaccaggcctgccgcttccagcccagcctgggcgcctgtgtggtggagctggagctgcccagccactggttcagccaggccagcaccaccagggctgagctggcctacaccctggagcctgctgctgagggccctgggggctgcggcagcggggaggagaatgaccctggagagcaggccctgcctgtgggcggcgtggagctgcggcctgctgaccccccccagtaccaggaggtgcccctggatgaagctgtgaccctgcgggtgcctgacatgcctgtgcggcccggccagctgttcagcgccaccctgctgctgcggcacaacttcaccgccagcctgctgaccctgcgcatcaaggtgaagaagggcctgcacgtgacagctgcccggcctgcccagcccaccctgtggacagccaagctggaccgcttcaagggcagccgccaccacaccaccctcatcacctgccacagagctggcctgacagagccagacagcagcagccccctggagctgtctgagttcctgtgggtggactttgtggtggagaacagcactggaggaggagtggccgtgaccaggcctgtgacctggcagctggagtacccaggccaggcccctgaggccgagaaggacaagatggtgtgggagatcctggtgtctgagcgggacatccgggccctgatccccctggccaaggccgaggagctggtgaacacagcccccctgactggagtgccccagcacgtgcctgtgcggctggtgacagtggatggcggcggggccctggtggaggtgacagaacatgtgggctgtgagagcgccaacacccaggtgctgcaggtgtctgaggcctgtgatgctgtgtttgtggccggcaaggagagcagaggagcccggggcgtgcgggtggacttctggtggaggcggctgcgggccagcctgcggctgactgtgtgggcccccctgctgcccctgcgcatcgagctgacagacaccaccctggagcaggtgcggggctggagggtgcccggccctgctgagggccctgctgagcctgctgctgaggccagtgatgaagctgagcggcgggcccggggctgccacctgcagtaccagagagctggggtgcgcttcctggccccctttgctgcccaccccctggatggcggccggcggctgacccacctgctgggccctgactggctgctggatgtgagccacctggtggcccctcatgcccgggtgctggacagccgggtggccagcctggagggcggccgggtggtggtgggccgggagcccggggtgaccagcattgaggtgcgcagccccctgagtgacagcatcctgggggagcaggccctggccgtgacagatgacaaggtgtctgtgctggagctgcgggtgcagcctgtgatgggcatcagcctgaccctgagccggggcacagcccaccctggagaggtgacagccacctgctgggcccagagcgccctgcctgcccccaagcaggaggtggccctgagcctgtggctgtccttcagtgaccacacagtggccccagctgagctgtatgaccggcgggacctgggcctgtctgtgtctgctgaggagcccggggccatcctgcctgctgaggagcagggcgcccagctgggcgtggtggtgtctggggccggggctgagggcctgcccctgcacgtggccctgcaccccccagagccctgccggcggggccgccaccgggtgcccctggccagcggcacagcctggctgggcctgcccccagccagcaccccagccccagccctgcccagcagccctgcctggagccccccagccacagaggccaccatgggcggcaagaggcaggtggccggctctgtgggcggcaacacaggagtgcggggcaagtttgaaagagctgaggaggaggccaggaaggaggagacagaggcccgggaggaggaggaggaggaggaggaggagatggtgcctgccccccagcacgtgacagagctggagctgggcatgtatgccctgctgggcgtcttctgtgtggccatcttcatcttcctggtgaatggagtggtgtttgtgctgcgctaccagaggaaggagcccccagacagcgccacagaccccaccagcccccagccccacaactgggtgtggctgggcacagaccaggaggagctgagccggcagctggaccggcagagccctggcccccccaagggggagggcagctgcccctgtgagagcggcggcggcggggaggcccccaccctggcccctggccccccaggcggcaccaccagcagcagcagcaccctggccaggaaggaggccggcggccgcaggaagagggtggagtttgtgacctttgccccagcccccccagcccagagccctgaggagcctgtgggcgccccagctgtgcagagcatcctggtggccggggaggaggacatccgctgggtgtgtgaggacatgggcctgaaggaccctgaggagctgaggaactacatggagcgcatccggggcagcagctag

SEQ ID NO: 22296 - DNA, 3072 bp, synthetic construct
  misc_feature 1..3072: note = Description of Artificial Sequence: Synthetic coding sequence
  source 1..3072: mol_type = other DNA
atgtgtgccaggatggccggccgcaccacagctgccccccggggcccctacggcccctggctgtgcctgctggtggccctggccctggatgtggtgcgggtggactgtggccaggcccccctggaccctgtgtacctgcctgctgccctggagctgctggatgcccctgagcacttccgggtgcagcaggtgggccactaccccccagccaacagcagcctgagcagccgctctgagaccttcctgctgctgcagccctggccccgggcccagcccctgctgcgggccagctaccccccatttgccacccagcaggtggtgcccccccgggtgacagagccccaccagaggcctgtgccctgggatgtgcgggctgtgtctgtggaggccgctgtgaccccagctgagccctatgcccgggtgctcttccacctgaagggccaggactggcccccaggcagcggcagcctgccctgtgcccggctgcacgccacccaccctgctggaacagcccaccaggcctgccgcttccagcccagcctgggcgcctgtgtggtggagctggagctgcccagccactggttcagccaggccagcaccaccagggctgagctggcctacaccctggagcctgctgctgagggccctgggggctgcggcagcggggaggagaatgaccctggagagcaggccctgcctgtgggcggcgtggagctgcggcctgctgaccccccccagtaccaggaggtgcccctggatgaagctgtgaccctgcgggtgcctgacatgcctgtgcggcccggccagctgttcagcgccaccctgctgctgcggcacaacttcaccgccagcctgctgaccctgcgcatcaaggtgaagaagggcctgcacgtgacagctgcccggcctgcccagcccaccctgtggacagccaagctggaccgcttcaagggcagccgccaccacaccaccctcatcacctgccacagagctggcctgacagagccagacagcagccccctggagctgtctgagttcctgtgggtggactttgtggtggagaacagcactggaggcggcgtggccgtgaccaggcctgtgacctggcagctggagtacccaggccaggcccctgaggccgagaaggacaagatggtgtgggagatcctggtgtctgagcgggacatccgggccctgatccccctggccaaggccgaggagctggtgaacacagcccccctgactggagtgccccagcacgtgcctgtgcggctggtgacagtggatggcggcggggccctggtggaggtgacagagcacgtgggctgtgagagcgccaacacccaggtgctgcaggtgtctgaggcctgtgatgctgtgtttgtggccggcaaggagagcagaggagcccggggcgtgcgggtggacttctggtggaggcggctgcgggccagcctgcggctgactgtgtgggcccccctgctgcccctgagaattgagctgacagacaccaccctggagcaggtgcggggctggagggtgcccggccctgctgagggccctgctgagcctgctgctgaggccagtgatgaggccgagcggcgggcccggggctgccacctgcagtaccagagagctggggtgcgcttcctggccccctttgctgcccaccccctggatggcggccgccgcctgacccacctgctgggccctgactggctgctggatgtgagccacctggtggccccccacgcccgggtgctggacagccgggtggccagcctggagggcggccgggtggtggtgggccgggagcccggggtgaccagcattgaggtgcgcagccccctgagtgacagcatcctgggggagcaggccctggccgtgacagatgacaaggtgtctgtgctggagctgcgggtgcagcctgtgatgggcatcagcctgaccctgagccggggcacagcccaccctggagaggtgacagccacctgctgggcccagagcgccctgcctgcccccaagcaggaggtggccctgagcctgtggctgtccttcagtgaccacacagtggccccagctgagctgtatgacagaagagacctgggcctgtctgtgtctgctgaggagcccggggccatcctgcctgctgaggagcagggcgcccagctgggcgtggtggtgtctggagctggagctgagggcctgcccctgcacgtggccctgcaccccccagagccctgcagaagaggccgccaccgggtgcccctggccagcggcacagcctggctgggcctgcccccagccagcaccccagccccagccctgcccagcagccctgcctggagccccccagccacagaggccaccatgggcggcaagaggcaggtggccggctctgtgggcggcaacacaggagtgcggggcaagtttgagcgggcagaggaggaggccaggaaggaggagacagaggcccgggaggaggaggaggaggaggaggaggagatggtgcctgccccccagcacgtgacagagctggagctgggcatgtatgccctgctgggcgtcttctgtgtggccatcttcatcttcctggtgaatggagtggtgtttgtgctgcgctaccagaggaaggagcccccagattctgccacagaccccaccagcccccagccccacaactgggtgtggctgggcacagaccaggaggagctgagccggcagctggaccggcagagccctggcccccccaagggggagggcagctgcccctgtgagagcggcggcggcggggaggcccccaccctggcccctggccccccaggcggcaccaccagcagcagcagcaccctggccaggaaggaggccggcggccgcaggaagagggtggagtttgtgacctttgccccagcccccccagcccagagccctgaggagcctgtgggcgccccagctgtgcagagcatcctggtggccggggaggaggacatccgctgggtgtgtgaggacatgggcctgaaggaccctgaggagctgaggaactacatggagcgcatccggggcagcagctag

SEQ ID NO: 22297 - DNA, 1026 bp, synthetic construct
  misc_feature 1..1026: note = Description of Artificial Sequence: Synthetic coding sequence
  source 1..1026: mol_type = other DNA
atgctgcctgagcagctgtacttcctgcagagccccccagaggaggagcctgagtaccacccagatgccagcgcccaggagctgaatgtgcgggagagtgatgtgcgggtgtgtgatgagagcagctgcaagtatggaggagtgtgcaaggaggatggagatggcctgaagtgtgcctgccagttccagtgccacaccaactacatccctgtgtgtggcagcaatggagacacctaccagaatgaatgcttcctgcggcgggccgcctgcaagcaccagaaggagatcaccgtgattgcccggggcccctgctacagcgacaatggcagcggcagcggggagggggaggaggagggcagcggggctgaggtgcacaggaagcacagcaaatgtggcccctgcaagtacaaggcagaatgtgatgaagatgctgaaaatgtgggctgtgtgtgcaacatcgactgcagcggctacagcttcaaccctgtgtgtgccagtgatggcagcagctacaacaacccctgctttgtgcgggaggccagctgcatcaagcaggagcagattgacatccgccacctgggccactgcacagacacagatgacaccagcctgctgggcaagaaggatgatggcctgcagtacagaccagatgtgaaggatgccagtgaccagcgggaggatgtgtacatcggcaaccacatgccctgcccagagaacctgaatggctactgcatccacggcaaatgtgagttcatctacagcacccagaaggccagctgccgctgtgagagcggctacacaggccagcactgtgagaagacagacttcagcatcctgtatgtggtgcccagccggcagaagctgacccacgtgctgattgctgccatcattggagctgtgcagatcgccatcatcgtggccatcgtgatgtgcatcaccaggaaatgtcccaagaacaacagaggaagacggcagaagcagaacctgggccacttcaccagtgacaccagcagcaggatggtgtag

SEQ ID NO: 22298 - DNA, 1143 bp, synthetic construct
  misc_feature 1..1143: note = Description of Artificial Sequence: Synthetic coding sequence
  source 1..1143: mol_type = other DNA
atgggcgctgctgctgctgaggcccccctgcggctgcctgctgccccacccctggccttctgctgctacacctctgtgctgctgctgtttgccttcagcctgcccggcagccgggccagcaaccagcccccaggcggcggcggcggcagcggcggggactgccctgggggcaagggcaagagcatcaactgcagcgagctgaatgtgcgggagagtgatgtgcgggtgtgtgatgagagcagctgcaagtatggaggagtgtgcaaggaggatggagatggcctgaagtgtgcctgccagttccagtgccacaccaactacatccctgtgtgtggcagcaatggagacacctaccagaatgaatgcttcctgcggcgggccgcctgcaagcaccagaaggagatcaccgtcatcgcccggggcccctgctacagcgacaatggaagtggcagcggggagggggaggaggagggcagcggggctgaggtgcacaggaagcacagcaaatgtggcccctgcaagtacaaggccgagtgtgatgaagatgctgaaaatgtgggctgtgtgtgcaacatcgactgcagcggctacagcttcaaccctgtgtgtgccagtgatggcagcagctacaacaacccctgctttgtgcgggaggccagctgcatcaagcaggagcagattgacatccgccacctgggccactgcacagacacagatgacaccagcctgctgggcaagaaggatgatggcctgcagtacagaccagatgtgaaggatgccagtgaccagagagaagatgtgtacatcggcaaccacatgccctgcccagagaacctgaatggctactgcatccatggaaaatgtgagttcatctacagcacccagaaggccagctgccgctgtgagagcggctacacaggccagcactgtgagaagacagacttcagcatcctgtatgtggtgcccagccggcagaagctgacccacgtgctgattgctgccatcatcggggctgtgcagatcgccatcatcgtggccatcgtgatgtgcatcaccaggaagtgccccaagaacaacagaggccggcggcagaagcagaacctgggccacttcaccagtgacaccagcagcaggatggtgtag

SEQ ID NO: 22299 - DNA, 393 bp, synthetic construct
  misc_feature 1..393: note = Description of Artificial Sequence: Synthetic coding sequence
  source 1..393: mol_type = other DNA
atgcaggagaggactggagctgccacagcccggcgggagagcctgccccaggccaacaaccctgagcagctgtgcaagcagcgctgcatcaatgaggcctcctggaccatgaagagggtgctgagctgtgtgcctgagcccaccgtggtgatggccgcccgggccctgtgcatgctgggcctggtgctggccctgctgagcagcagcagcgctgaggagtatgtgggcctgagcgccaaccagtgtgctgtgcctgccaaggacagagtggactgtggctacccccacgtgacccccaaggagtgcaacaacagaggctgctgctttgacagccgcatccctggggtgccctggtgcttcaagcccctgcaggaggctgaatgtaccttctag

SEQ ID NO: 22300 - DNA, 285 bp, synthetic construct
  misc_feature 1..285: note = Description of Artificial Sequence: Synthetic coding sequence
  source 1..285: mol_type = other DNA
atgaagagggtgctgagctgtgtgcctgagcccaccgtggtgatggccgcccgggccctgtgcatgctgggcctggtgctggccctgctgagcagcagcagcgctgaggagtatgtgggcctgagcgccaaccagtgtgctgtgcctgccaaggacagagtggactgtggctacccccacgtgacccccaaggagtgcaacaacagaggctgctgctttgacagccgcatccctggggtgccctggtgcttcaagcccctgcaggaggctgaatgtaccttctag

SEQ ID NO: 22301 - DNA, 1497 bp, synthetic construct
  misc_feature 1..1497: note = Description of Artificial Sequence: Synthetic coding sequence
  source 1..1497: mol_type = other DNA
atggccctgcccaccctgcccagctactggtgcagccagcagaggctgaaccagcagctggcccggcagcgggagcaggaggcccggctgcggcagcagtgggagcagaacagccgctacttcaggatgtctgacatctgcagcagcaagcaggccgagtggagcagcaagaccagctaccagaggtccatgcacgcctaccagcgggagaagatgaaggaggagaagagaagaagcctggaggcccggcgggagaagctgcggcagctgatgcaggaggagcaggacctgctggcccgggagctggaggagctgcggctgtccatgaacctgcaggagcggcgcatccgggagcagcacggcaagctgaagagcgccaaggaggagcagaggaagctgattgctgagcagctgctgtatgagcactggaagaagaacaaccccaagctgcgggagatggagctggacctgcaccagaagcacgtggtgaacagctgggagatgcagaaggaggagaagaagcagcaggaggccacagctgagcaggagaacaagagatatgaaaatgaatatgagcgggcccggcgggaggccctggagaggatgaaggccgaggaggagcggcggcagctggaggacaagctgcaggccgaggccctgctgcagcagatggaggagctgaagctgaaggaggtggaggccaccaagctgaagaaggagcaggagaacctgctgaagcagcgctgggagctggagcggctggaggaggagaggaagcagatggaggccttccggcagaaggccgagctgggccgcttcctgcggcaccagtacaatgcccagctgagcaggaggacccagcagatccaggaggagctggaggccgaccggcgcatcctgcaggccctgctggagaaggaggatgagagccagaggctgcacctggcccggcgggagcaggtgatggctgatgtggcctggatgaagcaggccatcgaggagcagctgcagctggagcgggcccgggaggccgagctgcagatgctgctgcgggaggaggccaaggagatgtgggagaagcgggaggccgagtgggcccgggagaggtctgcccgggaccggctgatgtctgaggtgctgaccggccggcagcagcagatccaggagaagattgagcagaacagaagagcccaggaggagagcctgaagcaccgggagcagctgatccggaacctggaggaggtgcgggagctggcccggcgggagaaggaggagagcgagaagctgaagagcgccaggaagcaggagctggaggcccaggtggccgagcggcggctgcaggcctgggaggccgaccagcaggaggaggaggaggaggaggaggccaggagagtggagcagctgagtgatgccctgctgcagcaggaggccgagaccatggccgagcagggctaccggcccaagccctacggccaccccaagatcgcctggaactag

SEQ ID NO: 22302 - DNA, 1497 bp, synthetic construct; identical to SEQ ID NO: 22301
  misc_feature 1..1497: note = Description of Artificial Sequence: Synthetic coding sequence
  source 1..1497: mol_type = other DNA

SEQ ID NO: 22303 - DNA, 525 bp, synthetic construct
  misc_feature 1..525: note = Description of Artificial Sequence: Synthetic coding sequence
  source 1..525: mol_type = other DNA
atggccctgcccaccctgcccagctactggtgcagccagcagaggctgaaccagcagctggcccggcagcgggagcaggaggcccggctgcggcagcagtgggagcagaacagccgctacttcaggatgtctgacatctgcagcagcaagcaggccgagtggagcagcaagaccagctaccagaggtccatgcacgcctaccagcgggagaagatgaaggaggagaagagaagaagcctggaggcccggcgggagaagctgcggcagctgatgcaggaggagcaggacctgctggcccgggagctggaggagctgcggctgtccatgaacctgcaggagcggcgcatccgggagcagcacggcaagctgaagagcgccaaggaggagcagaggaagctgattgctgagcagctgctgtatgagcactggaagaagaacaaccccaagctgcgggagatggagctggacctgcaccagaagcacgtggtgaacagctgggagatgcagaaggaggagaagaagtag

SEQ ID NO: 22304 - DNA, 663 bp, synthetic construct
  misc_feature 1..663: note = Description of Artificial Sequence: Synthetic coding sequence
  source 1..663: mol_type = other DNA
atggccctgcccaccctgcccagctactggtgcagccagcagaggctgaaccagcagctggcccggcagcgggagcaggaggcccggctgcggcagcagtgggagcagaacagccgctacttcaggatgtctgacatctgcagcagcaagcaggccgagtggagcagcaagaccagctaccagaggtccatgcacgcctaccagcgggagaagatgaaggaggagaagagaagaagcctggaggcccggcgggagaagctgcggcagctgatgcaggaggagcaggacctgctggcccgggagctggaggagctgcggctgtccatgaacctgcaggagcggcgcatccgggagcagcacggcaagctgaagagcgccaaggaggagcagaggaagctgattgctgagcagctgctgtatgagcactggaagaagaacaaccccaagctgcgggagatggagctggacctgcaccagaagcacgtggtgaacagctgggagatgcagaaggaggagaagaagcagcaggaggccacagctgagcaggagaacaagagatatgaaaatgaatatgagcgggcccggcgggaggccctggagaggatgaaggccgaggaggagcggcggctgagcaggacagatggccacaagaggaacccctag

SEQ ID NO: 22305 - DNA, 1497 bp, synthetic construct; identical to SEQ ID NO: 22301
  misc_feature 1..1497: note = Description of Artificial Sequence: Synthetic coding sequence
  source 1..1497: mol_type = other DNA

SEQ ID NO: 22306 - DNA, 3090 bp, synthetic construct
  misc_feature 1..3090: note = Description of Artificial Sequence: Synthetic coding sequence
  source 1..3090: mol_type = other DNA
atgcagaccaatgaaggagaggtgtctgaggagagcagcagcaaggtggagcaggaggactttgtgatggagggccacggcaagaccccacctcctggagaggagagcaagcaggagaaggagcaggagcgggaggagcagctgatggaggacaagaagaggaagaaggaggacaagaagaagaaggaggccacccagaaggtgacagagcagaagaccaaggtgcctgaggtgaccaagcccagcctgagccagcccacagctgccagccccatcggcagcagccccagcccccctgtgaatggaggcaacaatgccaagagggtggccgtgcccaacggccagccccccagcgctgcccgctacatgccccgggaggtgcccccacgcttccgctgccagcaggaccacaaggtgctgctgaagaggggccagcccccaccacccagctgcatgctgctgggcggcggggccggccccccaccctgcacagcccctggggccaaccccaacaatgcccaggtgactggagccctgctgcagagcgagagcggcacagcccctgtgtggagcaagagcaccccaccagccccagacaatggcaccagcgcctggggcgagcccaatgaaagcagccctggctggggcgagatggatgacacaggagccagcaccaccggctggggcaacaccccagccaatgccccaaatgccatgaagcccaacagcaagtccatgcaggacggctggggcgagagtgatggccctgtgactggagcccggcaccccagctgggaggaggaggaggatggcggcgtgtggaacaccaccggcagccagggcagcgccagcagccacaacagcgcctcctggggccagggcggcaagaagcagatgaagtgcagcctgaagggcggcaacaatgacagctggatgaaccccctggccaagcagttcagcaacatgggcctgctgagccagacagaggacaaccccagcagcaagatggacctgtctgtgggcagcctgagtgacaagaagtttgatgtggacaagagggccatgaacctgggggacttcaatgacatcatgaggaaggacagaagtggcttccggccccccaacagcaaggacatgggcaccacagacagcggcccctactttgagaagggcggcagccacggcctgtttggaaacagcacagcccagagccggggcctgcacacccctgtgcagcccctgaacagcagccccagcctgcgggcccaggtgcccccccagttcatcagcccccaggtgtctgcctccatgctgaagcagttccccaacagcggcctgagccctggcctcttcaacgtgggcccccagctgagcccccagcagatcgccatgctgagccagctgccccagatcccccagttccagctggcctgccagctgctgctgcagcagcagcagcagcagcagctgctgcagaaccagaggaagatcagccaggccgtgcggcagcagcaggagcagcagctggccaggatggtgtctgccctgcagcagcagcagcagcagcagcagaggcagcccggcatgaagcacagccccagccaccctgtgggccccaagccccacctggacaacatggtgcccaatgccctgaatgtgggcctgcctgacctgcagaccaagggccccatccctggctacggcagcggcttcagcagcggcggcatggactatggcatggtgggcggcaaggaggccggcacagagagccgcttcaagcagtggacctccatgatggagggcctgcccagcgtggccacccaggaggccaacatgcacaagaatggagccatcgtggcccctgggaagacccggggcggcagcccctacaaccagtttgacatcatccctggggacaccctgggcggccacactggacctgctggggacagctggctgcctgccaagagcccccccaccaacaagattggcagcaagagcagcaatgcctcctggcccccagagttccagcccggggtgccctggaagggcatccagaacatcgaccctgagagtgacccctacgtgaccccaggctctgtgctgggcggcacagccaccagccccatcgtggacacagaccaccagctgctgcgggacaacaccaccggcagcaacagcagcctgaacaccagcctgcccagccctggggcctggccctacagcgccagtgacaacagcttcaccaacgtgcacagcaccagcgccaagttcccagactacaagagcacctggagcccagaccccatcggccacaaccccacccacctgagcaacaagatgtggaagaaccacatcagcagcaggaacaccacccccctgcccaggcctcctcctggcctgaccaaccccaagcccagcagcccctggagcagcacagcccccaggtctgtgcggggctggggcacccaggacagccggctggccagcgccagcacctggagcgatggcggctctgtgcggcccagctactggctggtgctgcacaacctgaccccccagattgatggcagcaccctgcggaccatctgcatgcagcacggccccctgctgaccttccacctgaacctgacccagggcacagccctgatccgctacagcaccaagcaggaggccgccaaggcccagacagccctgcacatgtgtgtgctgggcaacaccaccatcctggccgagtttgccacagatgatgaggtgagccgcttcctggcccaggcccagccccccaccccagctgccacccccagcgccccagctgctggctggcagagcctggagaccggccagaaccagagcgaccctgtgggccctgccctgaacctgtttggaggcagcacaggcctgggccagtggagcagcagcgctgggggcagcagtggagctgacctggccggggccagcctgtggggcccccccaactacagcagcagcctgtggggcgtgcccaccgtggaggacccccacaggatgggcagccctgcccccctgctgcccggggacctgctgggcggcggcagtgacagcatctag

SEQ ID NO: 22307 - DNA, 5172 bp, synthetic construct
  misc_feature 1..5172: note = Description of Artificial Sequence: Synthetic coding sequence
  source 1..5172: mol_type = other DNA
atgagggagaaggagcaggagcgggaggagcagctgatggaggacaagaagaggaagaaggaggacaagaagaagaaggaggccacccagaaggtgacagagcagaagaccaaggtgcctgaggtgaccaagcccagcctgagccagcccacagctgccagccccatcggcagcagccccagcccccctgtgaatggaggcaacaatgccaagagggtggccgtgcccaacggccagccccccagcgctgcccgctacatgccccgggaggtgcccccacgcttccgctgccagcaggaccacaaggtgctgctgaagaggggccagcccccaccacccagctgcatgctgctgggcggcggggccggccccccaccctgcacagcccctggggccaaccccaacaatgcccaggtgactggagccctgctgcagagcgagagcggcacagccccagacagcaccctgggcggggccgccgccagcaactatgccaacagcacctggggcagcggggccagcagcaacaacggcaccagccccaaccccatccacatctgggacaaggtgattgtggatggcagtgacatggaggagtggccctgcatcgccagcaaggacacagagagcagcagcgagaacaccacagacaacaacagcgccagcaaccctggcagcgagaagagcaccctgcccggcagcaccaccagcaacaagggcaagggcagccagtgccagagcgccagcagtggaaatgaatgcaacctgggcgtgtggaagagtgaccccaaggccaagtctgtgcagagcagcaacagcaccacagagaacaacaacggcctgggcaactggagaaatgtgtctggccaggacagaattggccctggcagcggcttcagcaacttcaaccccaacagcaaccccagcgcctggccagccctggtgcaggagggcaccagcaggaagggggccctggagacagacaacagcaacagcagcgcccaggtgtccacagtgggccagaccagccgggagcagcagagcaagatggagaatgccggcgtgaactttgtggtgtctggccgggagcaggcccagatccacaacacagatggccccaagaatggaaacaccaacagcctgaacctgagcagccccaaccccatggagaacaagggcatgcccttcggcatgggcctgggcaacaccagccgcagcacagatgcccccagccagagcactggagacaggaagacaggctctgtgggctcctggggcgccgcccggggccccagcggcacagacacagtgtctggccagagcaacagcggcaacaacggcaacaacgggaaggagcgggaggacagctggaagggggcctctgtgcagaagagcacaggcagcaagaatgacagctgggacaacaacaacagaagcactggaggctcctggaactttggcccccaggacagcaatgacaacaagtggggcgagggcaacaagatgaccagcggcgtgtcccagggcgagtggaagcagcccactggaagtgatgagctgaagatcggggagtggagcggccccaaccagcccaacagcagcactggagcctgggacaaccagaagggccaccccctgcctgagaaccagggcaatgcccaggccccctgctggggccgcagcagcagcagcactggaagtgaggtgggcggccagagcacaggcagcaaccacaaggccggcagcagtgacagccacaacagcggccgccgcagctaccggcccacccacccagactgccaggccgtgctgcagaccctgctgagcaggacagacctggacccccgggtgctgagcaacacaggctggggccagacccagatcaagcaggacacagtgtgggacatcgaggaggtgcccaggcctgagggcaagagtgacaagggcacagagggctgggagagcgctgccacccagaccaagaacagcggcggctggggagatgcccccagccagagcaaccagatgaagagcggctggggcgagctgagcgccagcacagagtggaaggaccccaagaacacaggaggctggaatgactacaagaacaacaacagcagcaactggggcggcggccgcccagatgagaagacccccagctcctggaatgaaaaccccagcaaggaccagggctggggcggcggccggcagcccaaccagggctggagcagcggcaagaatggctggggcgaggaggtggaccagaccaagaacagcaactgggagagcagcgccagcaagcctgtgtctggctggggcgagggcggccagaatgagatcggcacctggggcaatggaggaaatgccagcctggccagcaagggcggctgggaggactgcaagaggagccctgcctggaatgaaacaggccggcagcccaacagctggaacaagcagcaccagcagcagcagcccccccagcagcccccaccaccccagcctgaggccagcggctcctggggcggccccccacctcctcctcctggaaatgtgcggcccagcaacagctcctggagcagcggcccccagcctgccacccccaaggatgaggagcccagcggctgggaggagcccagcccccagagcatcagcaggaagatggacattgatgatggcaccagcgcctggggagaccccaacagctacaactacaagaatgtgaacctgtgggacaagaacagccagggcggccctgccccccgggagcccaacctgcccacccccatgaccagcaagagcgccagtgacagcaagtccatgcaggacggctggggcgagagtgatggccctgtgactggagcccggcaccccagctgggaggaggaggaggatggcggcgtgtggaacaccaccggcagccagggcagcgccagcagccacaacagcgcctcctggggccagggcggcaagaagcagatgaagtgcagcctgaagggcggcaacaatgacagctggatgaaccccctggccaagcagttcagcaacatgggcctgctgagccagacagaggacaaccccagcagcaagatggacctgtctgtgggcagcctgagtgacaagaagtttgatgtggacaagagggccatgaacctgggggacttcaatgacatcatgaggaaggacagaagtggcttccggccccccaacagcaaggacatgggcaccacagacagcggcccctactttgagaagggcggcagccacggcctgtttggaaacagcacagcccagagccggggcctgcacacccctgtgcagcccctgaacagcagccccagcctgcgggcccaggtgcccccccagttcatcagcccccaggtgtctgcctccatgctgaagcagttccccaacagcggcctgagccctggcctcttcaacgtgggcccccagctgagcccccagcagatcgccatgctgagccagctgccccagatcccccagttccagctggcctgccagctgctgctgcagcagcagcagcagcagcagctgctgcagaaccagaggaagatcagccaggccgtgcggcagcagcaggagcagcagctggccaggatggtgtctgccctgcagcagcagcagcagcagcagcagaggcagcccggcatgaagcacagccccagccaccctgtgggccccaagccccacctggacaacatggtgcccaatgccctgaatgtgggcctgcctgacctgcagaccaagggccccatccctggctacggcagcggcttcagcagcggcggcatggactatggcatggtgggcggcaaggaggccggcacagagagccgcttcaagcagtggacctccatgatggagggcctgcccagcgtggccacccaggaggccaacatgcacaagaatggagccatcgtggcccctgggaagacccggggcggcagcccctacaaccagtttgacatcatccctggggacaccctgggcggccacactggacctgctggggacagctggctgcctgccaagagcccccccaccaacaagattggcagcaagagcagcaatgcctcctggcccccagagttccagcccggggtgccctggaagggcatccagaacatcgaccctgagagtgacccctacgtgaccccaggctctgtgctgggcggcacagccaccagccccatcgtggacacagaccaccagctgctgcgggacaacaccaccggcagcaacagcagcctgaacaccagcctgcccagccctggggcctggccctacagcgccagtgacaacagcttcaccaacgtgcacagcaccagcgccaagttcccagactacaagagcacctggagcccagaccccatcggccacaaccccacccacctgagcaacaagatgtggaagaaccacatcagcagcaggaacaccacccccctgcccaggcctcctcctggcctgaccaaccccaagcccagcagcccctggagcagcacagcccccaggtctgtgcggggctggggcacccaggacagccggctggccagcgccagcacctggagcgatggcggctctgtgcggcccagctactggctggtgctgcacaacctgaccccccagattgatggcagcaccctgcggaccatctgcatgcagcacggccccctgctgaccttccacctgaacctgacccagggcacagccctgatccgctacagcaccaagcaggaggccgccaaggcccagacagccctgcacatgtgtgtgctgggcaacaccaccatcctggccgagtttgccacagatgatgaggtgagccgcttcctggcccaggcccagccccccaccccagctgccacccccagcgccccagctgctggctggcagagcctggagaccggccagaaccagagcgaccctgtgggccctgccctgaacctgtttggaggcagcacaggcctgggccagtggagcagcagcgctgggggcagcagtggagctgacctggccggggccagcctgtggggcccccccaactacagcagcagcctgtggggcgtgcccaccgtggaggacccccacaggatgggcagccctgcccccctgctgcccggggacctgctgggcggcggcagtgacagcatctag

SEQ ID NO: 22308 - DNA, 5172 bp, synthetic construct
  misc_feature 1..5172: note = Description of Artificial Sequence: Synthetic coding sequence
  source 1..5172: mol_type = other DNA
atgagggagaaggagcaggagcgggaggagcagctgatggaggacaagaagaggaagaaggaggacaagaagaagaaggaggccacccagaagcacagcaaccagaagacagccatgcctgaggtgaccaagcccagcctgagccagcccacagctgccagccccatcggcagcagccccagcccccctgtgaatggaggcaacaatgccaagagggtggccgtgcccaacggccagccccccagcgctgcccgctacatgccccgggaggtgcccccacgcttccgctgccagcaggaccacaaggtgctgctgaagaggggccagcccccaccacccagctgcatgctgctgggcggcggggccggccccccaccctgcacagcccctggggccaaccccaacaatgcccaggtgactggagccctgctgcagagcgagagcggcacagccccagacagcaccctgggcggggccgccgccagcaactatgccaacagcacctggggcagcggggccagcagcaacaacggcaccagccccaaccccatccacatctgggacaaggtgattgtggatggcagtgacatggaggagtggccctgcatcgccagcaaggacacagagagcagcagcgagaacaccacagacaacaacagcgccagcaaccctggcagcgagaagagcaccctgcccggcagcaccaccagcaacaagggcaagggcagccagtgccagagcgccagcagtggaaatgaatgcaacctgggcgtgtggaagagtgaccccaaggccaagtctgtgcagagcagcaacagcaccacagagaacaacaacggcctgggcaactggagaaatgtgtctggccaggacagaattggccctggcagcggcttcagcaacttcaaccccaacagcaaccccagcgcctggccagccctggtgcaggagggcaccagcaggaagggggccctggagacagacaacagcaacagcagcgcccaggtgtccacagtgggccagaccagccgggagcagcagagcaagatggagaatgccggcgtgaactttgtggtgtctggccgggagcaggcccagatccacaacacagatggccccaagaatggaaacaccaacagcctgaacctgagcagccccaaccccatggagaacaagggcatgcccttcggcatgggcctgggcaacaccagccgcagcacagatgcccccagccagagcactggagacaggaagacaggctctgtgggctcctggggcgccgcccggggccccagcggcacagacacagtgtctggccagagcaacagcggcaacaacggcaacaacgggaaggagcgggaggacagctggaagggggcctctgtgcagaagagcacaggcagcaagaatgacagctgggacaacaacaacagaagcactggaggctcctggaactttggcccccaggacagcaatgacaacaagtggggcgagggcaacaagatgaccagcggcgtgtcccagggcgagtggaagcagcccactggaagtgatgagctgaagatcggggagtggagcggccccaaccagcccaacagcagcactggagcctgggacaaccagaagggccaccccctgcctgagaaccagggcaatgcccaggccccctgctggggccgcagcagcagcagcactggaagtgaggtgggcggccagagcacaggcagcaaccacaaggccggcagcagtgacagccacaacagcggccgccgcagctaccggcccacccacccagactgccaggccgtgctgcagaccctgctgagcaggacagacctggacccccgggtgctgagcaacacaggctggggccagacccagatcaagcaggacacagtgtgggacatcgaggaggtgcccaggcctgagggcaagagtgacaagggcacagagggctgggagagcgctgccacccagaccaagaacagcggcggctggggagatgcccccagccagagcaaccagatgaagagcggctggggcgagctgagcgccagcacagagtggaaggaccccaagaacacaggaggctggaatgactacaagaacaacaacagcagcaactggggcggcggccgcccagatgagaagacccccagctcctggaatgaaaaccccagcaaggaccagggctggggcggcggccggcagcccaaccagggctggagcagcggcaagaatggctggggcgaggaggtggaccagaccaagaacagcaactgggagagcagcgccagcaagcctgtgtctggctggggcgagggcggccagaatgagatcggcacctggggcaatggaggaaatgccagcctggccagcaagggcggctgggaggactgcaagaggagccctgcctggaatgaaacaggccggcagcccaacagctggaacaagcagcaccagcagcagcagcccccccagcagcccccaccaccccagcctgaggccagcggctcctggggcggccccccacctcctcctcctggaaatgtgcggcccagcaacagctcctggagcagcggcccccagcctgccacccccaaggatgaggagcccagcggctgggaggagcccagcccccagagcatcagcaggaagatggacattgatgatggcaccagcgcctggggagaccccaacagctacaactacaagaatgtgaacctgtgggacaagaacagccagggcggccctgccccccgggagcccaacctgcccacccccatgaccagcaagagcgccagtgacagcaagtccatgcaggacggctggggcgagagtgatggccctgtgactggagcccggcaccccagctgggaggaggaggaggatggcggcgtgtggaacaccaccggcagccagggcagcgccagcagccacaacagcgcctcctggggccagggcggcaagaagcagatgaagtgcagcctgaagggcggcaacaatgacagctggatgaaccccctggccaagcagttcagcaacatgggcctgctgagccagacagaggacaaccccagcagcaagatggacctgtctgtgggcagcctgagtgacaagaagtttgatgtggacaagagggccatgaacctgggggacttcaatgacatcatgaggaaggacagaagtggcttccggccccccaacagcaaggacatgggcaccacagacagcggcccctactttgagaagggcggcagccacggcctgtttggaaacagcacagcccagagccggggcctgcacacccctgtgcagcccctgaacagcagccccagcctgcgggcccaggtgcccccccagttcatcagcccccaggtgtctgcctccatgctgaagcagttccccaacagcggcctgagccctggcctcttcaacgtgggcccccagctgagcccccagcagatcgccatgctgagccagctgccccagatcccccagttccagctggcctgccagctgctgctgcagcagcagcagcagcagcagctgctgcagaaccagaggaagatcagccaggccgtgcggcagcagcaggagcagcagctggccaggatggtgtctgccctgcagcagcagcagcagcagcagcagaggcagcccggcatgaagcacagccccagccaccctgtgggccccaagccccacctggacaacatggtgcccaatgccctgaatgtgggcctgcctgacctgcagaccaagggccccatccctggctacggcagcggcttcagcagcggcggcatggactatggcatggtgggcggcaaggaggccggcacagagagccgcttcaagcagtggacctccatgatggagggcctgcccagcgtggccacccaggaggccaacatgcacaagaatggagccatcgtggcccctgggaagacccggggcggcagcccctacaaccagtttgacatcatccctggggacaccctgggcggccacactggacctgctggggacagctggctgcctgccaagagcccccccaccaacaagattggcagcaagagcagcaatgcctcctggcccccagagttccagcccggggtgccctggaagggcatccagaacatcgaccctgagagtgacccctacgtgaccccaggctctgtgctgggcggcacagccaccagccccatcgtggacacagaccaccagctgctgcgggacaacaccaccggcagcaacagcagcctgaacaccagcctgcccagccctggggcctggccctacagcgccagtgacaacagcttcaccaacgtgcacagcaccagcgccaagttcccagactacaagagcacctggagcccagaccccatcggccacaaccccacccacctgagcaacaagatgtggaagaaccacatcagcagcaggaacaccacccccctgcccaggcctcctcctggcctgaccaaccccaagcccagcagcccctggagcagcacagcccccaggtctgtgcggggctggggcacccaggacagccggctggccagcgccagcacctggagcgatggcggctctgtgcggcccagctactggctggtgctgcacaacctgaccccccagattgatggcagcaccctgcggaccatctgcatgcagcacggccccctgctgaccttccacctgaacctgacccagggcacagccctgatccgctacagcaccaagcaggaggccgccaaggcccagacagccctgcacatgtgtgtgctgggcaacaccaccatcctggccgagtttgccacagatgatgaggtgagccgcttcctggcccaggcccagccccccaccccagctgccacccccagcgccccagctgctggctggcagagcctggagaccggccagaaccagagcgaccctgtgggccctgccctgaacctgtttggaggcagcacaggcctgggccagtggagcagcagcgctgggggcagcagtggagctgacctggccggggccagcctgtggggcccccccaactacagcagcagcctgtggggcgtgcccaccgtggaggacccccacaggatgggcagccctgcccccctgctgcccggggacctgctgggcggcggcagtgacagcatctag

SEQ ID NO: 22309 - DNA, 3090 bp, synthetic construct; identical to SEQ ID NO: 22306
  misc_feature 1..3090: note = Description of Artificial Sequence: Synthetic coding sequence
  source 1..3090: mol_type = other DNA

SEQ ID NO: 22310 - DNA, 114 bp, synthetic construct
  misc_feature 1..114: note = Description of Artificial Sequence: Synthetic coding sequence
  source 1..114: mol_type = other DNA
atgcagaccaatgaaggagaggtgtctgaggagagcagcagcaaggtggagcaggaggactttgtgatggagggccacggcaagaccccacctcctggagaggagagcaagtag

SEQ ID NO: 22311 - DNA, 5502 bp, synthetic construct
  misc_feature 1..5502: note = Description of Artificial Sequence: Synthetic coding sequence
  source 1..5502: mol_type = other DNA
atgagggagaaggagcaggagcgggaggagcagctgatggaggacaagaagaggaagaaggaggacaagaagaagaaggaggccacccagaaggtgacagagcagaagaccaaggtgcctgaggtgaccaagcccagcctgagccagcccacagctgccagccccatcggcagcagccccagcccccctgtgaatggaggcaacaatgccaagagggtggccgtgcccaacggccagccccccagcgctgcccgctacatgccccgggaggtgcccccacgcttccgctgccagcaggaccacaaggtgctgctgaagaggggccagcccccaccacccagctgcatgctgctgggcggcggggccggccccccaccctgcacagcccctggggccaaccccaacaatgcccaggtgactggagccctgctgcagagcgagagcggcacagccccagacagcaccctgggcggggccgccgccagcaactatgccaacagcacctggggcagcggggccagcagcaacaacggcaccagccccaaccccatccacatctgggacaaggtgattgtggatggcagtgacatggaggagtggccctgcatcgccagcaaggacacagagagcagcagcgagaacaccacagacaacaacagcgccagcaaccctggcagcgagaagagcaccctgcccggcagcaccaccagcaacaagggcaagggcagccagtgccagagcgccagcagtggaaatgaatgcaacctgggcgtgtggaagagtgaccccaaggccaagtctgtgcagagcagcaacagcaccacagagaacaacaacggcctgggcaactggagaaatgtgtctggccaggacagaattggccctggcagcggcttcagcaacttcaaccccaacagcaaccccagcgcctggccagccctggtgcaggagggcaccagcaggaagggggccctggagacagacaacagcaacagcagcgcccaggtgtccacagtgggccagaccagccgggagcagcagagcaagatggagaatgccggcgtgaactttgtggtgtctggccgggagcaggcccagatccacaacacagatggccccaagaatggaaacaccaacagcctgaacctgagcagccccaaccccatggagaacaagggcatgcccttcggcatgggcctgggcaacaccagccgcagcacagatgcccccagccagagcactggagacaggaagacaggctctgtgggctcctggggcgccgcccggggccccagcggcacagacacagtgtctggccagagcaacagcggcaacaacggcaacaacgggaaggagcgggaggacagctggaagggggcctctgtgcagaagagcacaggcagcaagaatgacagctgggacaacaacaacagaagcactggaggctcctggaactttggcccccaggacagcaatgacaacaagtggggcgagggcaacaagatgaccagcggcgtgtcccagggcgagtggaagcagcccactggaagtgatgagctgaagatcggggagtggagcggccccaaccagcccaacagcagcactggagcctgggacaaccagaagggccaccccctgcctgagaaccagggcaatgcccaggccccctgctggggccgcagcagcagcagcactggaagtgaggtgggcggccagagcacaggcagcaaccacaaggccggcagcagtgacagccacaacagcggccgccgcagctaccggcccacccacccagactgccaggccgtgctgcagaccctgctgagcaggacagacctggacccccgggtgctgagcaacacaggctggggccagacccagatcaagcaggacacagtgtgggacatcgaggaggtgcccaggcctgagggcaagagtgacaagggcacagagggctgggagagcgctgccacccagaccaagaacagcggcggctggggagatgcccccagccagagcaaccagatgaagagcggctggggcgagctgagcgccagcacagagtggaaggaccccaagaacacaggaggctggaatgactacaagaacaacaacagcagcaactggggcggcggccgcccagatgagaagacccccagctcctggaatgaaaaccccagcaaggaccagggctggggcggcggccggcagcccaaccagggctggagcagcggcaagaatggctggggcgaggaggtggaccagaccaagaacagcaactgggagagcagcgccagcaagcctgtgtctggctggggcgagggcggccagaatgagatcggcacctggggcaatggaggaaatgccagcctggccagcaagggcggctgggaggactgcaagaggagccctgcctggaatgaaacaggccggcagcccaacagctggaacaagcagcaccagcagcagcagcccccccagcagcccccaccaccccagcctgaggccagcggctcctggggcggccccccacctcctcctcctggaaatgtgcggcccagcaacagctcctggagcagcggcccccagcctgccacccccaaggatgaggagcccagcggctgggaggagcccagcccccagagcatcagcaggaagatggacattgatgatggcaccagcgcctggggagaccccaacagctacaactacaagaatgtgaacctgtgggacaagaacagccagggcggccctgccccccgggagcccaacctgcccacccccatgaccagcaagagcgcctctgtgtggagcaagagcaccccaccagccccagacaatggcaccagcgcctggggcgagcccaatgaaagcagccctggctggggcgagatggatgacaccggggccagcaccaccggctggggcaacaccccagccaatgccccaaatgccatgaagcccaacagcaagtccatgcaggacggctggggcgagagtgatggccctgtgactggagcccggcaccccagctgggaggaggaggaggatggaggagtgtggaacaccaccggcagccagggcagcgccagcagccacaacagcgcctcctggggccagggcggcaagaagcagatgaagtgcagcctgaagggcggcaacaatgacagctggatgaaccccctggccaagcagttcagcaacatgggcctgctgagccagacagaggacaaccccagcagcaagatggacctgtctgtgggcagcctgagtgacaagaagtttgatgtggacaagagggccatgaacctgggggacttcaatgacatcatgaggaaggacaggagcggcttccggccccccaacagcaaggacatgggcaccacagattctggcccctactttgagaagctgaccctgcccttcagcaaccaggacggctgcctgggagatgaggccccctgcagccccttcagccccagccccagctacaagctgagccccagcggcagcaccctgcccaacgtgtccctgggcgccatcggcaccggcctgaacccccagaactttgctgcccggcagggcggcagccacggcctgtttggaaacagcacagcccagagccggggcctgcacacccctgtgcagcccctgaacagcagccccagcctgcgggcccaggtgcccccccagttcatcagcccccaggtgtctgcctccatgctgaagcagttccccaacagcggcctgagccctggcctcttcaacgtgggcccccagctgagcccccagcagatcgccatgctgagccagctgccccagatcccccagttccagctggcctgccagctgctgctgcagcagcagcagcagcagcagctgctgcagaaccagaggaagatcagccaggccgtgcggcagcagcaggagcagcagctggccaggatggtgtctgccctgcagcagcagcagcagcagcagcagaggcagcccggcatgaagcacagccccagccaccctgtgggccccaagccccacctggacaacatggtgcccaatgccctgaatgtgggcctgcctgacctgcagaccaagggccccatccctggctacggcagcggcttcagcagcggcggcatggactatggcatggtgggcggcaaggaggccggcacagagagccgcttcaagcagtggacctccatgatggagggcctgcccagcgtggccacccaggaggccaacatgcacaagaatggagccatcgtggcccctgggaagacccggggcggcagcccctacaaccagtttgacatcatccctggggacaccctgggcggccacactggacctgctggggacagctggctgcctgccaagagcccccccaccaacaagattggcagcaagagcagcaatgcctcctggcccccagagttccagcccggggtgccctggaagggcatccagaacatcgaccctgagagtgacccctacgtgaccccaggctctgtgctgggcggcacagccaccagccccatcgtggacacagaccaccagctgctgcgggacaacaccaccggcagcaacagcagcctgaacaccagcctgcccagccctggggcctggccctacagcgccagtgacaacagcttcaccaacgtgcacagcaccagcgccaagttcccagactacaagagcacctggagcccagaccccatcggccacaaccccacccacctgagcaacaagatgtggaagaaccacatcagcagcaggaacaccacccccctgcccaggcctcctcctggcctgaccaaccccaagcccagcagcccctggagcagcacagcccccaggtctgtgcggggctggggcacccaggacagccggctggccagcgccagcacctggagcgatggcggctctgtgcggcccagctactggctggtgctgcacaacctgaccccccagattgatggcagcaccctgcggaccatctgcatgcagcacggccccctgctgaccttccacctgaacctgacccagggcacagccctgatccgctacagcaccaagcaggaggccgccaaggcccagacagccctgcacatgtgtgtgctgggcaacaccaccatcctggccgagtttgccacagatgatgaggtgagccgcttcctggcccaggcccagccccccaccccagctgccacccccagcgccccagctgctggctggcagagcctggagaccggccagaaccagagcgaccctgtgggccctgccctgaacctgtttggaggcagcacaggcctgggccagtggagcagcagcgctgggggcagcagtggagctgacctggccggggccagcctgtggggcccccccaactacagcagcagcctgtggggcgtgcccaccgtggaggacccccacaggatgggcagccctgcccccctgctgcccggggacctgctgggcggcggcagtgacagcatctag

SEQ ID NO: 22312 - DNA, 3153 bp, synthetic construct
  misc_feature 1..3153: note = Description of Artificial Sequence: Synthetic coding sequence
  source 1..3153: mol_type = other DNA
atggaggtggccgtggagaaggctgtggccgctgctgctgctgccagcgctgctgccagcggcggccccagcgctgcccccagcggggagaatgaagctgagagccggcagggcccagattctgagcggggcggggaggccgcccggctgaacctgctggacacctgtgctgtgtgccaccagaacatccagagccgggcccccaagctgctgccctgcctgcacagcttctgccagcgctgcctgcctgccccccagcgctacctgatgctgcctgcccccatgctgggcagcgctgagaccccacctcctgtgcctgcccctggcagccctgtgtctggcagcagcccctttgccacccaggtgggcgtcatccgctgccctgtgtgcagccaggagtgtgccgagcggcacatcatcgacaacttctttgtgaaggacaccacagaggtgcccagcagcacagtggagaagagcaaccaggtgtgcaccagctgtgaagataatgctgaggccaacggcttctgtgtggagtgtgtggagtggctgtgcaagacctgcatccgggcccaccagagggtgaagttcaccaaggaccacacagtgcggcagaaggaggaggtgtccccagaggccgtgggcgtgaccagccagaggcctgtgttctgccccttccacaagaaggagcagctgaagctgtactgtgagacctgtgacaagctgacctgccgggactgccagctgctggagcacaaggagcaccgctaccagttcatcgaggaggccttccagaaccagaaggtgatcatcgacaccctcatcaccaagctgatggagaagaccaagtacatcaagttcaccggcaaccagatccagaaccgcatcatcgaggtgaaccagaaccagaagcaggtggagcaggacatcaaggtggccatcttcaccctgatggtggagatcaacaagaagggcaaggccctgctgcaccagctggagagcctggccaaggaccacaggatgaagctgatgcagcagcagcaggaggtggccggcctgagcaagcagctggagcacgtgatgcacttcagcaagtgggccgtgagcagcggcagcagcacagccctgctgtacagcaagaggctcatcacctaccgcctgcggcacctgctgcgggcccgctgtgatgccagccctgtgaccaacaacaccatccagttccactgtgaccccagcttctgggcccagaacatcatcaacctgggcagcctggtgattgaggacaaggagagccagccccagatgcccaagcagaaccctgtggtggagcagaacagccagcccccatctggcctgagcagcaaccagctgagcaagttccccacccagatcagcctggcccagctgcggctgcagcacatgcagcagcaggtgatggcccagaggcagcaggtgcagaggaggcctgcccctgtgggcctgcccaaccccaggatgcagggccccatccagcagcccagcatcagccaccagcagcccccacccaggctcatcaacttccagaaccacagccccaagcccaatggacctgtgctgcccccccacccccagcagctgcgctacccacccaaccagaacatcccccggcaggccatcaagcccaaccccctgcagatggccttcctggcccagcaggccatcaagcagtggcagatcagcagcggccagggcacccccagcaccaccaacagcaccagcagcacccccagcagccccaccatcaccagcgctgctggctatgatggcaaggccttcggcagccccatgattgacctgagcagccctgtgggcggcagctacaacctgcccagcctgcctgacatcgactgcagcagcaccatcatgctggacaacatcgtgaggaaggacaccaacatcgaccacggccagccccggccccccagcaacagaacagtgcagagccccaacagctctgtgcccagccctggcctggccggccctgtgaccatgacctctgtgcacccccccatccgcagccccagcgccagctctgtgggcagccggggcagcagcggcagcagcagcaagccagctggagctgacagcacccacaaggtgcctgtggtgatgctggagcccatccgcatcaagcaggagaacagcggccccccagaaaattatgacttccctgtggtgattgtgaagcaggagagtgatgaggagagccggccccagaatgccaactaccccaggagcatcctgaccagcctgctgctgaacagcagccagagcagcaccagcgaggagaccgtgctgcggagtgatgccccagacagcactggagaccagcccggcctgcaccaggacaacagcagcaatggcaagtctgagtggctggaccccagccagaagagccccctgcacgtgggggagaccaggaaagaagatgaccccaatgaagactggtgtgctgtgtgccagaatggaggagagctgctgtgctgtgagaagtgccccaaggtgttccacctgagctgccacgtgcccaccctgaccaacttccccagcggggagtggatctgcaccttctgccgggacctgagcaagccagaggtggagtatgactgtgatgcccccagccacaacagcgagaagaagaagacagagggcctggtgaagctgacccccatcgacaagaggaaatgtgagcggctgctgctcttcctgtactgccacgagatgagcctggccttccaggaccctgtgcccctgactgtgcctgactactacaagatcatcaagaaccccatggacctgagcaccatcaagaagaggctgcaggaggactacagcatgtacagcaagccagaagattttgtggccgacttccgcctcatcttccagaactgtgccgagttcaatgaaccagacagcgaggtggccaatgccggcatcaagctggagaactactttgaggagctgctgaagaacctgtacccagagaagcgcttccccaagccagagttcagaaatgaaagtgaggacaacaagttcagtgatgacagtgatgatgactttgtgcagcccaggaagaagaggctgaagagcattgaggagcggcagctgctgaagtag

SEQ ID NO: 22313 - DNA, 1650 bp, synthetic construct
  misc_feature 1..1650: note = Description of Artificial Sequence: Synthetic coding sequence
  source 1..1650: mol_type = other DNA
atggagggccccaggtctgctgcctgccgggcccggcctgccaccagccctggagctgtggacctgacagcccctcctcctccacccctgctgcgcatcctgaacagccgggccgccccagccaccaggacctttgctgacctgtgccgcagcctgctgcagcctgagagccgggtgctgtgccgcctgcagcctgtgaactgctaccccccagctgccagcaccaagctgtgccctgtgggcgtcatccgctgccctgtgtgcagccaggagtgtgccgagcggcacatcatcgacaacttctttgtgaaggacaccacagaggtgcccagcagcacagtggagaagagcaaccaggtgtgcaccagctgtgaagataatgctgaggccaacggcttctgtgtggagtgtgtggagtggctgtgcaagacctgcatccgggcccaccagagggtgaagttcaccaaggaccacacagtgcggcagaaggaggaggtgtccccagaggccgtgggcgtgaccagccagaggcctgtgttctgccccttccacaagaaggagcagctgaagctgtactgtgagacctgtgacaagctgacctgccgggactgccagctgctggagcacaaggagcaccgctaccagttcatcgaggaggccttccagaaccagaaggtgatcatcgacaccctcatcaccaagctgatggagaagaccaagtacatcaagttcaccggcaaccagatccagaaccgcatcatcgaggtgaaccagaaccagaagcaggtggagcaggacatcaaggtggccatcttcaccctgatggtggagatcaacaagaagggcaaggccctgctgcaccagctggagagcctggccaaggaccacaggatgaagctgatgcagcagcagcaggaggtggccggcctgagcaagcagctggagcacgtgatgcacttcagcaagtgggccgtgagcagcggcagcagcacagccctgctgtacagcaagaggctcatcacctaccgcctgcggcacctgctgcgggcccgctgtgatgccagccctgtgaccaacaacaccatccagttccactgtgaccccagcttctgggcccagaacatcatcaacctgggcagcctggtgattgaggacaaggagagccagccccagatgcccaagcagaaccctgtggtggagcagaacagccagcccccatctggcctgagcagcaaccagctgagcaagttccccacccagatcagcctggcccagctgcggctgcagcacatgcagcagcagcagcccccacccaggctcatcaacttccagaaccacagccccaagcccaatggacctgtgctgcccccccacccccagcagctgcgctacccacccaaccagaacatcccccggcaggccatcaagcccaaccccctgcagatggccttcctggcccagcaggccatcaagcagtggcagatcagcagcggccagggcacccccagcaccacccagaacatcaacacagctgcctgcaccgtgtttgatgtgcgggtgctgcaccacatcccctactgggccctgaacatcagcagcagcgagcgggacagcttcctgtggttcagctctgtgtacaacctggagtag

SEQ ID NO: 22314 - DNA, 3051 bp, synthetic construct
  misc_feature 1..3051: note = Description of Artificial Sequence: Synthetic coding sequence
  source 1..3051: mol_type = other DNA
atggaggtggccgtggagaaggctgtggccgctgctgctgctgccagcgctgctgccagcggcggccccagcgctgcccccagcggggagaatgaagctgagagccggcagggcccagattctgagcggggcggggaggccgcccggctgaacctgctggacacctgtgctgtgtgccaccagaacatccagagccgggcccccaagctgctgccctgcctgcacagcttctgccagcgctgcctgcctgccccccagcgctacctgatgctgcctgcccccatgctgggcagcgctgagaccccacctcctgtgcctgcccctggcagccctgtgtctggcagcagcccctttgccacccaggtgggcgtcatccgctgccctgtgtgcagccaggagtgtgccgagcggcacatcatcgacaacttctttgtgaaggacaccacagaggtgcccagcagcacagtggagaagagcaaccaggtgtgcaccagctgtgaagataatgctgaggccaacggcttctgtgtggagtgtgtggagtggctgtgcaagacctgcatccgggcccaccagagggtgaagttcaccaaggaccacacagtgcggcagaaggaggaggtgtccccagaggccgtgggcgtgaccagccagaggcctgtgttctgccccttccacaagaaggagcagctgaagctgtactgtgagacctgtgacaagctgacctgccgggactgccagctgctggagcacaaggagcaccgctaccagttcatcgaggaggccttccagaaccagaaggtgatcatcgacaccctcatcaccaagctgatggagaagaccaagtacatcaagttcaccggcaaccagatccagaaccgcatcatcgaggtgaaccagaaccagaagcaggtggagcaggacatcaaggtggccatcttcaccctgatggtggagatcaacaagaagggcaaggccctgctgcaccagctggagagcctggccaaggaccacaggatgaagctgatgcagcagcagcaggaggtggccggcctgagcaagcagctggagcacgtgatgcacttcagcaagtgggccgtgagcagcggcagcagcacagccctgctgtacagcaagaggctcatcacctaccgcctgcggcacctgctgcgggcccgctgtgatgccagccctgtgaccaacaacaccatccagttccactgtgaccccagcttctgggcccagaacatcatcaacctgggcagcctggtgattgaggacaaggagagccagccccagatgcccaagcagaaccctgtggtggagcagaacagccagcccccatctggcctgagcagcaaccagctgagcaagttccccacccagatcagcctggcccagctgcggctgcagcacatgcagcagcagcagcccccacccaggctcatcaacttccagaaccacagccccaagcccaatggacctgtgctgcccccccacccccagcagctgcgctacccacccaaccagaacatcccccggcaggccatcaagcccaaccccctgcagatggccttcctggcccagcaggccatcaagcagtggcagatcagcagcggccagggcacccccagcaccaccaacagcaccagcagcacccccagcagccccaccatcaccagcgctgctggctatgatggcaaggccttcggcagccccatgattgacctgagcagccctgtgggcggcagctacaacctgcccagcctgcctgacatcgactgcagcagcaccatcatgctggacaacatcgtgaggaaggacaccaacatcgaccacggccagccccggccccccagcaacagaacagtgcagagccccaacagctctgtgcccagccctggcctggccggccctgtgaccatgacctctgtgcacccccccatccgcagccccagcgccagctctgtgggcagccggggcagcagcggcagcagcagcaagccagctggagctgacagcacccacaaggtgcctgtggtgatgctggagcccatccgcatcaagcaggagaacagcggccccccagaaaattatgacttccctgtggtgattgtgaagcaggagagtgatgaggagagccggccccagaatgccaactaccccaggagcatcctgaccagcctgctgctgaacagcagccagagcagcaccagcgaggagaccgtgctgcggagtgatgccccagacagcactggagaccagcccggcctgcaccaggacaacagcagcaatggcaagtctgagtggctggaccccagccagaagagccccctgcacgtgggggagaccaggaaagaagatgaccccaatgaagactggtgtgctgtgtgccagaatggaggagagctgctgtgctgtgagaagtgccccaaggtgttccacctgagctgccacgtgcccaccctgaccaacttccccagcggggagtggatctgcaccttctgccgggacctgagcaagccagaggtggagtatgactgtgatgcccccagccacaacagcgagaagaagaagacagagggcctggtgaagctgacccccatcgacaagaggaaatgtgagcggctgctgctcttcctgtactgccacgagatgagcctggccttccaggaccctgtgcccctgactgtgcctgactactacaagatcatcaagaaccccatggacctgagcaccatcaagaagaggctgcaggaggactacagcatgtacagcaagccagaagattttgtggccgacttccgcctcatcttccagaactgtgccgagttcaatgaaccagacagcgaggtggccaatgccggcatcaagctggagaactactttgaggagctgctgaagaacctgtacccagagaagcgcttccccaagccagagttcagaaatgaaagtgaggacaacaagttcagtgatgacagtgatgatgactttgtgcagcccaggaagaagaggctgaagagcattgaggagcggcagctgctgaagtag

SEQ ID NO: 22315 - DNA, 2886 bp, synthetic construct
  misc_feature 1..2886: note = Description of Artificial Sequence: Synthetic coding sequence
  source 1..2886: mol_type = other DNA
atgctgcctgcccccatgctgggcagcgctgagaccccacctcctgtgcctgcccctggcagccctgtgtctggcagcagcccctttgccacccaggtgggcgtcatccgctgccctgtgtgcagccaggagtgtgccgagcggcacatcatcgacaacttctttgtgaaggacaccacagaggtgcccagcagcacagtggagaagagcaaccaggtgtgcaccagctgtgaggacaatgctgaggccaacggcttctgtgtggagtgtgtggagtggctgtgcaagacctgcatccgggcccaccagagggtgaagttcaccaaggaccacacagtgcggcagaaggaggaggtgtccccagaggccgtgggcgtgaccagccagaggcctgtgttctgccccttccacaagaaggagcagctgaagctgtactgtgagacctgtgacaagctgacctgccgggactgccagctgctggagcacaaggagcaccgctaccagttcatcgaggaggccttccagaaccagaaggtgatcatcgacaccctcatcaccaagctgatggagaagaccaagtacatcaagttcaccggcaaccagatccagaaccgcatcatcgaggtgaaccagaaccagaagcaggtggagcaggacatcaaggtggccatcttcaccctgatggtggagatcaacaagaagggcaaggccctgctgcaccagctggagagcctggccaaggaccacaggatgaagctgatgcagcagcagcaggaggtggccggcctgagcaagcagctggagcacgtgatgcacttcagcaagtgggccgtgagcagcggcagcagcacagccctgctgtacagcaagaggctcatcacctaccgcctgcggcacctgctgcgggcccgctgtgatgccagccctgtgaccaacaacaccatccagttccactgtgaccccagcttctgggcccagaacatcatcaacctgggcagcctggtgattgaggacaaggagagccagccccagatgcccaagcagaaccctgtggtggagcagaacagccagccccccagcggcctgagcagcaaccagctgagcaagttccccacccagatcagcctggcccagctgcggctgcagcacatgcagcagcaggtgatggcccagaggcagcaggtgcagaggaggcctgcccctgtgggcctgcccaaccccaggatgcagggccccatccagcagcccagcatcagccaccagcagcccccacccaggctcatcaacttccagaaccacagccccaagcccaacggccctgtgctgcccccccacccccagcagctgcgctacccacccaaccagaacatcccccggcaggccatcaagcccaaccccctgcagatggccttcctggcccagcaggccatcaagcagtggcagatcagcagcggccagggcacccccagcaccaccaacagcaccagcagcacccccagcagccccaccatcaccagcgctgctggctatgatggcaaggccttcggcagccccatgattgacctgagcagccctgtgggcggcagctacaacctgcccagcctgcctgacatcgactgcagcagcaccatcatgctggacaacatcgtgaggaaggacaccaacatcgaccacggccagcccaggcctcccagcaacagaacagtgcagagccccaacagctctgtgcccagccctggcctggccggccctgtgaccatgacctctgtgcacccccccatccgcagccccagcgccagctctgtgggcagccggggcagcagcggcagcagcagcaagccagctggagctgacagcacccacaaggtgcctgtggtgatgctggagcccatccgcatcaagcaggagaacagcggccccccagagaactatgacttccctgtggtgattgtgaagcaggagagtgatgaggagagccggccccagaatgccaactaccccaggagcatcctgaccagcctgctgctgaacagcagccagagcagcaccagcgaggagaccgtgctgcggagtgatgccccagacagcactggagaccagcccggcctgcaccaggacaacagcagcaatggcaagtctgagtggctggaccccagccagaagagccccctgcacgtgggggagaccaggaaggaggatgaccccaatgaagactggtgtgctgtgtgccagaatggaggagagctgctgtgctgtgagaagtgccccaaggtgttccacctgagctgccacgtgcccaccctgaccaacttccccagcggggagtggatctgcaccttctgccgggacctgagcaagccagaggtggagtatgactgtgatgcccccagccacaacagcgagaagaagaagacagagggcctggtgaagctgacccccatcgacaagaggaaatgtgagcggctgctgctcttcctgtactgccacgagatgagcctggccttccaggaccctgtgcccctgactgtgcctgactactacaagatcatcaagaaccccatggacctgagcaccatcaagaagaggctgcaggaggactacagcatgtacagcaagccagaggactttgtggccgacttccgcctcatcttccagaactgtgccgagttcaatgaaccagattctgaggtggccaatgccggcatcaagctggagaactactttgaggagctgctgaagaacctgtacccagagaagcgcttccccaagccagagttcagaaatgaaagtgaggacaacaagttcagtgatgacagtgatgatgactttgtgcagcccaggaagaagaggctgaagagcattgaggagcggcagctgctgaagtag

SEQ ID NO: 22316 - DNA, 1692 bp, synthetic construct
  misc_feature 1..1692: note = Description of Artificial Sequence: Synthetic coding sequence
  source 1..1692: mol_type = other DNA
atgggcctgcaggcctgcctgctgggcctgtttgccctgatcctgagcggcaagtgcagctacagccctgagccagaccagaggaggaccctgcccccaggctgggtgtccctgggccgggctgaccctgaggaggagctgagcctgacctttgccctgcggcagcagaatgtggagcggctgtctgagctggtgcaggccgtgtctgaccccagcagcccccagtatggcaagtacctgaccctggagaatgtggccgacctggtgcggcccagccccctgaccctgcacacagtgcagaagtggctgctggccgccggggcccagaagtgccacagcgtcatcacccaggacttcctgacctgctggctgagcatccggcaggccgagctgctgctgcccggggctgagttccaccactacgtgggcggccccacagagacccacgtggtgcgcagcccccacccctaccagctgccccaggccctggccccccacgtggactttgtgggcggcctgcaccgcttcccccccaccagcagcctgcggcagaggcctgagccccaggtgactggaacagtgggcctgcacctgggcgtgaccccatctgtcatcaggaagcgctacaacctgaccagccaggatgtgggcagcggcaccagcaacaacagccaggcctgtgcccagttcctggagcagtacttccatgacagcgacctggcccagttcatgaggctgtttggaggcaactttgcccaccaggcctctgtggcccgggtggtgggccagcagggccggggccgggccggcatcgaggccagcctggatgtgcagtacctgatgtctgctggggccaacatcagcacctgggtgtacagcagccctggaagacatgagggccaggagcccttcctgcagtggctgatgctgctgagcaatgaaagtgccctgccccacgtgcacacagtgtcctatggagatgatgaggacagcctgagcagcgcctacatccagagggtgaacacagagctgatgaaggccgccgcccggggcctgaccctgctgtttgccagcggggacagcggggccggctgctggagcgtgtctggccgccaccagttccggcccaccttccctgccagcagcccctacgtgaccaccgtgggcggcaccagcttccaggagcccttcctgatcaccaatgaaattgtggactacatcagcggcggcggcttcagcaatgtgttcccccggcccagctaccaggaggaggccgtgaccaagttcctgagcagcagcccccacctgccccccagcagctacttcaatgccagcggccgggcctacccagatgtggccgccctgagtgatggctactgggtggtgagcaacagagtgcccatcccctgggtgtctggcaccagcgccagcacccctgtgtttggaggcatcctgagcctcatcaatgagcaccgcatcctgagcggccggccccccctgggcttcctgaacccccggctgtaccagcagcacggggccggcctgtttgatgtgacccggggctgccacgagagctgcctggatgaggaggtggagggccagggcttctgcagcggccctggctgggaccctgtgacaggctggggcacccccaacttccctgccctgctgaagaccctgctgaacccctag

SEQ ID NO: 22317 - DNA, 1041 bp, synthetic construct
  misc_feature 1..1041: note = Description of Artificial Sequence: Synthetic coding sequence
  source 1..1041: mol_type = other DNA
atgggcctgcaggcctgcctgctgggcctgtttgccctgatcctgagcggcaagtgcagctacagccctgagccagaccagaggaggaccctgcccccaggctgggtgtccctgggccgggctgaccctgaggaggagctgagcctgacctttgccctgcggcagcagaatgtggagcggctgtctgagctggtgcaggccgtgtctgaccccagcagcccccagtatggcaagtacctgaccctggagaatgtggccgacctggtgcggcccagccccctgaccctgcacacagtgcagaagtggctgctggccgccggggcccagaagtgccacagcgtcatcacccaggacttcctgacctgctggctgagcatccggcaggccgagctgctgctgcccggggctgagttccaccactacgtgggcggccccacagagacccacgtggtgcgcagcccccacccctaccagctgccccacatcctggaggtgccctacgtgaccaccgtgggcggcaccagcttccaggagcccttcctgatcaccaatgagatcgtggactacatcagcggcggcggcttcagcaatgtgttcccccggcccagctaccaggaggaggccgtgaccaagttcctgagcagcagcccccacctgccccccagcagctacttcaatgccagcggccgggcctacccagatgtggccgccctgagtgatggctactgggtggtgagcaacagagtgcccatcccctgggtgtctggcaccagcgccagcacccctgtgtttggaggcatcctgagcctcatcaatgagcaccgcatcctgagcggccggccccccctgggcttcctgaacccccggctgtaccagcagcacggggccggcctgtttgatgtgacccggggctgccacgagagctgcctggatgaggaggtggagggccagggcttctgcagcggccctggctgggaccctgtgacaggctggggcacccccaacttccctgccctgctgaagaccctgctgaacccctag

SEQ ID NO: 22318 - DNA, 3495 bp, synthetic construct
  misc_feature 1..3495: note = Description of Artificial Sequence: Synthetic coding sequence
  source 1..3495: mol_type = other DNA
atggcccagcaggccaacgtgggggagctgctggccatgctggacagccccatgctgggcgtgagagatgatgtgacagctgtgttcaaggagaacctgaacagcgaccggggccccatgctggtgaacaccctggtggactactacctggagaccagcagccagcctgccctgcacatcctgaccaccctgcaggagccccatgacaagcacctgctggaccgcatcaatgaatatgtgggcaaggccgccacccggctgagcatcctgagcctgctgggccacgtgatccggctgcagcccagctggaagcacaagctgagccaggcccccctgctgcccagcctgctgaagtgcctgaagatggacacagatgtggtggtgctgaccactggagtgctggtgctgatcaccatgctgcccatgatcccccagagcggcaagcagcacctgctggacttctttgacatcttcggccgcctgagctcctggtgcctgaagaagccaggccacgtggccgaggtgtacctggtgcacctgcacgcctctgtgtatgccctcttccaccggctgtatggcatgtacccctgcaactttgtgtccttcctgcggagccactacagcatgaaggagaacctggagacctttgaggaggtggtgaagcccatgatggagcacgtgcgcatccaccctgagctggtgacaggcagcaaggaccacgagctggacccccggcgctggaagaggctggagacccatgatgtggtgattgaatgtgccaagatcagcctggaccccacagaggccagctatgaagatggctacagcgtgagccaccagatcagcgcccgcttcccccacaggtctgcagatgtgaccaccagcccctatgctgacacccagaacagctatggctgtgccaccagcaccccctacagcaccagccggctgatgctgctgaacatgcctggccagctgccccagaccctgagcagccccagcaccaggctcatcacagagcccccccaggccaccctgtggagccccagcatggtgtgtggcatgaccaccccacccaccagccctggaaatgtgcccccagacctgagccacccctacagcaaggtgtttggcaccacagctgggggcaagggcacccccctgggcaccccagccaccagccccccaccagcccccctgtgccacagtgatgattatgtgcacatcagcctgccccaggccaccgtgaccccacccaggaaggaggagaggatggattctgcccggccctgcctgcaccggcagcaccacctgctgaatgaccggggcagcgaggagcccccaggcagcaaaggatctgtgaccctgagtgacctgcccggcttcctgggggacctggccagcgaggaggacagcattgagaaggacaaggaggaggccgccatcagccgggagctgtctgagatcaccacagctgaggccgagcctgtggtgccccggggcggctttgacagccccttctacagagacagcctgcccggcagccagaggaagacccacagcgctgccagcagcagccagggcgcctctgtgaaccctgagcccctgcacagcagcctggacaagctgggccctgacacccccaagcaggccttcacccccatcgacctgccctgtggcagcgcagatgagagccctgctggggaccgggagtgccagaccagcctggagaccagcatcttcacccccagcccctgcaagatccccccacccaccagggtgggcttcggcagcggccagcccccaccctatgaccacctgtttgaggtggccctgcccaagacagcccaccactttgtgatcaggaagacagaggagctgctgaagaaggccaagggcaacacagaagaagatggagtgcccagcaccagccccatggaggtgctggacaggctcatccagcagggcgcagatgcccacagcaaggagctgaacaagctgcccctgcccagcaagtctgtggactggacccactttggaggcagccccccatctgatgagatccgcaccctgcgggaccagctgctgctgctgcacaaccagctgctgtatgagcgcttcaagaggcagcagcacgccctgaggaacagaaggctgctgaggaaggtgatcaaggctgctgccctggaggagcacaatgctgccatgaaggaccagctgaagctgcaggagaaggacatccagatgtggaaggtgtccctgcagaaggagcaggcccgctacaaccagctgcaggagcagagggacaccatggtgaccaagctgcacagccagatccggcagctgcagcacgaccgggaggagttctacaaccagagccaggagctgcagaccaagctggaggactgcaggaacatgattgctgagctgcgcatcgagctgaagaaggccaacaacaaggtgtgccacacagagctgctgctgagccaggtgtcccagaagctgagcaacagcgagagcgtgcagcagcagatggagttcctgaaccggcagctgctggtgctgggggaggtgaatgagctgtacctggagcagctgcagaacaagcacagcgacaccaccaaggaggtggagatgatgaaggccgcctacaggaaggagctggagaagaacagaagccacgtgctgcagcagacccagaggctggacaccagccagaagaggatcctggagctggagagccacctggccaagaaggaccacctgctgctggagcagaagaagtacctggaggatgtgaagctgcaggcccggggccagctgcaggccgctgagagccgctatgaggcccagaagaggatcacccaggtgtttgagctggagatcctggacctgtatggccgcctggagaaggatggcctgctgaagaagctggaggaggagaaggccgaggccgctgaggccgctgaggagcggctggactgctgcaatgatggctgcagcgacagcatggtgggccacaatgaggaggccagcggccacaatggagagaccaagaccccccggcccagcagcgcccggggcagcagcggcagccggggcggcggcggcagcagcagcagcagcagcgagctgagcaccccagagaagccaccccaccagagagctggccccttcagcagccgctgggagaccaccatgggagaggccagcgccagcatccccaccaccgtgggcagcctgcccagcagcaagagcttcctgggcatgaaggcccgggagctgttcaggaacaagtctgagagccagtgtgatgaagatggcatgaccagcagcctgtctgagagcctgaagacagagctgggcaaggacctgggcgtggaggccaagatccccctgaacctggatggcccccaccccagcccccccaccccagattctgtgggccagctgcacatcatggactacaatgagacccaccacgagcacagctag

SEQ ID NO: 22319 - DNA, 1101 bp, synthetic construct
  misc_feature 1..1101: note = Description of Artificial Sequence: Synthetic coding sequence
  source 1..1101: mol_type = other DNA
atggcccagcaggccaacgtgggggagctgctggccatgctggacagccccatgctgggcgtgagagatgatgtgacagctgtgttcaaggagaacctgaacagcgaccggggccccatgctggtgaacaccctggtggactactacctggagaccagcagccagcctgccctgcacatcctgaccaccctgcaggagccccatgacaagcacctgctggaccgcatcaatgaatatgtgggcaaggccgccacccggctgagcatcctgagcctgctgggccacgtgatccggctgcagcccagctggaagcacaagctgagccaggcccccctgctgcccagcctgctgaagtgcctgaagatggacacagatgtggtggtgctgaccactggagtgctggtgctgatcaccatgctgcccatgatcccccagagcggcaagcagcacctgctggacttctttgacatcttcggccgcctgagctcctggtgcctgaagaagccaggccacgtggccgaggtgtacctggtgcacctgcacgcctctgtgtatgccctcttccaccggctgtatggcatgtacccctgcaactttgtgtccttcctgcggagccactacagcatgaaggagaacctggagacctttgaggaggtggtgaagcccatgatggagcacgtgcgcatccaccctgagctggtgacaggcagcaaggaccacgagctggacccccggcgctggaagaggctggagacccatgatgtggtgattgaatgtgccaagatcagcctggaccccacagaggccagctatgaagatggctacagcgtgagccaccagatcagcgcccgcttcccccacaggtctgcagatgtgaccaccagcccctatgctgacacccagaacagctatggctgtgccaccagcaccccctacagcaccagccggctgatgctgctgaacatgcctggccagctgccccagaccctgagcagccccagcaccaggctcatcacagagcccccccaggtgtggtgccagctggtgtgcctgctgagccccctgctgtctggagaggccgaccccctgggccagatctag

SEQ ID NO: 22320 - DNA, 954 bp, synthetic construct
  misc_feature 1..954: note = Description of Artificial Sequence: Synthetic coding sequence
  source 1..954: mol_type = other DNA
atggacacagatgtggtggtgctgaccaccggggtgctggtgctgatcaccatgctgcccatgatcccccagagcggcaagcagcacctgctggacttctttgacatcttcggccgcctgagctcctggtgcctgaagaagccaggccacgtggccgaggtgtacctggtgcacctgcacgcctctgtgtatgccctcttccaccggctgtatggcatgtacccctgcaactttgtgtccttcctgcggagccactacagcatgaaggagaacctggagacctttgaggaggtggtgaagcccatgatggagcacgtgcgcatccaccctgagctggtgacaggcagcaaggaccacgagctggacccccggcgctggaagaggctggagacccatgatgtggtgattgaatgtgccaagatcagcctggaccccacagaggccagctatgaagatggctacagcgtgagccaccagatcagcgcccgcttcccccacaggtctgcagatgtgaccaccagcccctatgctgacacccagaacagctatggctgtgccaccagcaccccctacagcaccagccggctgatgctgctgaacatgcctggccagctgccccagaccctgagcagccccagcaccaggctcatcacagagcccccccaggccaccctgtggagccccagcatggtgtgtggcatgaccaccccacccaccagccctggaaatgtgcccccagacctgagccacccctacagcaaggtgtttggcaccacagctgggggcaagggcacccccctgggcaccccagccaccagccccccaccagcccccagcgtcatccgcatgaccacctgcaccttccacagcccccggccccagagccaccccccaggcaggaagcgggagtggatcctgcaggaccacgtgtacacagacaacaccatcttctag

SEQ ID NO: 22321 - DNA, 3495 bp, synthetic construct; identical to SEQ ID NO: 22318
  misc_feature 1..3495: note = Description of Artificial Sequence: Synthetic coding sequence
  source 1..3495: mol_type = other DNA

SEQ ID NO: 22322 - DNA, 849 bp, synthetic construct
  misc_feature 1..849: note = Description of Artificial Sequence: Synthetic coding sequence
  source 1..849: mol_type = other DNA
atggacacagatgtggtggtgctgaccaccggggtgctggtgctgatcaccatgctgcccatgatcccccagagcggcaagcagcacctgctggacttctttgacatcttcggccgcctgagctcctggtgcctgaagaagccaggccacgtggccgaggtgtacctggtgcacctgcacgcctctgtgtatgccctcttccaccggctgtatggcatgtacccctgcaactttgtgtccttcctgcggagccactacagcatgaaggagaacctggagacctttgaggaggtggtgaagcccatgatggagcacgtgcgcatccaccctgagctggtgacaggcagcaaggaccacgagctggacccccggcgctggaagaggctggagacccatgatgtggtgattgaatgtgccaagatcagcctggaccccacagaggccagctatgaagatggctacagcgtgagccaccagatcagcgcccgcttcccccacaggtctgcagatgtgaccaccagcccctatgctgacacccagaacagctatggctgtgccaccagcaccccctacagcaccagccggctgatgctgctgaacatgcctggccacctggccaccaccgtgcggcccaggcctcctggccctgctgcccctggagctgtggtggaggccgaggtggtggaggccgctgctgctgctgctgccagcttcctgccccagaggaacccccacacccggggccaggcccacagcgctgtgggcggccgccgcctgtgggagaagaggctgcctgccagcccccccctgtgggcccacttccctgtgcagaaggcctcctgggtgtag

SEQ ID NO: 22323 - DNA, 3342 bp, synthetic construct
  misc_feature 1..3342: note = Description of Artificial Sequence: Synthetic coding sequence
  source 1..3342: mol_type = other DNA
atggcccagcaggccaacgtgggggagctgctggccatgctggacagccccatgctgggcgtgagagatgatgtgacagctgtgttcaaggagaacctgaacagcgaccggggccccatgctggtgaacaccctggtggactactacctggagaccagcagccagcctgccctgcacatcctgaccaccctgcaggagccccatgacaagatggacacagatgtggtggtgctgaccaccggggtgctggtgctgatcaccatgctgcccatgatcccccagagcggcaagcagcacctgctggacttctttgacatcttcggccgcctgagctcctggtgcctgaagaagccaggccacgtggccgaggtgtacctggtgcacctgcacgcctctgtgtatgccctcttccaccggctgtatggcatgtacccctgcaactttgtgtccttcctgcggagccactacagcatgaaggagaacctggagacctttgaggaggtggtgaagcccatgatggagcacgtgcgcatccaccctgagctggtgacaggcagcaaggaccacgagctggacccccggcgctggaagaggctggagacccatgatgtggtgattgaatgtgccaagatcagcctggaccccacagaggccagctatgaagatggctacagcgtgagccaccagatcagcgcccgcttcccccacaggtctgcagatgtgaccaccagcccctatgctgacacccagaacagctatggctgtgccaccagcaccccctacagcaccagccggctgatgctgctgaacatgcctggccagctgccccagaccctgagcagccccagcaccaggctcatcacagagcccccccaggccaccctgtggagccccagcatggtgtgtggcatgaccaccccacccaccagccctggaaatgtgcccccagacctgagccacccctacagcaaggtgtttggcaccacagctgggggcaagggcacccccctgggcaccccagccaccagccccccaccagcccccctgtgccacagtgatgattatgtgcacatcagcctgccccaggccaccgtgaccccacccaggaaggaggagaggatggacagcgcccggccctgcctgcaccggcagcaccacctgctgaatgaccggggcagcgaggagcccccaggcagcaagggctctgtgaccctgagtgacctgcccggcttcctgggggacctggcctctgaagaagattccattgagaaggacaaggaggaggccgccatcagccgggagctgtctgagatcaccacagctgaggccgagcctgtggtgccccggggcggctttgacagccccttctacagagacagcctgcccggcagccagaggaagacccacagcgctgccagcagcagccagggcgcctctgtgaaccctgagcccctgcacagcagcctggacaagctgggccctgacacccccaagcaggccttcacccccatcgacctgccctgtggcagcgcagatgagagccctgctggggaccgggagtgccagaccagcctggagaccagcatcttcacccccagcccctgcaagatccccccacccaccagggtgggctttggaagtggccagcccccaccctatgaccacctgtttgaggtggccctgcccaagacagcccaccacttcgtcatcaggaagacagaggagctgctgaagaaggccaagggcaacacagaggaggatggagtgcccagcaccagccccatggaggtgctggacaggctcatccagcagggcgcagatgcccacagcaaggagctgaacaagctgcccctgcccagcaagtctgtggactggacccactttggaggcagccccccatctgatgagatccgcaccctgcgggaccagctgctgctgctgcacaaccagctgctgtatgagcgcttcaagaggcagcagcacgccctgaggaacagaaggctgctgaggaaggtgatcaaggccgccgccctggaggagcacaatgctgccatgaaggaccagctgaagctgcaggagaaggacatccagatgtggaaggtgtccctgcagaaggagcaggcccgctacaaccagctgcaggagcagagggacaccatggtgaccaagctgcacagccagatccggcagctgcagcacgaccgggaggagttctacaaccagagccaggagctgcagaccaagctggaggactgcaggaacatgattgctgagctgagaattgagctgaagaaggccaacaacaaggtgtgccacacagagctgctgctgagccaggtgtcccagaagctgagcaacagcgagagcgtgcagcagcagatggagttcctgaaccggcagctgctggtgctgggggaggtgaatgagctgtacctggagcagctgcagaacaagcacagcgacaccaccaaggaggtggagatgatgaaggccgcctacaggaaggagctggagaagaacagaagccacgtgctgcagcagacccagaggctggacaccagccagaagaggatcctggagctggagagccacctggccaagaaggaccacctgctgctggagcagaagaagtacctggaggatgtgaagctgcaggcccggggccagctgcaggccgctgagagccgctatgaggcccagaagaggatcacccaggtgtttgagctggagatcctggacctgtatggccgcctggagaaggatggcctgctgaagaagctggaggaggagaaggccgaggccgctgaggccgctgaggagcggctggactgctgcaatgatggctgcagcgacagcatggtgggccacaatgaggaggccagcggccacaacggggagaccaagaccccccggcccagcagcgcccggggcagcagcggcagcagaggaggcggcggcagcagcagcagcagcagcgagctgagcaccccagagaagccaccccaccagagagctggccccttcagcagccgctgggagaccaccatgggagaggccagcgccagcatccccaccaccgtgggcagcctgcccagcagcaagagcttcctgggcatgaaggcccgggagctgttcaggaacaagtctgagagccagtgtgatgaagatggcatgaccagcagcctgtctgagagcctgaagacagagctgggcaaggacctgggcgtggaggccaagatccccctgaacctggatggcccccaccccagcccccccaccccagacagcgtgggccagctgcacatcatggactacaatgagacccaccacgagcacagctag

SEQ ID NO: 22324 - DNA, 2397 bp, synthetic construct
  misc_feature 1..2397: note = Description of Artificial Sequence: Synthetic coding sequence
  source 1..2397: mol_type = other DNA
atggccctgcacagcccccagtacatctttggagacttctccccagatgagttcaaccagttctttgtgacccccaggagctctgtggagctgcccccctacagcggcaccgtgctgtgtggcacccaggccgtggacaagctgcctgatggccaggagtaccagagaattgaatttggagtggatgaggtgattgagcccagcgacaccctgcccaggacccccagctacagcatcagcagcaccctgaacccccaggcccctgagttcatcctgggctgcacagccagcaagatcaccccagatggcatcaccaaggaggccagctatggcagcattgactgccagtacccaggcagcgccctggccctggatggcagcagcaatgtggaggccgaggtgctggagaatgatggagtgtctgggggcctgggccagcgggagaggaagaagaagaagaagaggcctcctggctactacagctacctgaaggatggaggagatgacagcatcagcacagaggccctggtgaatggccacgccaacagcgctgtgcccaacagcgtgtctgcagaagatgctgagttcatgggagacatgcctccttctgtgacccccaggacctgcaacagcccccagaacagcacagacagcgtgtctgacatcgtgcctgacagccccttccctggggccctgggcagtgacaccaggacagctggccagcctgagggcggccctggagctgactttggccagagctgcttccctgctgaggccggccgggacaccctgagcaggacagctggggcccagccctgtgtgggcacagacaccacagagaacctgggcgtggccaacggccagatcctggagagcagtggagagggcacagccaccaacggggtggagctgcacaccacagagagcattgacctggaccccaccaagccagagagcgccagccccccagcagatggcactggaagtgccagcggcaccctgcctgtgtcccagcccaagtcctgggccagcctcttccatgacagcaagcccagcagcagcagccctgtggcctacgtggagaccaagtacagccccccagccatcagccccctggtgtctgagaagcaggtggaggtgaaggagggcctggtgcctgtgtctgaagatcctgtggccatcaagattgctgagctgctggagaatgtgaccctcatccacaagcctgtgtccctgcagccccggggcctcatcaacaagggcaactggtgctacatcaatgccaccctgcaggccctggtggcctgcccccccatgtaccacctgatgaagttcatccccctgtacagcaaggtgcagaggccctgcaccagcacccccatgattgacagctttgtgcggctgatgaatgagttcaccaacatgcctgtgccccccaagccccggcaggccctgggggacaagatcgtgcgggacatccggcctggagctgcctttgagcccacctacatctaccgcctgctgactgtgaacaagagcagcctgtctgagaagggccggcaggaggatgctgaggagtacctgggcttcatcctgaatggcctgcacgaggagatgctgaacctgaagaagctgctgagccccagcaatgagaagctgaccatcagcaatggccccaagaaccacagcgtgaatgaggaggagcaggaggagcagggcgagggctctgaagatgagtgggagcaggtgggccccaggaacaagacctctgtgacccggcaggccgactttgtgcagacccccatcaccggcatctttggaggccacatccgctctgtggtgtaccagcagagcagcaaggagagcgccaccctgcagcccttcttcaccctgcagctggacatccagagcgacaagatcagaacagtgcaggatgccctggagagcctggtggcccgggagagcgtgcagggctacaccaccaagaccaagcaggaggtggagatcagcagaagagtgaccctggagaagctgccccctgtgctggtgctgcacctgaagagatttgtgtatgagaagacaggaggctgccagaagctgatcaagaacatcgagtaccctgtggacctggagatcagcaaggagctgctgagccctggggtgaagaacaagaacttcaagtgccacaggacctaccgcctgtttgctgtggtgtaccaccacggcaacagcgccaccggcggccactacaccacagatgtgttccagatcggcctgaatggctggctgagaattgatgaccagacagtgaaggtgatcaaccagtaccaggtggtgaagcccacagctgagaggacagcctacctgctgtactacagaagagtggacctgctgtag

SEQ ID NO: 22325 - DNA, 5355 bp, synthetic construct
  misc_feature 1..5355: note = Description of Artificial Sequence: Synthetic coding sequence
  source 1..5355: mol_type = other DNA
atggccaagcccaccagcaaggacagcggcctgaaggagaagttcaagatcctgctgggcctgggcaccccccggcccaaccccaggtctgctgagggcaagcagacagagttcatcatcacagctgagatcctgcgggagctgtccatggagtgtggcctgaacaaccgcatccgcatgattggccagatctgtgaggtggccaagaccaagaagtttgaggagcacgctgtggaggccctgtggaaggctgtggccgacctgctgcagcctgagcggcccctggaggcccggcatgctgtgctggccctgctgaaggccatcgtgcagggccagggcgagcggctgggcgtgctgcgggccctcttcttcaaggtgatcaaggactaccccagcaatgaagacctgcacgagcggctggaggtgttcaaggccctgacagacaatggccgccacatcacctacctggaggaggagctggccgactttgtgctgcagtggatggatgtgggcctgagcagcgagttcctgctggtgctggtgaacctggtgaagttcaacagctgctacctggatgagtacatcgccaggatggtgcagatgatctgcctgctgtgtgtgaggacagccagctctgtggacatcgaggtgtccctgcaggtgctggatgctgtggtgtgctacaactgcctgcctgctgagagcctgcccctcttcatcgtgaccctgtgcaggaccatcaacgtgaaggagctgtgtgagccctgctggaagctgatgaggaacctgctgggcacccacctgggccacagcgccatctacaacatgtgccacctgatggaggaccgggcctacatggaggatgcccccctgctgcggggagctgtgttctttgtgggcatggccctgtggggcgcccaccggctgtacagcctgaggaacagccccacctctgtgctgcccagcttctaccaggccatggcctgccccaatgaggtggtgtcctatgagatcgtgctgagcatcaccaggctcatcaagaagtacaggaaggagctgcaggtggtggcctgggacatcctgctgaacatcatcgagcggctgctgcagcagctgcagaccctggacagccctgagctgcggaccatcgtgcatgacctgctgaccaccgtggaggagctgtgtgaccagaatgagttccacggcagccaggagcgctactttgagctggtggagcgctgtgccgaccagaggcctgagagcagcctgctgaacctgatctcctaccgggcccagagcatccacccagccaaggatggctggatccagaacctgcaggccctgatggagcgcttcttccgctctgagagcagaggagctgtgcgcatcaaggtgctggatgtgctgagctttgtgctgctgatcaaccggcagttctatgaggaggagctgatcaacagcgtggtgatcagccagctgagccacatccctgaggacaaggaccaccaggtgaggaagctggccacccagctgctggtggacctggccgagggctgccacacccaccacttcaacagcctgctggacatcatcgagaaggtgatggcccggagcctgagccccccacctgagctggaggagagagatgtggccgcctacagcgccagcctggaggatgtgaagacagctgtgctgggcctgctggtgatcctgcagaccaagctgtacaccctgcctgccagccacgccaccagggtgtatgagatgctggtgagccacatccagctgcactacaagcacagctacaccctgcccatcgccagcagcatccggctgcaggcctttgacttcctgctgctgctgcgggctgacagcctgcaccggctgggcctgcccaacaaggatggagtggtgcgcttcagcccctactgtgtgtgtgactacatggagcctgagcggggcagcgagaagaagaccagcggccccctgagccccccaactggacctcctggccctgccccagctggccctgctgtgcggctgggctctgtgccctacagcctgctcttccgggtgctgctgcagtgcctgaagcaggagagtgactggaaggtgctgaagctggtgctgggccgcctgcctgagagcctgcgctacaaggtgctgatcttcaccagcccctgcagcgtggaccagctgtgcagcgccctgtgcagcatgctgagcggccccaagaccctggagcggctgcggggggcccctgagggcttcagcaggacagacctgcacctggccgtggtgcctgtgctgacagccctgatctcctaccacaactacctggacaagaccaagcagcgggagatggtgtactgcctggagcagggcctcatccaccgctgtgccagccagtgtgtggtggccctgagcatctgcagcgtggagatgccagacatcatcatcaaggccctgcctgtgctggtggtgaagctgacccacatcagcgccacagcctccatggctgtgcccctgctggagttcctgagcaccctggcccggctgccccacctgtacagaaactttgctgctgagcagtatgcctctgtgtttgccatcagcctgccctacaccaaccccagcaagttcaaccagtacatcgtgtgcctggcccaccacgtgattgccatgtggttcatccgctgccgcctgcccttcaggaaggactttgtgcccttcatcaccaagggcctgcggagcaatgtgctgctgagctttgatgacaccccagagaaggacagcttccgggcccggagcaccagcctgaatgaaagacccaagagcctgagaattgcccggccccccaagcagggcctgaacaacagcccccctgtgaaggagttcaaggagagcagcgctgctgaggccttccgctgccgcagcatctctgtgtctgaacatgtggtgcgcagccgcatccagaccagcctgaccagcgccagcctgggcagcgcagatgaaaattctgtggcccaggctgatgacagcctgaagaacctgcacctggagctgacagagacctgcctggacatgatggcccgctacgtgttcagcaacttcaccgctgtgcccaagaggagccctgtgggggagttcctgctggccggcggccgcaccaagacctggctggtgggcaacaagctggtgacagtgaccacctctgtgggcaccggcaccaggagcctgctgggcctggacagcggggagctgcagagcggccctgagagcagcagcagccctggggtgcacgtgcggcagaccaaggaggccccagccaagctggagagccaggccggccagcaggtgtccagaggagcccgggacagagtgcgctccatgtctgggggccacggcctgcgggtgggcgccctggatgtgcctgccagccagttcctgggcagcgccaccagccctggccccaggacagccccagctgccaagccagagaaggccagcgctggcaccagggtgcctgtgcaggagaagaccaacctggccgcctacgtgcccctgctgacccagggctgggccgagatcctggtgcggcggcccactggaaacacctcctggctgatgagcctggagaaccccctgagccccttcagcagtgacatcaacaacatgcccctgcaggagctgagcaatgccctgatggctgctgagcgcttcaaggagcaccgggacacagccctgtacaagagcctgtctgtgcctgctgccagcacagccaagcccccacccctgcccaggagcaacacagattctgctgtggtgatggaggagggcagccctggagaggtgcctgtgctggtggagcccccaggcctggaggatgtggaggccgccctgggcatggacagaagaacagatgcctacagccgcagcagctctgtgagcagccaggaggagaagagcctgcacgccgaggagctggtgggccggggcatccccatcgagcgggtggtgagcagcgagggcggccggcccagcgtggacctgtccttccagcccagccagcccctgagcaagagcagcagcagccctgagctgcagaccctgcaggacatcctgggggaccccggggacaaggcagatgtgggccgcctgagccctgaggtgaaggcccggagccagagcggcaccctggatggagagagcgctgcctggagcgccagcggggaggacagccggggccagcctgagggccccctgcccagcagcagccccaggagccccagcggcctgcggccccggggctacaccatcagtgacagcgcccccagcagaagaggcaagagggtggagagagatgccctgaagagccgggccacagccagcaatgctgagaaggtgcccggcatcaaccccagctttgtgttcctgcagctgtaccacagccccttctttggagatgagagcaacaagcccatcctgctgcccaatgaaagccagagctttgagaggtctgtgcagctgctggaccagatccccagctatgacacccacaagattgctgtgctgtatgtgggggagggccagagcaacagcgagctggccatcctgagcaatgaacatggcagctaccgctacacagagttcctgaccggcctgggccgcctgattgagctgaaggactgccagcctgacaaggtgtacctgggcggcctggatgtgtgtggagaagatggccagttcacctactgctggcatgatgacatcatgcaggccgtgttccacatcgccaccctgatgcccaccaaggatgtggacaagcaccgctgtgacaagaagaggcacctgggcaatgactttgtgtccatcgtgtacaatgacagcggggaggacttcaagctgggcaccatcaagggccagttcaactttgtgcacgtgattgtgacccccctggactatgagtgcaacctggtgtccctgcagtgcaggaaggacatggagggcctggtggacacctctgtggccaagatcgtgtctgacaggaacctgccctttgtggcccggcagatggccctgcacgccaacatggccagccaggtgcaccacagccgcagcaaccccacagacatctaccccagcaagtggatcgcccggctgcggcacatcaagaggctgcggcagaggatctgtgaggaggccgcctacagcaaccccagcctgcccctggtgcacccccccagccacagcaaggccccagcccagaccccagctgagcccaccccaggctatgaggtgggccagaggaagaggctcatcagctctgtggaggacttcacagaatttgtgtag

SEQ ID NO: 22326 - DNA, 5295 bp, synthetic construct
  misc_feature 1..5295: note = Description of Artificial Sequence: Synthetic coding sequence
  source 1..5295: mol_type = other DNA
atggccaagcccaccagcaaggacagcggcctgaaggagaagttcaagatcctgctgggcctgggcaccccccggcccaaccccaggtctgctgagggcaagcagacagagttcatcatcacagctgagatcctgcgggagctgtccatggagtgtggcctgaacaaccgcatccgcatgattggccagatctgtgaggtggccaagaccaagaagtttgaggagcacgctgtggaggccctgtggaaggctgtggccgacctgctgcagcctgagcggcccctggaggcccggcatgctgtgctggccctgctgaaggccatcgtgcagggccagggcgagcggctgggcgtgctgcgggccctcttcttcaaggtgatcaaggactaccccagcaatgaagacctgcacgagcggctggaggtgttcaaggccctgacagacaatggccgccacatcacctacctggaggaggagctggccgactttgtgctgcagtggatggatgtgggcctgagcagcgagttcctgctggtgctggtgaacctggtgaagttcaacagctgctacctggatgagtacatcgccaggatggtgcagatgatctgcctgctgtgtgtgaggacagccagctctgtggacatcgaggtgtccctgcaggtgctggatgctgtggtgtgctacaactgcctgcctgctgagagcctgcccctcttcatcgtgaccctgtgcaggaccatcaacgtgaaggagctgtgtgagccctgctggaagctgatgaggaacctgctgggcacccacctgggccacagcgccatctacaacatgtgccacctgatggaggaccgggcctacatggaggatgcccccctgctgcggggagctgtgttctttgtgggcatggccctgtggggcgcccaccggctgtacagcctgaggaacagccccacctctgtgctgcccagcttctaccaggccatggcctgccccaatgaggtggtgtcctatgagatcgtgctgagcatcaccaggctcatcaagaagtacaggaaggagctgcaggtggtggcctgggacatcctgctgaacatcatcgagcggctgctgcagcagctgcagaccctggacagccctgagctgcggaccatcgtgcatgacctgctgaccaccgtggaggagctgtgtgaccagaatgagttccacggcagccaggagcgctactttgagctggtggagcgctgtgccgaccagaggcctgagagcagcctgctgaacctgatctcctaccgggcccagagcatccacccagccaaggatggctggatccagaacctgcaggccctgatggagcgcttcttccgctctgagagcagaggagctgtgcgcatcaaggtgctggatgtgctgagctttgtgctgctgatcaaccggcagttctatgaggaggagctgatcaacagcgtggtgatcagccagctgagccacatccctgaggacaaggaccaccaggtgaggaagctggccacccagctgctggtggacctggccgagggctgccacacccaccacttcaacagcctgctggacatcatcgagaaggtgatggcccggagcctgagccccccacctgagctggaggagagagatgtggccgcctacagcgccagcctggaggatgtgaagacagctgtgctgggcctgctggtgatcctgcagaccaagctgtacaccctgcctgccagccacgccaccagggtgtatgagatgctggtgagccacatccagctgcactacaagcacagctacaccctgcccatcgccagcagcatccggctgcaggcctttgacttcctgctgctgctgcgggctgacagcctgcaccggctgggcctgcccaacaaggatggagtggtgcgcttcagcccctactgtgtgtgtgactacatggagcctgagcggggcagcgagaagaagaccagcggccccctgagccccccaactggacctcctggccctgccccagctggccctgctgtgcggctgggctctgtgccctacagcctgctcttccgggtgctgctgcagtgcctgaagcaggagagtgactggaaggtgctgaagctggtgctgggccgcctgcctgagagcctgcgctacaaggtgctgatcttcaccagcccctgcagcgtggaccagctgtgcagcgccctgtgcagcatgctgagcggccccaagaccctggagcggctgcggggggcccctgagggcttcagcaggacagacctgcacctggccgtggtgcctgtgctgacagccctgatctcctaccacaactacctggacaagaccaagcagcgggagatggtgtactgcctggagcagggcctcatccaccgctgtgccagccagtgtgtggtggccctgagcatctgcagcgtggagatgccagacatcatcatcaaggccctgcctgtgctggtggtgaagctgacccacatcagcgccacagcctccatggctgtgcccctgctggagttcctgagcaccctggcccggctgccccacctgtacagaaactttgctgctgagcagtatgcctctgtgtttgccatcagcctgccctacaccaaccccagcaagttcaaccagtacatcgtgtgcctggcccaccacgtgattgccatgtggttcatccgctgccgcctgcccttcaggaaggactttgtgcccttcatcaccaagggcctgcggagcaatgtgctgctgagctttgatgacaccccagagaaggacagcttccgggcccggagcaccagcctgaatgaaagacccaagagccgcatccagaccagcctgaccagcgccagcctgggcagcgcagatgagaacagcgtggcccaggctgatgacagcctgaagaacctgcacctggagctgacagagacctgcctggacatgatggcccgctacgtgttcagcaacttcaccgctgtgcccaagaggagccctgtgggggagttcctgctggccggcggccgcaccaagacctggctggtgggcaacaagctggtgacagtgaccacctctgtgggcaccggcaccaggagcctgctgggcctggacagcggggagctgcagagcggccctgagagcagcagcagccctggggtgcacgtgcggcagaccaaggaggccccagccaagctggagagccaggccggccagcaggtgtccagaggagcccgggacagagtgcgctccatgtctgggggccacggcctgcgggtgggcgccctggatgtgcctgccagccagttcctgggcagcgccaccagccctggccccaggacagccccagctgccaagccagagaaggccagcgctggcaccagggtgcctgtgcaggagaagaccaacctggccgcctacgtgcccctgctgacccagggctgggccgagatcctggtgagaagacccaccggcaacacctcctggctgatgagcctggagaaccccctgagccccttcagcagtgacatcaacaacatgcccctgcaggagctgagcaatgccctgatggctgctgagcgcttcaaggagcaccgggacacagccctgtacaagagcctgtctgtgcctgctgccagcacagccaagcccccacccctgcccaggagcaacacagtggccagcttcagcagcctgtaccagagcagctgccagggccagctgcacaggtctgtgtcctgggccgacagcgctgtggtgatggaggagggcagccctggagaggtgcctgtgctggtggagcccccaggcctggaggatgtggaggccgccctgggcatggacagaagaacagatgcctacagccgcagcagctctgtgagcagccaggaggagaagagcctgcacgccgaggagctggtgggccggggcatccccatcgagcgggtggtgagcagcgagggcggccggcccagcgtggacctgtccttccagcccagccagcccctgagcaagagcagcagcagccctgagctgcagaccctgcaggacatcctgggggaccccggggacaaggcagatgtgggccgcctgagccctgaggtgaaggcccggagccagagcggcaccctggatggagagagcgctgcctggagcgccagcggggaggacagccggggccagcctgagggccccctgcccagcagcagccccaggagccccagcggcctgcggccccggggctacaccatcagtgacagcgcccccagcagaagaggcaagagggtggagagagatgccctgaagagccgggccacagccagcaatgctgagaaggtgcccggcatcaaccccagctttgtgttcctgcagctgtaccacagccccttctttggagatgagagcaacaagcccatcctgctgcccaatgaaagccagagctttgagaggtctgtgcagctgctggaccagatccccagctatgacacccacaagattgctgtgctgtatgtgggggagggccagagcaacagcgagctggccatcctgagcaatgaacatggcagctaccgctacacagagttcctgaccggcctgggccgcctgattgagctgaaggactgccagcctgacaaggtgtacctgggcggcctggatgtgtgtggagaagatggccagttcacctactgctggcatgatgacatcatgcaggccgtgttccacatcgccaccctgatgcccaccaaggatgtggacaagcaccgctgtgacaagaagaggcacctgggcaatgactttgtgtccatcgtgtacaatgacagcggggaggacttcaagctgggcaccatcaagggccagttcaactttgtgcacgtgattgtgacccccctggactatgagtgcaacctggtgtccctgcagtgcaggaaggacatggagggcctggtggacacctctgtggccaagatcgtgtctgacaggaacctgccctttgtggcccggcagatggccctgcacgccaacatggccagccaggtgcaccacagccgcagcaaccccacagacatctaccccagcaagtggatcgcccggctgcggcacatcaagaggctgcggcagaggatctgtgaggaggccgcctacagcaaccccagcctgcccctggtgcacccccccagccacagcaaggccccagcccagaccccagctgagcccaccccaggctatgaggtgggccagaggaagaggctcatcagctctgtggaggacttcacagaatttgtgtag

SEQ ID NO: 22327 - DNA, 5079 bp, synthetic construct
  misc_feature 1..5079: note = Description of Artificial Sequence: Synthetic coding sequence
  source 1..5079: mol_type = other DNA
atggagtgtggcctgaacaaccgcatccgcatgattggccagatctgtgaggtggccaagaccaagaagtttgaggagcacgctgtggaggccctgtggaaggctgtggccgacctgctgcagcctgagcggcccctggaggcccggcatgctgtgctggccctgctgaaggccatcgtgcagggccagggcgagcggctgggcgtgctgcgggccctcttcttcaaggtgatcaaggactaccccagcaatgaagacctgcacgagcggctggaggtgttcaaggccctgacagacaatggccgccacatcacctacctggaggaggagctggccgactttgtgctgcagtggatggatgtgggcctgagcagcgagttcctgctggtgctggtgaacctggtgaagttcaacagctgctacctggatgagtacatcgccaggatggtgcagatgatctgcctgctgtgtgtgaggacagccagctctgtggacatcgaggtgtccctgcaggtgctggatgctgtggtgtgctacaactgcctgcctgctgagagcctgcccctcttcatcgtgaccctgtgcaggaccatcaacgtgaaggagctgtgtgagccctgctggaagctgatgaggaacctgctgggcacccacctgggccacagcgccatctacaacatgtgccacctgatggaggaccgggcctacatggaggatgcccccctgctgcggggagctgtgttctttgtgggcatggccctgtggggcgcccaccggctgtacagcctgaggaacagccccacctctgtgctgcccagcttctaccaggccatggcctgccccaatgaggtggtgtcctatgaaattgtgctgagcatcaccaggctcatcaagaagtacaggaaggagctgcaggtggtggcctgggacatcctgctgaacatcatcgagcggctgctgcagcagctgcagaccctggacagccctgagctgcggaccatcgtgcatgacctgctgaccaccgtggaggagctgtgtgaccagaatgagttccacggcagccaggagcgctactttgagctggtggagcgctgtgccgaccagaggcctgagagcagcctgctgaacctgatctcctaccgggcccagagcatccacccagccaaggatggctggatccagaacctgcaggccctgatggagcgcttcttccgctctgagagcagaggagctgtgcgcatcaaggtgctggatgtgctgagctttgtgctgctgatcaaccggcagttctatgaggaggagctgatcaacagcgtggtgatcagccagctgagccacatccctgaggacaaggaccaccaggtgaggaagctggccacccagctgctggtggacctggccgagggctgccacacccaccacttcaacagcctgctggacatcatcgagaaggtgatggcccggagcctgagccccccacctgagctggaggagagagatgtggccgcctacagcgccagcctggaggatgtgaagacagctgtgctgggcctgctggtgatcctgcagaccaagctgtacaccctgcctgccagccacgccaccagggtgtatgagatgctggtgagccacatccagctgcactacaagcacagctacaccctgcccatcgccagcagcatccggctgcaggcctttgacttcctgctgctgctgcgggctgacagcctgcaccggctgggcctgcccaacaaggatggagtggtgcgcttcagcccctactgtgtgtgtgactacatggagcctgagcggggcagcgagaagaagaccagcggccccctgagcccccccaccggccccccaggccctgccccagctggccctgctgtgcggctgggctctgtgccctacagcctgctcttccgggtgctgctgcagtgcctgaagcaggagagtgactggaaggtgctgaagctggtgctgggccgcctgcctgagagcctgcgctacaaggtgctgatcttcaccagcccctgcagcgtggaccagctgtgcagcgccctgtgcagcatgctgagcggccccaagaccctggagcggctgcggggggcccctgagggcttcagcaggacagacctgcacctggccgtggtgcctgtgctgacagccctgatctcctaccacaactacctggacaagaccaagcagcgggagatggtgtactgcctggagcagggcctcatccaccgctgtgccagccagtgtgtggtggccctgagcatctgcagcgtggagatgccagacatcatcatcaaggccctgcctgtgctggtggtgaagctgacccacatcagcgccacagcctccatggctgtgcccctgctggagttcctgagcaccctggcccggctgccccacctgtacagaaactttgctgctgagcagtatgcctctgtgtttgccatcagcctgccctacaccaaccccagcaagttcaaccagtacatcgtgtgcctggcccaccacgtgattgccatgtggttcatccgctgccgcctgcccttcaggaaggactttgtgcccttcatcaccaagggcctgcggagcaatgtgctgctgagctttgatgacaccccagagaaggacagcttccgggcccggagcaccagcctgaatgaaagacccaagagccgcatccagaccagcctgaccagcgccagcctgggcagcgcagatgaaaattctgtggcccaggctgatgacagcctgaagaacctgcacctggagctgacagagacctgcctggacatgatggcccgctacgtgttcagcaacttcaccgctgtgcccaagaggagccctgtgggggagttcctgctggccggcggccgcaccaagacctggctggtgggcaacaagctggtgacagtgaccacctctgtgggcaccggcaccaggagcctgctgggcctggacagcggggagctgcagagcggccctgagagcagcagcagccctggggtgcacgtgcggcagaccaaggaggccccagccaagctggagagccaggccggccagcaggtgtccagaggagcccgggacagagtgcgctccatgtctgggggccacggcctgcgggtgggcgccctggatgtgcctgccagccagttcctgggcagcgccaccagccctggccccaggacagccccagctgccaagccagagaaggccagcgctggcaccagggtgcctgtgcaggagaagaccaacctggccgcctacgtgcccctgctgacccagggctgggccgagatcctggtgcggcggcccactggaaacacctcctggctgatgagcctggagaaccccctgagccccttcagcagtgacatcaacaacatgcccctgcaggagctgagcaatgccctgatggctgctgagcgcttcaaggagcaccgggacacagccctgtacaagagcctgtctgtgcctgctgccagcacagccaagcccccacccctgcccaggagcaacacagattctgctgtggtgatggaggagggcagccctggagaggtgcctgtgctggtggagcccccaggcctggaggatgtggaggccgccctgggcatggacagaagaacagatgcctacagccgcagcagctctgtgagcagccaggaggagaagagcctgcacgccgaggagctggtgggccggggcatccccatcgagcgggtggtgagcagcgagggcggccggcccagcgtggacctgtccttccagcccagccagcccctgagcaagagcagcagcagccctgagctgcagaccctgcaggacatcctgggggaccccggggacaaggcagatgtgggccgcctgagccctgaggtgaaggcccggagccagagcggcaccctggatggagagagcgctgcctggagcgccagcggggaggacagccggggccagcctgagggccccctgcccagcagcagccccaggagccccagcggcctgcggccccggggctacaccatcagtgacagcgcccccagcagaagaggcaagagggtggagagagatgccctgaagagccgggccacagccagcaatgctgagaaggtgcccggcatcaaccccagctttgtgttcctgcagctgtaccacagccccttctttggagatgagagcaacaagcccatcctgctgcccaatgaaagccagagctttgagaggtctgtgcagctgctggaccagatccccagctatgacacccacaagattgctgtgctgtatgtgggggagggccagagcaacagcgagctggccatcctgagcaatgaacatggcagctaccgctacacagagttcctgaccggcctgggccgcctgattgagctgaaggactgccagcctgacaaggtgtacctgggcggcctggatgtgtgtggagaagatggccagttcacctactgctggcatgatgacatcatgcaggccgtgttccacatcgccaccctgatgcccaccaaggatgtggacaagcaccgctgtgacaagaagaggcacctgggcaatgactttgtgtccatcgtgtacaatgacagcggggaggacttcaagctgggcaccatcaagggccagttcaactttgtgcacgtgattgtgacccccctggactatgagtgcaacctggtgtccctgcagtgcaggaaggacatggagggcctggtggacacctctgtggccaagatcgtgtctgacaggaacctgccctttgtggcccggcagatggccctgcacgccaacatggccagccaggtgcaccacagccgcagcaaccccacagacatctaccccagcaagtggatcgcccggctgcggcacatcaagaggctgcggcagaggatctgtgaggaggccgcctacagcaaccccagcctgcccctggtgcacccccccagccacagcaaggccccagcccagaccccagctgagcccaccccaggctatgaggtgggccagaggaagaggctcatcagctctgtggaggacttcacagaatttgtgtag

SEQ ID NO: 22328 - DNA, 5226 bp, synthetic construct
  misc_feature 1..5226: note = Description of Artificial Sequence: Synthetic coding sequence
  source 1..5226: mol_type = other DNA
atggccaagcccaccagcaaggacagcggcctgaaggagaagttcaagatcctgctgggcctgggcaccccccggcccaaccccaggtctgctgagggcaagcagacagagttcatcatcacagctgagatcctgcgggagctgtccatggagtgtggcctgaacaaccgcatccgcatgattggccagatctgtgaggtggccaagaccaagaagtttgaggagcacgctgtggaggccctgtggaaggctgtggccgacctgctgcagcctgagcggcccctggaggcccggcatgctgtgctggccctgctgaaggccatcgtgcagggccagggcgagcggctgggcgtgctgcgggccctcttcttcaaggtgatcaaggactaccccagcaatgaagacctgcacgagcggctggaggtgttcaaggccctgacagacaatggccgccacatcacctacctggaggaggagctggccgactttgtgctgcagtggatggatgtgggcctgagcagcgagttcctgctggtgctggtgaacctggtgaagttcaacagctgctacctggatgagtacatcgccaggatggtgcagatgatctgcctgctgtgtgtgaggacagccagctctgtggacatcgaggtgtccctgcaggtgctggatgctgtggtgtgctacaactgcctgcctgctgagagcctgcccctcttcatcgtgaccctgtgcaggaccatcaacgtgaaggagctgtgtgagccctgctggaagctgatgaggaacctgctgggcacccacctgggccacagcgccatctacaacatgtgccacctgatggaggaccgggcctacatggaggatgcccccctgctgcggggagctgtgttctttgtgggcatggccctgtggggcgcccaccggctgtacagcctgaggaacagccccacctctgtgctgcccagcttctaccaggccatggcctgccccaatgaggtggtgtcctatgagatcgtgctgagcatcaccaggctcatcaagaagtacaggaaggagctgcaggtggtggcctgggacatcctgctgaacatcatcgagcggctgctgcagcagctgcagaccctggacagccctgagctgcggaccatcgtgcatgacctgctgaccaccgtggaggagctgtgtgaccagaatgagttccacggcagccaggagcgctactttgagctggtggagcgctgtgccgaccagaggcctgagagcagcctgctgaacctgatctcctaccgggcccagagcatccacccagccaaggatggctggatccagaacctgcaggccctgatggagcgcttcttccgctctgagagcagaggagctgtgcgcatcaaggtgctggatgtgctgagctttgtgctgctgatcaaccggcagttctatgaggaggagctgatcaacagcgtggtgatcagccagctgagccacatccctgaggacaaggaccaccaggtgaggaagctggccacccagctgctggtggacctggccgagggctgccacacccaccacttcaacagcctgctggacatcatcgagaaggtgatggcccggagcctgagccccccacctgagctggaggagagagatgtggccgcctacagcgccagcctggaggatgtgaagacagctgtgctgggcctgctggtgatcctgcagaccaagctgtacaccctgcctgccagccacgccaccagggtgtatgagatgctggtgagccacatccagctgcactacaagcacagctacaccctgcccatcgccagcagcatccggctgcaggcctttgacttcctgctgctgctgcgggctgacagcctgcaccggctgggcctgcccaacaaggatggagtggtgcgcttcagcccctactgtgtgtgtgactacatggagcctgagcggggcagcgagaagaagaccagcggccccctgagccccccaactggacctcctggccctgccccagctggccctgctgtgcggctgggctctgtgccctacagcctgctcttccgggtgctgctgcagtgcctgaagcaggagagtgactggaaggtgctgaagctggtgctgggccgcctgcctgagagcctgcgctacaaggtgctgatcttcaccagcccctgcagcgtggaccagctgtgcagcgccctgtgcagcatgctgagcggccccaagaccctggagcggctgcggggggcccctgagggcttcagcaggacagacctgcacctggccgtggtgcctgtgctgacagccctgatctcctaccacaactacctggacaagaccaagcagcgggagatggtgtactgcctggagcagggcctcatccaccgctgtgccagccagtgtgtggtggccctgagcatctgcagcgtggagatgccagacatcatcatcaaggccctgcctgtgctggtggtgaagctgacccacatcagcgccacagcctccatggctgtgcccctgctggagttcctgagcaccctggcccggctgccccacctgtacagaaactttgctgctgagcagtatgcctctgtgtttgccatcagcctgccctacaccaaccccagcaagttcaaccagtacatcgtgtgcctggcccaccacgtgattgccatgtggttcatccgctgccgcctgcccttcaggaaggactttgtgcccttcatcaccaagggcctgcggagcaatgtgctgctgagctttgatgacaccccagagaaggacagcttccgggcccggagcaccagcctgaatgaaagacccaagagccgcatccagaccagcctgaccagcgccagcctgggcagcgcagatgagaacagcgtggcccaggctgatgacagcctgaagaacctgcacctggagctgacagagacctgcctggacatgatggcccgctacgtgttcagcaacttcaccgctgtgcccaagaggagccctgtgggggagttcctgctggccggcggccgcaccaagacctggctggtgggcaacaagctggtgacagtgaccacctctgtgggcaccggcaccaggagcctgctgggcctggacagcggggagctgcagagcggccctgagagcagcagcagccctggggtgcacgtgcggcagaccaaggaggccccagccaagctggagagccaggccggccagcaggtgtccagaggagcccgggacagagtgcgctccatgtctgggggccacggcctgcgggtgggcgccctggatgtgcctgccagccagttcctgggcagcgccaccagccctggccccaggacagccccagctgccaagccagagaaggccagcgctggcaccagggtgcctgtgcaggagaagaccaacctggccgcctacgtgcccctgctgacccagggctgggccgagatcctggtgagaagacccaccggcaacacctcctggctgatgagcctggagaaccccctgagccccttcagcagtgacatcaacaacatgcccctgcaggagctgagcaatgccctgatggctgctgagcgcttcaaggagcaccgggacacagccctgtacaagagcctgtctgtgcctgctgccagcacagccaagcccccacccctgcccaggagcaacacagacagcgctgtggtgatggaggagggcagccctggagaggtgcctgtgctggtggagcccccaggcctggaggatgtggaggccgccctgggcatggacagaagaacagatgcctacagccgcagcagctctgtgagcagccaggaggagaagagcctgcatgctgaggagctggtgggccggggcatccccatcgagcgggtggtgtcctctgagggcggccggcccagcgtggacctgtccttccagcccagccagcccctgagcaagagcagcagcagccctgagctgcagaccctgcaggacatcctgggggaccccggggacaaggcagatgtgggccgcctgagccctgaggtgaaggcccggagccagagcggcaccctggatggagagagcgctgcctggagcgccagcggggaggacagccggggccagcctgagggccccctgcccagcagcagccccaggagccccagcggcctgcggccccggggctacaccatcagtgacagcgcccccagccggcggggcaagagggtggagagagatgccctgaagagccgggccacagccagcaatgctgagaaggtgcccggcatcaaccccagctttgtgttcctgcagctgtaccacagccccttctttggagatgagagcaacaagcccatcctgctgcccaatgaaagccagagctttgagaggtctgtgcagctgctggaccagatccccagctatgacacccacaagattgctgtgctgtatgtgggggagggccagagcaacagcgagctggccatcctgagcaatgagcacggcagctaccgctacacagagttcctgaccggcctgggccgcctcatcgagctgaaggactgccagcctgacaaggtgtacctgggcggcctggatgtgtgtggggaggatggccagttcacctactgctggcatgatgacatcatgcaggccgtgttccacatcgccaccctgatgcccaccaaggatgtggacaagcaccgctgtgacaagaagaggcacctgggcaatgactttgtgtccatcgtgtacaatgattctggagaggacttcaagctgggcaccatcaagggccagttcaactttgtgcacgtgattgtgacccccctggactatgagtgcaacctggtgtccctgcagtgcaggaaggacatggagggcctggtggacacctctgtggccaagatcgtgtctgacaggaacctgccctttgtggcccggcagatggccctgcacgccaacatggccagccaggtgcaccacagccgcagcaaccccacagacatctaccccagcaagtggatcgcccggctgcggcacatcaagaggctgcggcagaggatctgtgaggaggccgcctacagcaaccccagcctgcccctggtgcacccccccagccacagcaaggccccagcccagaccccagctgagcccaccccaggctatgaggtgggccagaggaagaggctcatcagctctgtggaggacttcacagaatttgtgtag

SEQ ID NO: 22329 - DNA, 5115 bp, synthetic construct
  misc_feature 1..5115: note = Description of Artificial Sequence: Synthetic coding sequence
  source 1..5115: mol_type = other DNA
atggccaagcccaccagcaaggacagcggcctgaaggagaagttcaagatcctgctgggcctgggcaccccccggcccaaccccaggtctgctgagggcaagcagacagagttcatcatcacagctgagatcctgcgggagctgtccatggagtgtggcctgaacaaccgcatccgcatgattggccagatctgtgaggtggccaagaccaagaagtttgaggagggggagcggctgggcgtgctgcgggccctcttcttcaaggtgatcaaggactaccccagcaatgaagacctgcacgagcggctggaggtgttcaaggccctgacagacaatggccgccacatcacctacctggaggaggagctggccgactttgtgctgcagtggatggatgtgggcctgagcagcgagttcctgctggtgctggtgaacctggtgaagttcaacagctgctacctggatgagtacatcgccaggatggtgcagatgatctgcctgctgtgtgtgaggacagccagctctgtggacatcgaggtgtccctgcaggtgctggatgctgtggtgtgctacaactgcctgcctgctgagagcctgcccctcttcatcgtgaccctgtgcaggaccatcaacgtgaaggagctgtgtgagccctgctggaagctgatgaggaacctgctgggcacccacctgggccacagcgccatctacaacatgtgccacctgatggaggaccgggcctacatggaggatgcccccctgctgcggggagctgtgttctttgtgggcatggccctgtggggcgcccaccggctgtacagcctgaggaacagccccacctctgtgctgcccagcttctaccaggccatggcctgccccaatgaggtggtgtcctatgaaattgtgctgagcatcaccaggctcatcaagaagtacaggaaggagctgcaggtggtggcctgggacatcctgctgaacatcatcgagcggctgctgcagcagctgcagaccctggacagccctgagctgcggaccatcgtgcatgacctgctgaccaccgtggaggagctgtgtgaccagaatgagttccacggcagccaggagcgctactttgagctggtggagcgctgtgccgaccagaggcctgagagcagcctgctgaacctgatctcctaccgggcccagagcatccacccagccaaggatggctggatccagaacctgcaggccctgatggagcgcttcttccgctctgagagcagaggagctgtgcgcatcaaggtgctggatgtgctgagctttgtgctgctgatcaaccggcagttctatgaggaggagctgatcaacagcgtggtgatcagccagctgagccacatccctgaggacaaggaccaccaggtgaggaagctggccacccagctgctggtggacctggccgagggctgccacacccaccacttcaacagcctgctggacatcatcgagaaggtgatggcccggagcctgagccccccacctgagctggaggagagagatgtggccgcctacagcgccagcctggaggatgtgaagacagctgtgctgggcctgctggtgatcctgcagaccaagctgtacaccctgcctgccagccacgccaccagggtgtatgagatgctggtgagccacatccagctgcactacaagcacagctacaccctgcccatcgccagcagcatccggctgcaggcctttgacttcctgctgctgctgcgggctgacagcctgcaccggctgggcctgcccaacaaggatggagtggtgcgcttcagcccctactgtgtgtgtgactacatggagcctgagcggggcagcgagaagaagaccagcggccccctgagcccccccaccggccccccaggccctgccccagctggccctgctgtgcggctgggctctgtgccctacagcctgctcttccgggtgctgctgcagtgcctgaagcaggagagtgactggaaggtgctgaagctggtgctgggccgcctgcctgagagcctgcgctacaaggtgctgatcttcaccagcccctgcagcgtggaccagctgtgcagcgccctgtgcagcatgctgagcggccccaagaccctggagcggctgcggggggcccctgagggcttcagcaggacagacctgcacctggccgtggtgcctgtgctgacagccctgatctcctaccacaactacctggacaagaccaagcagcgggagatggtgtactgcctggagcagggcctcatccaccgctgtgccagccagtgtgtggtggccctgagcatctgcagcgtggagatgccagacatcatcatcaaggccctgcctgtgctggtggtgaagctgacccacatcagcgccacagcctccatggctgtgcccctgctggagttcctgagcaccctggcccggctgccccacctgtacagaaactttgctgctgagcagtatgcctctgtgtttgccatcagcctgccctacaccaaccccagcaagttcaaccagtacatcgtgtgcctggcccaccacgtgattgccatgtggttcatccgctgccgcctgcccttcaggaaggactttgtgcccttcatcaccaagggcctgcggagcaatgtgctgctgagctttgatgacaccccagagaaggacagcttccgggcccggagcaccagcctgaatgaaagacccaagagccgcatccagaccagcctgaccagcgccagcctgggcagcgcagatgaaaattctgtggcccaggctgatgacagcctgaagaacctgcacctggagctgacagagacctgcctggacatgatggcccgctacgtgttcagcaacttcaccgctgtgcccaagaggagccctgtgggggagttcctgctggccggcggccgcaccaagacctggctggtgggcaacaagctggtgacagtgaccacctctgtgggcaccggcaccaggagcctgctgggcctggacagcggggagctgcagagcggccctgagagcagcagcagccctggggtgcacgtgcggcagaccaaggaggccccagccaagctggagagccaggccggccagcaggtgtccagaggagcccgggacagagtgcgctccatgtctgggggccacggcctgcgggtgggcgccctggatgtgcctgccagccagttcctgggcagcgccaccagccctggccccaggacagccccagctgccaagccagagaaggccagcgctggcaccagggtgcctgtgcaggagaagaccaacctggccgcctacgtgcccctgctgacccagggctgggccgagatcctggtgcggcggcccactggaaacacctcctggctgatgagcctggagaaccccctgagccccttcagcagtgacatcaacaacatgcccctgcaggagctgagcaatgccctgatggctgctgagcgcttcaaggagcaccgggacacagccctgtacaagagcctgtctgtgcctgctgccagcacagccaagcccccacccctgcccaggagcaacacagattctgctgtggtgatggaggagggcagccctggagaggtgcctgtgctggtggagcccccaggcctggaggatgtggaggccgccctgggcatggacagaagaacagatgcctacagccgcagcagctctgtgagcagccaggaggagaagagcctgcacgccgaggagctggtgggccggggcatccccatcgagcgggtggtgagcagcgagggcggccggcccagcgtggacctgtccttccagcccagccagcccctgagcaagagcagcagcagccctgagctgcagaccctgcaggacatcctgggggaccccggggacaaggcagatgtgggccgcctgagccctgaggtgaaggcccggagccagagcggcaccctggatggagagagcgctgcctggagcgccagcggggaggacagccggggccagcctgagggccccctgcccagcagcagccccaggagccccagcggcctgcggccccggggctacaccatcagtgacagcgcccccagcagaagaggcaagagggtggagagagatgccctgaagagccgggccacagccagcaatgctgagaaggtgcccggcatcaaccccagctttgtgttcctgcagctgtaccacagccccttctttggagatgagagcaacaagcccatcctgctgcccaatgaaagccagagctttgagaggtctgtgcagctgctggaccagatccccagctatgacacccacaagattgctgtgctgtatgtgggggagggccagagcaacagcgagctggccatcctgagcaatgaacatggcagctaccgctacacagagttcctgaccggcctgggccgcctgattgagctgaaggactgccagcctgacaaggtgtacctgggcggcctggatgtgtgtggagaagatggccagttcacctactgctggcatgatgacatcatgcaggccgtgttccacatcgccaccctgatgcccaccaaggatgtggacaagcaccgctgtgacaagaagaggcacctgggcaatgactttgtgtccatcgtgtacaatgacagcggggaggacttcaagctgggcaccatcaagggccagttcaactttgtgcacgtgattgtgacccccctggactatgagtgcaacctggtgtccctgcagtgcaggaaggacatggagggcctggtggacacctctgtggccaagatcgtgtctgacaggaacctgccctttgtggcccggcagatggccctgcacgccaacatggccagccaggtgcaccacagccgcagcaaccccacagacatctaccccagcaagtggatcgcccggctgcggcacatcaagaggctgcggcagaggatctgtgaggaggccgcctacagcaaccccagcctgcccctggtgcacccccccagccacagcaaggccccagcccagaccccagctgagcccaccccaggctatgaggtgggccagaggaagaggctcatcagctctgtggaggacttcacagaatttgtgtag

SEQ ID NO: 22330 - DNA, 516 bp, synthetic construct
  misc_feature 1..516: note = Description of Artificial Sequence: Synthetic coding sequence
  source 1..516: mol_type = other DNA
ttcccccgggacctgagcctcatcagccccctggcccaggccgtgcgcagcagcagcaggacccccagcgacaagcctgtggcccacgtggtggccaacccccaggccgagggccagctgcagtggctgaacagaagagccaatgccctgctggccaatggagtggagctgcgggacaaccagctggtggtgcccagcgagggcctgtacctgatctacagccaggtgctcttcaagggccagggctgccccagcacccacgtgctgctgacccacaccatcagcagaattgctgtgtcctaccagaccaaggtgaacctgctgagcgccatcaagagcccctgccagcgggagaccccagagggcgctgaggccaagccctggtatgagcccatctacctgggcggcgtcttccagctggagaagggggaccggctgtctgctgagatcaacagaccagactacctggactttgctgagagcggccaggtgtacttcggcatcatcgccctgtag

SEQ ID NO: 22331 - DNA, 306 bp, synthetic construct
  misc_feature 1..306: note = Description of Artificial Sequence: Synthetic coding sequence
  source 1..306: mol_type = other DNA
atggccatgatggaggtgcagggcggccccagcctgggccagacctgtgtgctgattgtcatcttcaccgtgctgctgcagagcctgtgtgtggccgtgacctacgtgtacttcaccaatgagctgaagcagatgcaggacaagtacagcaagagcggcatcgcctgcttcctgaaggaggatgacagctactgggaccccaatgatgaggagagcatgaacagcccctgctggcaggtgaagtggcagctgcggcagctggtgaggaagacccccaggatgaagaggctgtgggccgccaagtag

SEQ ID NO: 22332 - DNA, 846 bp, synthetic construct
  misc_feature 1..846: note = Description of Artificial Sequence: Synthetic coding sequence
  source 1..846: mol_type = other DNA
atggccatgatggaggtgcagggcggccccagcctgggccagacctgtgtgctgattgtcatcttcaccgtgctgctgcagagcctgtgtgtggccgtgacctacgtgtacttcaccaatgagctgaagcagatgcaggacaagtacagcaagagcggcatcgcctgcttcctgaaggaggatgacagctactgggaccccaatgatgaggagagcatgaacagcccctgctggcaggtgaagtggcagctgcggcagctggtgaggaagatgatcctgcggaccagcgaggagaccatcagcacagtgcaggagaagcagcagaacatcagccccctggtgcgggagcggggcccccagagggtggccgcccacatcaccggcacccggggccgcagcaacaccctgagcagccccaacagcaagaatgagaaggccctgggcaggaagatcaacagctgggagagcagccgcagcggccacagcttcctgagcaacctgcacctgagaaatggagagctggtgattcatgagaagggcttctactacatctacagccagacctacttccgcttccaggaggagatcaaggagaacaccaagaatgacaagcagatggtgcagtacatctacaagtacaccagctacccagaccccatcctgctgatgaagagcgccaggaacagctgctggagcaaggatgctgaatatggcctgtacagcatctaccagggcggcatctttgagctgaaggaaaatgaccgcatctttgtgtctgtgaccaatgagcacctgattgacatggaccacgaggccagcttctttggagccttcctggtgggctag

SEQ ID NO: 22333 - DNA, 858 bp, synthetic construct
  misc_feature 1..858: note = Description of Artificial Sequence: Synthetic coding sequence
  source 1..858: mol_type = other DNA
atggatgacagcacagagcgggagcagagccggctgaccagctgcctgaagaagcgggaggagatgaagctgaaggaatgtgtgtccatcctgcccaggaaggagagccccagcgtgcgcagcagcaaggatggcaagctgctggccgccaccctgctgctggccctgctgagctgctgcctgactgtggtgtccttctaccaggtggccgccctgcagggcgacctggccagcctgcgggcagagctgcagggccaccacgccgagaagctgcctgctggagctggggcccccaaggccggcctggaggaggccccagctgtgacagctggcctgaagatctttgagcccccagcccctggagagggcaacagcagccagaacagcaggaacaagagagctgtgcagggccctgaggagaccgtgacccaggactgcctgcagctgattgctgacagcgagacccccaccatccagaagggcagctacacctttgtgccctggctgctgtccttcaagaggggcagcgccctggaggagaaggagaacaagatcctggtgaaggagaccggctacttcttcatctacggccaggtgctgtacacagacaagacctacgccatgggccacctgatccagaggaagaaggtgcacgtgtttggagatgagctgagcctggtgaccctcttccgctgcatccagaacatgcctgagaccctgcccaacaacagctgctacagcgctggcatcgccaagctggaggagggagatgagctgcagctggccatcccccgggagaatgcccagatcagcctggatggagatgtgaccttctttggagccctgaagctgctgtag

SEQ ID NO: 22334 - DNA, 801 bp, synthetic construct
  misc_feature 1..801: note = Description of Artificial Sequence: Synthetic coding sequence
  source 1..801: mol_type = other DNA
atggatgacagcacagagcgggagcagagccggctgaccagctgcctgaagaagcgggaggagatgaagctgaaggaatgtgtgtccatcctgcccaggaaggagagccccagcgtgcgcagcagcaaggatggcaagctgctggccgccaccctgctgctggccctgctgagctgctgcctgactgtggtgtccttctaccaggtggccgccctgcagggcgacctggccagcctgcgggcagagctgcagggccaccacgccgagaagctgcctgctggagctggggcccccaaggccggcctggaggaggccccagctgtgacagctggcctgaagatctttgagcccccagcccctggagagggcaacagcagccagaacagcaggaacaagagagctgtgcagggccctgaggagaccggcagctacacctttgtgccctggctgctgtccttcaagaggggcagcgccctggaggagaaggagaacaagatcctggtgaaggagaccggctacttcttcatctacggccaggtgctgtacacagacaagacctacgccatgggccacctgatccagaggaagaaggtgcacgtgtttggagatgagctgagcctggtgaccctcttccgctgcatccagaacatgcctgagaccctgcccaacaacagctgctacagcgctggcatcgccaagctggaggagggagatgagctgcagctggccatccccagagaaaatgcccagatcagcctggatggagatgtgaccttcttcggggccctgaagctgctgtag

SEQ ID NO: 22335 - DNA, 495 bp, synthetic construct
  misc_feature 1..495: note = Description of Artificial Sequence: Synthetic coding sequence
  source 1..495: mol_type = other DNA
atggatgacagcacagagcgggagcagagccggctgaccagctgcctgaagaagcgggaggagatgaagctgaaggaatgtgtgtccatcctgcccaggaaggagagccccagcgtgcgcagcagcaaggatggcaagctgctggccgccaccctgctgctggccctgctgagctgctgcctgactgtggtgtccttctaccaggtggccgccctgcagggcgacctggccagcctgcgggcagagctgcagggccaccacgccgagaagctgcctgctggagctggggcccccaaggccggcctggaggaggccccagctgtgacagctggcctgaagatctttgagcccccagcccctggagagggcaacagcagccagaacagcaggaacaagagagctgtgcagggccctgaggagaccgtgacccaggactgcctgcagctgattgctgacagcgagacccccaccatccagaagggcttcatctactag

SEQ ID NO: 22336 - DNA, 2700 bp, synthetic construct
  misc_feature 1..2700: note = Description of Artificial Sequence: Synthetic coding sequence
  source 1..2700: mol_type = other DNA
atgcccaccctgggctggctgcctgaaaatagagacatcagcgaggaccagagcagcgctgagcagacccaggccctggccagccaggccagccagttcctggccaaggtggagagctttgagcggctcatccaggccggccgcctgatgccccaggaccaggtgaagggcttccagaggctgaaggccgcccacgccgccctggaggaggagtacctgaaggcctgccgggagcagcacccagcccagcccctggccggcagcaagggcaccccaggccgctttgacccccggcgggagctggaggccgagatctaccgcctgggcagctgcctggaggagctgaaggagcacatcgaccagacccagcaggagcctgagcccccaggcagtgacagcgccctggacagcaccccagccctgccctgcctgcaccagcccacccacctgcctgcccccagcggccaggcccccatgcctgccatcaagaccagctgcccagagcccgccaccaccacagctgctgccagcacaggcccctgccccctgcacgtgaatgtggaggtgagcagcggcaacagcgaggtggaggaccggccccaggaccccctggcccggctgcggcacaaggagctgcagatggagcaggtgtaccacggcctgatggagcgctacctgtctgtgaagagcctgcctgaggccatgaggatggaggaggaggaggagggggaggaggaggaggaggaggagggcggcggggacagcctggaggtggatggagtggccgccaccccaggcaaggccgaggccaccagggtgctgccccggcagtgccctgtgcaggccgagaagagccacggggcccccctggaggaggccacagagaagatggtgtccatgaagcccccaggcttccaggccagcctggccagagatggccacatgagcggcctgggcaaggccgaggccgcccctcctggccctggggtgcccccccaccccccaggcaccaagtctgctgccagccaccagagctccatgaccagcctggagggcagcggcatcagcgagcggctgccccagaagcccctgcacagaggaggcggcccccacctggaggagacctggatggccagccctgagacagacagcggctttgtgggcagcgagaccagccgggtgagccccctgacccagaccccagagcaccggctgagccacatcagcacagctggcaccctggcccagccctttgctgcctctgtgcccagagatggagccagctaccccaaggcccggggcagcctcatcccccggcgggccacagagcccagcacccccaggagccaggcccagcgctacctgagcagccccagcggccccctgcggcagagggcccccaacttcagcctggagaggaccctggccgctgagatggctgtgcccggcagcgagtttgagggccacaagaggatcagcgagcagcccctgcccaacaagaccatcagccccccaccagccccagccccagctgctgcccccctgccctgtggccccacagagaccatccccagcttcctgctgaccagggctggccgggaccaggccatctgtgagctgcaggaggaggtgtcccggctgcggctgcggctggaggacagcctgcaccagcccctgcagggcagccccaccaggcctgccagcgcctttgacaggcctgcccggacccggggccggcctgctgacagccctgccacctggggcagccactacggcagcaagagcacagagcggctgcccggggagcccagaggagaggagcagatcgtgcccccaggccggcagagggcccggagcagctctgtgccccgggaggtgctgcggctgagcctgagcagcgagagcgagctgcccagcctgcccctcttcagcgagaagagcaagaccaccaaggacagcccccaggccgccagagatggcaagaggggcgtgggcagcgctggctggccagacagagtgaccttccggggccagtacacaggccacgagtaccacgtgctgagccccaaggctgtgcccaagggaaatggcaccgtgtcctgcccccactgccggcccatccgcacccaggatgctgggggcgctgtgactggagaccccctgggccccccacctgctgacaccctgcagtgccccctgtgtggccaggtgggcagccccccagaggctgatggccctggcagcgccaccagcggggctgagaaggccaccaccaggaggaaggccagcagcacccccagccccaagcagaggagcaagcaggccggcagcagccccaggcctcctcctggcctgtggtacctggccacagcccccccagccccagcccccccagcctttgcctacatcagctctgtgcccatcatgccctaccccccagctgctgtgtactatgccccagctggccccaccagcgcccagcctgctgccaagtggcccccaacagccagccccccaccagcccggcggcaccgccacagcatccagctggacctgggggacctggaggagctgaacaaggccctgagcagagctgtgcaggccgctgagagcgtgcgcagcaccacccggcagatgaggagcagcctgtctgctgacctgcggcaggcccacagcctgcggggcagctgcctcttctag

SEQ ID NO: 22337 - DNA, 1569 bp, synthetic construct
  misc_feature 1..1569: note = Description of Artificial Sequence: Synthetic coding sequence
  source 1..1569: mol_type = other DNA
atggccctgctgccccgggccctgtctgctggggccggccccagctggaggagagctgcccgggccttccggggcttcctgctgctgctgcctgagcctgctgccctgacccgggccctgagccgggccatggcctgccggcaggagccccagccccagggccccccacctgctgctggagctgtggccagctatgactacctggtgattggaggcggcagcggcggcctggccagcgccaggagagctgctgagctgggcgcccgggctgctgtggtggagagccacaagctgggcggcacctgtgtgaatgtgggctgtgtgcccaagaaggtgatgtggaacacagctgtgcacagcgagttcatgcatgaccatgctgactatggcttccccagctgtgagggcaagttcaactggagggtcatcaaggagaagagagatgcctacgtgtcccggctgaatgccatctaccagaacaacctgaccaagagccacatcgagatcatccggggccacgccgccttcaccagtgaccccaagcccaccatcgaggtgtctgggaagaagtacacagccccccacatcctgattgccaccggcggcatgcccagcacccctcatgagagccagatccctggggccagcctgggcatcaccagtgatggcttcttccagctggaggagctgcccggccgcagcgtcatcgtgggcgccggctacatcgctgtggagatggccggcatcctgagcgccctgggcagcaagaccagcctgatgatcagacatgacaaggtgctgcggagctttgacagcatgatcagcaccaactgcacagaggagctggagaatgccggcgtggaggtgctgaagttcagccaggtgaaggaggtgaagaagaccctgagcggcctggaggtgtccatggtgacagctgtgcccggccgcctgcctgtgatgaccatgatcccagatgtggactgcctgctgtgggccatcggccgggtgcccaacaccaaggacctgagcctgaacaagctgggcatccagacagatgacaagggccacatcatcgtggatgagttccagaacaccaacgtgaagggcatctatgctgtgggagatgtgtgtgggaaggccctgctgacccctgtggccatcgctgctggcaggaagctggcccaccggctgtttgagtacaaggaggacagcaagctggactacaacaacatccccaccgtggtgttcagccacccccccatcggcaccgtgggcctgacagaagatgaggccatccacaagtatggaattgaaaatgtgaagacctacagcaccagcttcacccccatgtaccacgctgtgaccaagaggaagaccaagtgtgtgatgaagatggtgtgtgccaacaaggaggagaaggtggtgggcatccacatgcagggcctgggctgtgatgagatgctgcagggctttgctgtggccgtgaagatgggcgccaccaaggctgactttgacaacacagtggccatccaccccaccagcagcgaggagctggtgaccctgaggtag

SEQ ID NO: 22338 - DNA, 1323 bp, synthetic construct
  misc_feature 1..1323: note = Description of Artificial Sequence: Synthetic coding sequence
  source 1..1323: mol_type = other DNA
atggagcagaggggccagaatgccccagctgccagcggggccaggaagagacatggccctggcccccgggaggcccggggggcccggcccggcccccgggtgcccaagaccctggtgctggtggtggccgctgtgctgctgctggtgtctgctgagagcgccctgatcacccagcaggacctggccccccagcagagagctgccccccagcagaagaggagcagccccagcgagggcctgtgccccccaggccaccacatcagtgaagatggccgggactgcatcagctgcaagtatggccaggactacagcacccactggaatgacctgctcttctgcctgcgctgcacccgctgtgacagcggggaggtggagctgagcccctgcaccaccaccaggaacacagtgtgccagtgtgaggagggcaccttccgggaggaggacagccctgagatgtgcaggaaatgtagaacaggctgcccccggggcatggtgaaggtgggggactgcaccccctggagcgacattgaatgtgtgcacaaggagagcggcaccaagcacagcggggaggtgcctgctgtggaggagaccgtgaccagcagccctggcaccccagccagcccctgcagcctgagcggcatcatcatcggcgtgacagtggccgctgtggtgctgattgtggccgtgtttgtgtgcaagagcctgctgtggaagaaggtgctgccctacctgaagggcatctgcagcggcggcggcggggaccctgagcgggtggacaggagcagccagaggcctggagctgaggacaacgtgctgaatgaaattgtgtccatcctgcagcccacccaggtgcctgagcaggagatggaggtgcaggagcctgctgagcccaccggggtgaacatgctgagccctggagagagcgagcacctgctggagcctgctgaggccgagaggagccagaggcggcggctgctggtgcctgccaatgaaggagaccccacagagaccctgcggcagtgctttgatgactttgctgacctggtgccctttgacagctgggagcccctgatgaggaagctgggcctgatggacaatgagatcaaggtggccaaggccgaggccgccggccaccgggacaccctgtacaccatgctgatcaagtgggtgaacaagacaggaagagatgcctctgtgcacaccctgctggatgccctggagaccctgggggagcggctggccaagcagaagattgaggaccacctgctgagcagcggcaagttcatgtacctggagggcaatgctgacagcgccatgtcctag

SEQ ID NO: 22339 - DNA, 1236 bp, synthetic construct
  misc_feature 1..1236: note = Description of Artificial Sequence: Synthetic coding sequence
  source 1..1236: mol_type = other DNA
atggagcagaggggccagaatgccccagctgccagcggggccaggaagagacatggccctggcccccgggaggcccggggggcccggcccggcccccgggtgcccaagaccctggtgctggtggtggccgctgtgctgctgctggtgtctgctgagagcgccctgatcacccagcaggacctggccccccagcagagagctgccccccagcagaagaggagcagccccagcgagggcctgtgccccccaggccaccacatcagtgaagatggccgggactgcatcagctgcaagtatggccaggactacagcacccactggaatgacctgctcttctgcctgcgctgcacccgctgtgacagcggggaggtggagctgagcccctgcaccaccaccaggaacacagtgtgccagtgtgaggagggcaccttccgggaggaggacagccctgagatgtgcaggaaatgtagaacaggctgcccccggggcatggtgaaggtgggggactgcaccccctggagcgacattgaatgtgtgcacaaggagagcggcatcatcattggagtgacagtggccgctgtggtgctgattgtggccgtgtttgtgtgcaagagcctgctgtggaagaaggtgctgccctacctgaagggcatctgcagcggcggcggcggggaccctgagcgggtggacaggagcagccagaggcctggagcagaagataatgtgctgaatgagatcgtgtccatcctgcagcccacccaggtgcctgagcaggagatggaggtgcaggagcctgctgagcccactggagtgaacatgctgagccctggagagagcgagcacctgctggagcctgctgaggccgagaggagccagaggcggcggctgctggtgcctgccaatgaaggagaccccacagagaccctgcggcagtgctttgatgactttgctgacctggtgccctttgacagctgggagcccctgatgaggaagctgggcctgatggacaatgagatcaaggtggccaaggccgaggccgccggccaccgggacaccctgtacaccatgctgatcaagtgggtgaacaagacaggaagagatgcctctgtgcacaccctgctggatgccctggagaccctgggggagcggctggccaagcagaagattgaggaccacctgctgagcagcggcaagttcatgtacctggagggcaatgctgacagcgccatgtcctag

SEQ ID NO: 22340 - DNA, 783 bp, synthetic construct
  misc_feature 1..783: note = Description of Artificial Sequence: Synthetic coding sequence
  source 1..783: mol_type = other DNA
atgtgcaggaagtgcaggacaggctgcccccggggcatggtgaaggtgggggactgcaccccctggagcgacattgaatgtgtgcacaaggagagcggcatcatcatcggcgtgacagtggccgctgtggtgctgattgtggccgtgtttgtgtgcaagagcctgctgtggaagaaggtgctgccctacctgaagggcatctgcagcggcggcggcggggaccctgagcgggtggacaggagcagccagaggcctggagctgaggacaacgtgctgaatgaaattgtgtccatcctgcagcccacccaggtgcctgagcaggagatggaggtgcaggagcctgctgagcccaccggggtgaacatgctgagccctggagagagcgagcacctgctggagcctgctgaggccgagaggagccagaggcggcggctgctggtgcctgccaatgaaggagaccccacagagaccctgcggcagtgctttgatgactttgctgacctggtgccctttgacagctgggagcccctgatgaggaagctgggcctgatggacaatgagatcaaggtggccaaggccgaggccgccggccaccgggacaccctgtacaccatgctgatcaagtgggtgaacaagacaggaagagatgcctctgtgcacaccctgctggatgccctggagaccctgggggagcggctggccaagcagaagattgaggaccacctgctgagcagcggcaagttcatgtacctggagggcaatgctgacagcgccatgtcctag

SEQ ID NO: 22341 - DNA, 1161 bp, synthetic construct
  misc_feature 1..1161: note = Description of Artificial Sequence: Synthetic coding sequence
  source 1..1161: mol_type = other DNA
atgggcctgtggggccagagcgtgcccacagccagcagcgcccgggccggccgctacccaggggccaggacagccagcggcacccggccctggctgctggaccccaagatcctgaagtttgtggtgttcatcgtggccgtgctgctgcctgtgcgggtggacagcgccaccatcccccggcaggatgaggtgccccagcagacagtggccccccagcagcagaggaggagcctgaaggaggaggagtgcccagctggcagccacaggtctgagtacacaggagcctgcaacccctgcacagagggcgtggactacaccatcgccagcaacaacctgcccagctgcctgctgtgcaccgtgtgcaagagcggccagaccaacaagagcagctgcaccaccacccgggacacagtgtgccagtgtgagaagggcagcttccaggacaagaacagccctgagatgtgcaggacctgcaggacaggctgcccccggggcatggtgaaggtgagcaactgcacccccaggagtgacatcaagtgcaagaatgaatctgctgccagcagcacaggcaagaccccagctgctgaggagaccgtgaccaccatcctgggcatgctggccagcccctaccactacctgatcatcatcgtggtgctggtgatcatcctggccgtggtggtggtgggcttcagctgcaggaagaagttcatctcctacctgaagggcatctgcagcggcggcggcggcggccctgagcgggtgcaccgggtgctcttcagaagaagaagctgccccagccgggtgcctggagctgaggacaatgccagaaatgagaccctgagcaaccgctacctgcagcccacccaggtgtctgagcaggagatccagggccaggagctggccgagctgactggagtgacagtggagctgcctgaggagccccagaggctgctggagcaggccgaggccgagggctgccagaggcggcggctgctggtgcctgtgaatgatgctgacagcgctgacatcagcaccctgctggatgccagcgccaccctggaggagggccacgccaaggagaccatccaggaccagctggtgggcagcgagaagctgttctatgaggaggatgaagctggcagcgccaccagctgcctgtag

SEQ ID NO: 22342 - DNA, 1368 bp, synthetic construct
  misc_feature 1..1368: note = Description of Artificial Sequence: Synthetic coding sequence
  source 1..1368: mol_type = other DNA
atgggcctgagcacagtgcctgacctgctgctgcccctggtgctgctggagctgctggtgggcatctaccccagcggggtcatcggcctggtgccccacctgggggaccgggagaagagggacagcgtgtgcccccagggcaagtacatccacccccagaacaacagcatctgctgcaccaagtgccacaagggcacctacctgtacaatgactgccccggccctggccaggacacagactgcagagaatgtgagagcggcagcttcaccgccagcgagaaccacctgcggcactgcctgagctgcagcaagtgcaggaaggagatgggccaggtggagatcagcagctgcaccgtggaccgggacacagtgtgtggctgcaggaagaaccagtaccgccactactggagcgagaacctcttccagtgcttcaactgcagcctgtgcctgaatggaacagtgcacctgagctgccaggagaagcagaacacagtgtgcacctgccacgccggcttcttcctgcgggagaatgaatgtgtgtcctgcagcaactgcaagaagagcctggagtgcaccaagctgtgcctgccccagattgaaaatgtgaagggcacagaggacagcggcaccaccgtgctgctgcccctggtgatcttcttcggcctgtgcctgctgagcctgctcttcatcggcctgatgtaccgctaccagcgctggaagagcaagctgtacagcatcgtgtgtgggaagagcaccccagagaaggagggggagctggagggcaccaccaccaagcccctggcccccaaccccagcttcagccccaccccaggcttcacccccaccctgggcttcagccctgtgcccagcagcaccttcaccagcagcagcacctacacccctggggactgccccaactttgctgccccccggcgggaggtggccccaccctaccagggcgctgaccccatcctggccacagccctggccagtgaccccatccccaaccccctgcagaagtgggaggacagcgcccacaagccccagagcctggacacagatgatcctgccaccctgtatgctgtggtggagaatgtgccccccctgcgctggaaggagtttgtgcggcggctgggcctgagtgaccatgaaattgaccggctggagctgcagaatggccgctgcctgcgggaggcccagtacagcatgctggccacctggaggaggaggaccccaagaagagaggccaccctggagctgctgggccgggtgctgcgggacatggacctgctgggctgcctggaggacatcgaggaggccctgtgtggccctgctgccctgcccccagcccccagcctgctgaggtag

SEQ ID NO: 22343 - DNA, 657 bp, synthetic construct
  misc_feature 1..657: note = Description of Artificial Sequence: Synthetic coding sequence
  source 1..657: mol_type = other DNA
atgggcctgagcacagtgcctgacctgctgctgcccctggtgctgctggagctgctggtgggcatctaccccagcggggtcatcggcctggtgccccacctgggggaccgggagaagagggacagcgtgtgcccccagggcaagtacatccacccccagaacaacagcatctgctgcaccaagtgccacaagggcacctacctgtacaatgactgccccggccctggccaggacacagactgcagagaatgtgagagcggcagcttcaccgccagcgagaaccacctgcggcactgcctgagctgcagcaagtgcaggaaggagatgggccaggtggagatcagcagctgcaccgtggaccgggacacagtgtgtggctgcaggaagaaccagtaccgccactactggagcgagaacctcttccagtgcttcaactgcagcctgtgcctgaatggaacagtgcacctgagctgccaggagaagcagaacacagtgtgcacctgccacgccggcttcttcctgcgggagaatgaatgtgtgtcctgcagcaaggtgctgctgtgccggcccggctggaatgctgtggcccggagccggctgacagccaccagcgccagccagatccaggccatcctgctgctgcagccccccaagtag

SEQ ID NO: 22344 - DNA, 1386 bp, synthetic construct
  misc_feature 1..1386: note = Description of Artificial Sequence: Synthetic coding sequence
  source 1..1386: mol_type = other DNA
atggcccctgtggccgtgtgggccgccctggccgtgggcctggagctgtgggccgccgcccacgccctgcctgcccaggtggccttcaccccctatgcccctgagcccggcagcacctgccgcctgcgggagtactatgaccagacagcccagatgtgctgcagcaagtgcagccctggccagcacgccaaggtgttctgcaccaagaccagtgacacagtgtgtgacagctgtgaggacagcacctacacccagctgtggaactgggtgcctgagtgcctgagctgtggcagccgctgcagcagtgaccaggtggagacccaggcctgcacccgggagcagaaccgcatctgcacctgccggcccggctggtactgtgccctgagcaagcaggagggctgccgcctgtgtgcccccctgaggaagtgcaggcctggctttggagtggcccggcccggcacagagaccagtgatgtggtgtgcaagccctgtgcccctggcaccttcagcaacaccaccagcagcacagacatctgccggccccaccagatctgcaatgtggtggccatccctggaaatgcctccatggatgctgtgtgcaccagcaccagccccaccaggtccatggcccctggagctgtgcacctgccccagcctgtgtccaccaggagccagcacacccagcccaccccagagcccagcacagcccccagcaccagcttcctgctgcccatgggccccagccccccagctgagggcagcactggagactttgccctgcctgtgggcctgattgtgggcgtgacagccctgggcctgctgatcatcggcgtggtgaactgtgtgatcatgacccaggtgaagaagaagcccctgtgcctgcagcgggaggccaaggtgccccacctgcctgctgacaaggcccggggcacccagggccctgagcagcagcacctgctgatcacagcccccagcagcagcagcagcagcctggagagcagcgccagcgccctggaccggcgggcccccaccaggaaccagccccaggcccctggggtggaggccagcggggccggggaggcccgggccagcacaggcagcagtgacagcagccctgggggccacggcacccaggtgaatgtgacctgcatcgtgaatgtgtgcagcagcagtgaccacagcagccagtgcagcagccaggccagcagcaccatgggagacacagacagcagccccagcgagagccccaaggatgagcaggtgcccttcagcaaggaggagtgtgccttccgcagccagctggagaccccagagaccctgctgggcagcacagaggagaagcccctgcccctgggcgtgcctgatgctggcatgaagcccagctag

SEQ ID NO: 22345 - DNA, 807 bp, synthetic construct
  misc_feature 1..807: note = Description of Artificial Sequence: Synthetic coding sequence
  source 1..807: mol_type = other DNA
atggcccctgtggccgtgtgggccgccctggccgtgggcctggagctgtgggccgccgcccacgccctgcctgcccaggtggccttcaccccctatgcccctgagcccggcagcacctgccgcctgcgggagtactatgaccagacagcccagatgtgctgcagcaagtgcagccctggccagcacgccaaggtgttctgcaccaagaccagtgacacagtgtgtgacagctgtgaggacagcacctacacccagctgtggaactgggtgcctgagtgcctgagctgtggcagccgctgcagcagtgaccaggtggagacccaggcctgcacccgggagcagaaccgcatctgcacctgccggcccggctggtactgtgccctgagcaagcaggagggctgccgcctgtgtgcccccctgaggaagtgcaggcctggctttggagtggcccggcccggcacagagaccagtgatgtggtgtgcaagccctgtgcccctggcaccttcagcaacaccaccagcagcacagacatctgccggccccaccagatctgcaatgtggtggccatccctggaaatgcctccatggatgctgtgtgcaccagcaccagccccaccaggtccatggcccctggagctgtgcacctgccccagcctgtgtccaccaggagccagcacacccagcccaccccagagcccagcacagcccccagcaccagcttcctgctgcccatgggccccagccccccagctgagggcagcactggagactttgccctgcctgtggtgtccctgagcagcagctag

SEQ ID NO: 22346 - DNA, 468 bp, synthetic construct
  misc_feature 1..468: note = Description of Artificial Sequence: Synthetic coding sequence
  source 1..468: mol_type = other DNA
atggcccctgtggccgtgtgggccgccctggccgtgggcctggagctgtgggccgccgcccacgccctgcctgcccaggtggccttcaccccctatgcccctgagcccggcagcacctgccgcctgcgggagtactatgaccagacagcccagatgtgctgcagcaagtgcagccctggccagcacgccaaggtgttctgcaccaagaccagtgacacagtgtgtgacagctgtgaggacagcacctacacccagctgtggaactgggtgcctgagtgcctgagctgtggcagccgctgcagcagtgaccaggtggagacccaggcctgcacccgggagcagaaccgcatctgcacctgccggcccggctggtactgtgccctgagcaagcaggagggctgccgcctgtgtgcccccctgaggaagtgcaggcctggctttggagtggcccggccagacctgtcctag

SEQ ID NO: 22347 - DNA, 114 bp, synthetic construct
  misc_feature 1..114: note = Description of Artificial Sequence: Synthetic coding sequence
  source 1..114: mol_type = other DNA
atggcccctgtggccgtgtgggccgccctggccgtgggcctggagctgtgggccgccgcccacgccctgcctgcccaggtggaccccggccccctcttcccccaccctggatag

SEQ ID NO: 22348 - DNA, 1968 bp, synthetic construct
  misc_feature 1..1968: note = Description of Artificial Sequence: Synthetic coding sequence
  source 1..1968: mol_type = other DNA
atgggcaccagccccagcagcagcacagccctggccagctgcagcagaattgcccggcgggccacagccaccatgattgctggcagcctgctgctgctgggcttcctgagcaccaccacagcccagcctgagcagaaggccagcaacctgattggcacctaccgccacgtggaccgggccaccggccaggtgctgacctgtgacaagtgcccagctggcacctacgtgtctgagcactgcaccaacaccagcctgcgggtgtgcagcagctgccctgtgggcaccttcaccaggcatgaaaatggaattgaaaaatgtcatgactgcagccagccctgcccctggcccatgattgagaagctgccctgtgccgccctgacagaccgggagtgcacctgccccccaggcatgttccagagcaatgccacctgtgccccccacacagtgtgccctgtgggctggggcgtgaggaagaagggcacagaaacagaagatgtgcgctgcaagcagtgtgcccggggcaccttcagtgatgtgcccagctctgtgatgaagtgcaaggcctacacagactgcctgagccagaacctggtggtgatcaagccaggcaccaaggagacagacaacgtgtgtggcaccctgcccagcttcagcagcagcaccagccccagccctggaacagccatcttccccaggcctgagcacatggagacccatgaggtgcccagcagcacctacgtgcccaagggcatgaacagcacagagagcaacagcagcgcctctgtgcggcccaaggtgctgagcagcatccaggagggcaccgtgcctgacaacaccagcagcgcccggggcaaggaggatgtgaacaagaccctgcccaacctgcaggtggtgaaccaccagcagggcccccaccaccgccacatcctgaagctgctgcccagcatggaggccactggaggagagaagagcagcacccccatcaagggccccaagaggggccacccccggcagaacctgcacaagcactttgacatcaatgagcacctgccctggatgattgtgctcttcctgctgctggtgctggtggtgattgtggtgtgcagcatcaggaagagcagcaggaccctgaagaagggcccccggcaggaccccagcgccatcgtggagaaggccggcctgaagaagtccatgacccccacccagaaccgggagaagtggatctactactgcaatggccacggcatcgacatcctgaagctggtggccgcccaggtgggcagccagtggaaggacatctaccagttcctgtgcaatgccagcgagcgggaggtggccgccttcagcaatggctacacagctgaccacgagcgggcctatgctgccctgcagcactggaccatccggggccctgaggccagcctggcccagctgatcagcgccctgcggcagcacagaagaaatgatgtggtggagaagatccggggcctgatggaggacaccacccagctggagacagacaagctggccctgcccatgagccccagccccctgagccccagccccatccccagccccaatgccaagctggagaacagcgccctgctgactgtggagcccagcccccaggacaagaacaagggcttctttgtggatgagagcgagcccctgctgcgctgtgacagcaccagcagcggcagcagcgccctgagcagaaatggcagcttcatcaccaaggagaagaaggacacagtgctgcggcaggtgcggctggacccctgtgacctgcagcccatctttgatgacatgctgcacttcctgaaccctgaggagctgcgggtgattgaggagatcccccaggccgaggacaagctggaccggctgtttgagatcatcggcgtgaagagccaggaggccagccagaccctgctggacagcgtgtacagccacctgcctgacctgctgtag

SEQ ID NO: 22349 - DNA, 1035 bp, synthetic construct
  misc_feature 1..1035: note = Description of Artificial Sequence: Synthetic coding sequence
  source 1..1035: mol_type = other DNA
agctgctgccggccctggaggcccctgggcgcccggagccctgcccggcccagccggcccaagaggggccacccccggcagaacctgcacaagcactttgacatcaatgagcacctgccctggatgattgtgctcttcctgctgctggtgctggtggtgattgtggtgtgcagcatcaggaagagcagcaggaccctgaagaagggcccccggcaggaccccagcgccatcgtggagaaggccggcctgaagaagtccatgacccccacccagaaccgggagaagtggatctactactgcaatggacatggaattgacatcctgaagctggtggccgcccaggtgggcagccagtggaaggacatctaccagttcctgtgcaatgccagcgagcgggaggtggccgccttcagcaatggctacacagctgaccacgagcgggcctatgctgccctgcagcactggaccatccggggccctgaggccagcctggcccagctgatcagcgccctgcggcagcacagaagaaatgatgtggtggagaagatccggggcctgatggaggacaccacccagctggagacagacaagctggccctgcccatgagccccagccccctgagccccagccccatccccagccccaatgccaagctggagaacagcgccctgctgactgtggagcccagcccccaggacaagaacaagggcttctttgtggatgaaagtgagcccctgctgcgctgtgacagcaccagcagcggcagcagcgccctgagcagaaatggcagcttcatcaccaaggagaagaaggacacagtgctgcggcaggtgcggctggacccctgtgacctgcagcccatctttgatgacatgctgcacttcctgaaccctgaggagctgcgggtcatcgaggagatcccccaggccgaggacaagctggaccggctgtttgagatcattggagtgaagagccaggaggccagccagaccctgctggacagcgtgtacagccacctgcctgacctgctgtag

SEQ ID NO: 22350 - DNA, 1119 bp, synthetic construct
  misc_feature 1..1119: note = Description of Artificial Sequence: Synthetic coding sequence
  source 1..1119: mol_type = other DNA
atggagcagaggccccggggctgtgccgctgtggccgccgccctgctgctggtgctgctgggcgcccgggcccagggcggcaccaggagcccccgctgtgactgtgccggggacttccacaagaagattggcctcttctgctgccggggctgcccagctgccagccaggtggccctggagaactgcagcgctgtggccgacacccgctgtggctgcaagccaggctggtttgtggagtgccaggtgtcccagtgtgtgagcagcagccccttctactgccagccctgcctggactgtggggccctgcaccgccacacccggctgctgtgcagccggcgggacacagactgtggcacctgcctgcccggcttctatgaacatggagatggctgtgtgtcctgccccaccagcaccctgggcagctgcccagagcgctgtgccgctgtgtgtggctggaggcagatgttctgggtgcaggtgctgctggccggcctggtggtgcccctgctgctgggcgccaccctgacctacacctaccgccactgctggccccacaagcccctggtgacagcagatgaggccggcatggaggccctgaccccacctccagccacccacctgagccccctggacagcgcccacaccctgctggcccccccagacagcagcgagaagatctgcaccgtgcagctggtgggcaacagctggaccccaggctacccagagacccaggaggccctgtgcccccaggtgacctggagctgggaccagctgcccagccgggccctgggccctgctgctgcccccaccctgagccctgagagccctgctggcagccctgccatgatgctgcagcccggcccccagctgtatgatgtgatggatgctgtgcctgcccggcgctggaaggagtttgtgaggaccctgggcctgcgggaggccgagattgaggccgtggaggtggagatcggccgcttccgggaccagcagtatgagatgctgaagcgctggaggcagcagcagcctgctggcctgggcgctgtgtatgctgccctggagaggatgggcctggatggctgtgtggaggacctgcggagccggctgcagaggggcccctag

SEQ ID NO: 22351 - DNA, 705 bp, synthetic construct
  misc_feature 1..705: note = Description of Artificial Sequence: Synthetic coding sequence
  source 1..705: mol_type = other DNA
atggagcagaggccccggggctgtgccgctgtggccgccgccctgctgctggtgctgctgggcgcccgggcccagggcggcaccaggagcccccgctgtgactgtgccggggacttccacaagaagattggcctcttctgctgccggggctgcccagcagatgaggccggcatggaggccctgaccccacctccagccacccacctgagccccctggacagcgcccacaccctgctggcccccccagacagcagcgagaagatctgcaccgtgcagctggtgggcaacagctggaccccaggctacccagagacccaggaggccctgtgcccccaggtgacctggagctgggaccagctgcccagccgggccctgggccctgctgctgcccccaccctgagccctgagagccctgctggcagccctgccatgatgctgcagcccggcccccagctgtatgatgtgatggatgctgtgcctgcccggcgctggaaggagtttgtgaggaccctgggcctgcgggaggccgagattgaggccgtggaggtggagatcggccgcttccgggaccagcagtatgagatgctgaagcgctggaggcagcagcagcctgctggcctgggcgctgtgtatgctgccctggagaggatgggcctggatggctgtgtggaggacctgcggagccggctgcagaggggcccctag

SEQ ID NO: 22352 - DNA, 1143 bp, synthetic construct
  misc_feature 1..1143: note = Description of Artificial Sequence: Synthetic coding sequence
  source 1..1143: mol_type = other DNA
atggagcagaggccccggggctgtgccgctgtggccgccgccctgctgctggtgctgctgggcgcccgggcccagggcggcaccaggagcccccgctgtgactgtgccggggacttccacaagaagattggcctcttctgctgccggggctgcccagctggccactacctgaaggccccctgcacagagccctgtggcaacagcacctgcctggtgtgcccccaggacaccttcctggcctgggagaaccaccacaacagtgaatgtgcccgctgccaggcctgtgatgagcaggccagccaggtggccctggagaactgcagcgctgtggccgacacccgctgtggctgcaagccaggctggtttgtggagtgccaggtgtcccagtgtgtgagcagcagccccttctactgccagccctgcctggactgtggggccctgcaccgccacacccggctgctgtgcagcagaagagacacagactgtggcacctgcctgcccggcttctatgagcacggagatggctgtgtgtcctgccccaccagcaccctgggcagctgcccagagcgctgtgccgctgtgtgtggctggaggcagaatgaggccggcatggaggccctgaccccacctccagccacccacctgagccccctggacagcgcccacaccctgctggcccccccagacagcagcgagaagatctgcaccgtgcagctggtgggcaacagctggaccccaggctacccagagacccaggaggccctgtgcccccaggtgacctggagctgggaccagctgcccagccgggccctgggccctgctgctgcccccaccctgagccctgagagccctgctggcagccctgccatgatgctgcagcccggcccccagctgtatgatgtgatggatgctgtgcctgcccggcgctggaaggagtttgtgaggaccctgggcctgcgggaggccgagattgaggccgtggaggtggagatcggccgcttccgggaccagcagtatgagatgctgaagcgctggaggcagcagcagcctgctggcctgggcgctgtgtatgctgccctggagaggatgggcctggatggctgtgtggaggacctgcggagccggctgcagaggggcccctag

SEQ ID NO: 22353 - DNA, 1254 bp, synthetic construct
  misc_feature 1..1254: note = Description of Artificial Sequence: Synthetic coding sequence
  source 1..1254: mol_type = other DNA
atggagcagaggccccggggctgtgccgctgtggccgccgccctgctgctggtgctgctgggcgcccgggcccagggcggcaccaggagcccccgctgtgactgtgccggggacttccacaagaagattggcctcttctgctgccggggctgcccagctggccactacctgaaggccccctgcacagagccctgtggcaacagcacctgcctggtgtgcccccaggacaccttcctggcctgggagaaccaccacaacagtgaatgtgcccgctgccaggcctgtgatgagcaggccagccaggtggccctggagaactgcagcgctgtggccgacacccgctgtggctgcaagccaggctggtttgtggagtgccaggtgtcccagtgtgtgagcagcagccccttctactgccagccctgcctggactgtggggccctgcaccgccacacccggctgctgtgcagcagaagagacacagactgtggcacctgcctgcccggcttctatgagcacggagatggctgtgtgtcctgccccaccagcaccctgggcagctgcccagagcgctgtgccgctgtgtgtggctggaggcagatgttctgggtgcaggtgctgctggccggcctggtggtgcccctgctgctgggcgccaccctgacctacacctaccgccactgctggccccacaagcccctggtgacagcagatgaagctggcatggaggccctgaccccacctccagccacccacctgagccccctggacagcgcccacaccctgctggcccccccagacagcagcgagaagatctgcaccgtgcagctggtgggcaacagctggaccccaggctacccagagacccaggaggccctgtgcccccaggtgacctggagctgggaccagctgcccagccgggccctgggccctgctgctgcccccaccctgagccctgagagccctgctggcagccctgccatgatgctgcagcccggcccccagctgtatgatgtgatggatgctgtgcctgcccggcgctggaaggagtttgtgaggaccctgggcctgcgggaggccgagattgaagctgtggaggtggagatcggccgcttccgggaccagcagtatgagatgctgaagcgctggaggcagcagcagcctgctggcctgggcgctgtgtatgctgccctggagaggatgggcctggatggctgtgtggaggacctgcggagccggctgcagaggggcccctag

SEQ ID NO: 22354 - DNA, 1281 bp, synthetic construct
  misc_feature 1..1281: note = Description of Artificial Sequence: Synthetic coding sequence
  source 1..1281: mol_type = other DNA
atggagcagaggccccggggctgtgccgctgtggccgccgccctgctgctggtgctgctgggcgcccgggcccagggcggcaccaggagcccccgctgtgactgtgccggggacttccacaagaagattggcctcttctgctgccggggctgcccagctggccactacctgaaggccccctgcacagagccctgtggcaacagcacctgcctggtgtgcccccaggacaccttcctggcctgggagaaccaccacaacagtgaatgtgcccgctgccaggcctgtgatgagcaggccagccaggtggccctggagaactgcagcgctgtggccgacacccgctgtggctgcaagccaggctggtttgtggagtgccaggtgtcccagtgtgtgagcagcagccccttctactgccagccctgcctggactgtggggccctgcaccgccacacccggctgctgtgcagcagaagagacacagactgtggcacctgcctgcccggcttctatgagcacggagatggctgtgtgtcctgccccaccccaccacccagcctggccggggccccctggggcgctgtgcagagcgctgtgcccctgtctgtggccggcggccgggtgggcgtcttctgggtgcaggtgctgctggccggcctggtggtgcccctgctgctgggcgccaccctgacctacacctaccgccactgctggccccacaagcccctggtgacagcagatgaggccggcatggaggccctgaccccacctccagccacccacctgagccccctggacagcgcccacaccctgctggcccccccagacagcagcgagaagatctgcaccgtgcagctggtgggcaacagctggaccccaggctacccagagacccaggaggccctgtgcccccaggtgacctggagctgggaccagctgcccagccgggccctgggccctgctgctgcccccaccctgagccctgagagccctgctggcagccctgccatgatgctgcagcccggcccccagctgtatgatgtgatggatgctgtgcctgcccggcgctggaaggagtttgtgaggaccctgggcctgcgggaggccgagattgaggccgtggaggtggagatcggccgcttccgggaccagcagtatgagatgctgaagcgctggaggcagcagcagcctgctggcctgggcgctgtgtatgctgccctggagaggatgggcctggatggctgtgtggaggacctgcggagccggctgcagaggggcccctag

SEQ ID NO: 22355 - DNA, 768 bp, synthetic construct
  misc_feature 1..768: note = Description of Artificial Sequence: Synthetic coding sequence
  source 1..768: mol_type = other DNA
atgggcaacagctgctacaacatcgtggccaccctgctgctggtgctgaactttgagaggaccaggagcctgcaggacccctgcagcaactgcccagctggcaccttctgtgacaacaacagaaaccagatctgcagcccctgcccccccaacagcttcagcagcgctgggggccagaggacctgtgacatctgccggcagtgcaagggcgtcttccgcaccaggaaagaatgtagcagcaccagcaatgcagaatgtgactgcaccccaggcttccactgcctgggcgccggctgcagcatgtgtgagcaggactgcaagcagggccaggagctgaccaagaagggctgcaaggactgctgcttcggcaccttcaatgaccagaagaggggcatctgccggccctggaccaactgcagcctggatggcaagtctgtgctggtgaatggcaccaaggagagagatgtggtgtgtggccccagccctgctgacctgagccctggggccagctctgtgaccccaccagccccagcccgggagcccggccacagcccccagatcatctccttcttcctggccctgaccagcacagccctgctcttcctgctcttcttcctgaccctgcgcttctctgtggtgaagaggggcaggaagaagctgctgtacatcttcaagcagcccttcatgaggcctgtgcagaccacccaggaggaggatggctgcagctgccgcttccctgaggaggaggagggcggctgtgagctgtag

SEQ ID NO: 22356 - DNA, 5919 bp, synthetic construct
  misc_feature 1..5919: note = Description of Artificial Sequence: Synthetic coding sequence
  source 1..5919: mol_type = other DNA
atggaccccaccggcagccagctggacagcgacttcagccagcaggacaccccctgcctgatcatcgaggacagccagcctgagagccaggtgctggaggatgacagcggcagccacttctccatgctgagccgccacctgcccaacctgcagacccacaaggaaaatcctgtgctggatgtggtgagcaaccctgagcagacagctggggaggagagaggagatggcaacagcggcttcaatgagcacctgaaggagaacaaggtggccgaccctgtggacagcagcaacctggacacctgtggcagcatcagccaggtgattgagcagctgccccagcccaacagaaccagctctgtgctgggcatgtctgtggagagcgccccagctgtggaggaggagaagggggaggagctggagcagaaggagaaggagaaggaggaggacaccagcggcaacaccacccacagcctgggcgctgaggacacagccagcagccagctgggcttcggcgtgctggagctgagccagagccaggatgtggaggagaacacagtgccctatgaggtggacaaggagcagctgcagagcgtgaccaccaacagcggctacacccggctgagtgatgtggatgccaacacagccatcaagcatgaggagcagagcaatgaagacatccccatcgccgagcagagcagcaaggacatccctgtgacagcccagcccagcaaggatgtgcacgtggtgaaggagcagaaccccccaccagcccggtctgaggacatgcccttcagccccaaggcctctgtggccgccatggaggccaaggagcagctgagcgcccaggagctgatggagagcggcctgcagatccagaagagccctgagcctgaggtgctgagcacccaggaggacctgtttgaccagagcaacaagacagtgtccagtgatggctgcagcacccccagccgggaggagggcggctgcagcctggccagcaccccagccaccaccctgcacctgctgcagctgagcggccagaggagcctggtgcaggacagcctgagcaccaacagcagtgacctggtggcccccagcccagatgccttccgcagcacccccttcatcgtgcccagcagccccacagagcaggagggccggcaggacaagcccatggacacctctgtgctgtctgaggagggcggggagcccttccagaagaagctgcagagcggggagcctgtggagctggagaacccccccctgctgcctgagagcacagtgagcccccaggccagcacccccatcagccagagcacccctgtgttccccccaggcagcctgcccatccccagccagccccagttcagccatgacatcttcatccccagccccagcctggaggagcagagcaatgatggcaagaaggatggagacatgcacagcagcagcctgactgtggagtgcagcaagaccagcgagattgagcccaagaacagccctgaggacctgggcctgagcctgactggagacagctgcaagctgatgctgagcaccagcgagtacagccagagccccaagatggagagcctgagcagccacagaattgatgaagatggagagaacacccagatcgaggacacagagcccatgagccctgtgctgaacagcaagtttgtgcctgcagaaaatgacagcatcctgatgaacccagcccaggatggagaggtgcagctgagccagaatgatgacaagaccaagggagatgacacagacaccagagatgacatcagcatcctggccaccggctgcaagggccgggaggagaccgtggctgaagatgtgtgcatcgacctgacctgtgacagcggcagccaggccgtgcccagccctgccaccaggtctgaggccctgagctctgtgctggaccaggaggaggccatggagatcaaggagcaccaccctgaggagggcagcagcggcagcgaggtggaggagatccctgagaccccctgtgagagccagggcgaggagctgaaggaggagaacatggagagcgtgcccctgcacctgagcctgacagagacccagagccagggcctgtgcctgcagaaggagatgcccaagaaggaatgttctgaggccatggaggtggagaccagcgtcatcagcattgacagcccccagaagctggccatcctggaccaggagctggagcacaaggagcaggaggcctgggaggaggccaccagcgaggacagctctgtggtgattgtggatgtgaaggagcccagcccccgggtggatgtgtcctgtgagcccctggagggcgtggagaagtgcagcgacagccagagctgggaggacatcgcccctgagattgagccctgtgctgaaaatcggctggacaccaaggaggagaagtctgtggagtatgaaggagacctgaagagcggcacagctgagacagagcctgtggagcaggacagcagccagcccagcctgcccctggtgcgggcagatgaccccctgcggctggaccaggagctgcagcagccccagacccaggagaagaccagcaacagcctgacagaggacagcaagatggccaatgccaagcagctgagcagtgatgctgaggcccagaagctgggcaagcccagcgcccacgccagccagagcttctgtgagagcagcagcgagacccccttccacttcaccctgcccaaggagggggacatcatcccccccctgactggagccaccccacccctcatcggccacctgaagctggagcccaagaggcacagcacccccatcggcatcagcaactacccagagagcaccatcgccaccagtgatgtgatgtctgagagcatggtggagacccatgaccccatcctgggcagcggcaagggggacagcggggccgccccagatgtggatgacaagctgtgcctgaggatgaagctggtgtccccagagacagaggccagcgaggagagcctgcagttcaacctggagaagccagccaccggggagaggaagaatggcagcacagctgtggccgagagcgtggccagcccccagaagaccatgtctgtgctgagctgcatctgtgaggcccggcaggagaatgaggcccggagtgaagatcctcccaccacccccatccggggcaacctgctgcacttccccagcagccagggcgaggaggagaaggagaagctggagggggaccacaccatccggcagagccagcagcccatgaagcccatcagccctgtgaaggaccctgtgtccccagccagccagaagatggtgatccagggccccagcagcccccagggcgaggccatggtgacagatgtgctggaggaccagaaggagggccgcagcaccaacaaggagaaccccagcaaggccctgattgaaagacccagccagaacaacatcggcatccagaccatggagtgcagcctgcgggtgcctgagaccgtgtctgctgccacccagaccatcaagaatgtgtgtgagcagggcaccagcacagtggaccagaactttgggaagcaggatgccaccgtgcagacagagcggggcagcggggagaagcctgtgtctgcccctggagatgacacagagagcctgcacagccagggcgaggaggagtttgacatgccccagcccccccacggccacgtgctgcaccgccacatgaggaccatccgggaggtgaggaccctggtgaccagggtcatcacagatgtgtactacgtggatggaacagaggtggagaggaaggtgacagaggagacagaggagcccatcgtggagtgccaggagtgtgaaacagaggtgagccccagccagacaggaggcagcagcggggacctgggggacatcagcagcttcagcagcaaggccagcagcctgcacaggaccagcagcggcaccagcctgagcgccatgcacagcagcggcagcagcggcaagggggccggccccctgcggggcaagaccagcggcacagagcctgctgactttgccctgcccagcagccggggcggccctgggaagctgagccccaggaaaggagtgtcccagacaggcacccctgtgtgtgaagaagatggagatgctggcctgggcatccggcagggcggcaaggcccctgtgaccccccggggccggggccggcggggccggccccccagcaggaccaccggcacccgggagacagctgtgcccggccccctgggcatcgaggacatcagccccaacctgagcccagatgacaagagcttcagccgggtggtgccccgggtgcctgacagcaccaggagaacagatgtgggcgctggggccctgcggcggagtgacagccctgagatccccttccaggccgctgctggccccagtgatggcctggatgccagcagccctggcaacagctttgtgggcctgcgggtggtggccaagtggagcagcaatggctacttctacagcggcaagatcaccagagatgtgggcgctgggaagtacaagctgctgtttgatgatggctatgaatgtgatgtgctgggcaaggacatcctgctgtgtgaccccatccccctggacacagaggtgacagccctgtctgaagatgagtacttctctgctggggtggtgaagggccacaggaaggagagcggggagctgtactacagcattgagaaggagggccagaggaagtggtacaagaggatggctgtgatcctgagcctggagcagggcaaccggctgcgggagcagtatggcctgggcccctatgaagctgtgacccccctgaccaaggctgctgacatcagcctggacaacctggtggagggcaagaggaagagaagaagcaatgtgagcagccctgccacccccacagccagcagcagcagcagcaccacccccaccaggaagatcacagagagcccccgggcctccatgggcgtgctgagcggcaagaggaagctgatcaccagcgaggaggagaggagccctgccaagaggggcaggaagagcgccaccgtgaagccaggagctgtgggcgctggggagtttgtgagcccctgtgagagcggggacaacacaggagagcccagcgccctggaggagcagaggggccccctgcccctgaacaagaccctcttcctgggctacgccttcctgctgaccatggccaccaccagtgacaagctggccagccgcagcaagctgcctgatggccccaccggcagcagcgaggaggaggaggagttcctggagatcccccccttcaacaagcagtacacagagagccagctgcgggccggggccggctacatcctggaggacttcaatgaggcccagtgcaacacagcctaccagtgcctgctgattgctgaccagcactgcaggaccaggaagtacttcctgtgcctggccagcggcatcccctgtgtgagccacgtgtgggtgcatgacagctgccacgccaaccagctgcagaactacagaaactacctgctgcctgctggctacagcctggaggagcagaggatcctggactggcagccccgggagaaccccttccagaacctgaaggtgctgctggtgtctgaccagcagcagaacttcctggagctgtggagcgagatcctgatgactggaggagctgcctctgtgaagcagcaccacagcagcgcccacaacaaggacatcgccctgggcgtgtttgatgtggtggtgacagaccccagctgcccagcctctgtgctgaagtgtgccgaggccctgcagctgcctgtggtgtcccaggagtgggtgatccagtgcctgattgtgggggagagaattggcttcaagcagcaccccaagtacaagcatgactatgtgagccactag

SEQ ID NO: 22357 - DNA, 5784 bp, synthetic construct
  misc_feature 1..5784: note = Description of Artificial Sequence: Synthetic coding sequence
  source 1..5784: mol_type = other DNA
atgcctggagagcagatggaccccaccggcagccagctggacagcgacttcagccagcaggacaccccctgcctgatcatcgaggacagccagcctgagagccaggtgctggaggatgattctggcagccacttctccatgctgagccgccacctgcccaacctgcagacccacaaggagaaccctgtgctggatgtggtgagcaaccctgagcagacagctggggaggagagaggagatggcaacagcggcttcaatgagcacctgaaggagaacaaggtggccgaccctgtggacagcagcaacctggacacctgtggcagcatcagccaggtgattgagcagctgccccagcccaacagaaccagctctgtgctgggcatgtctgtggagagcgccccagctgtggaggaggagaagggggaggagctggagcagaaggagaaggagaaggaggaggacaccagcggcaacaccacccacagcctgggcgctgaggacacagccagcagccagctgggctttggagtgctggagctgagccagagccaggatgtggaggagaacacagtgccctatgaggtggacaaggagcagctgcagagcgtgaccaccaacagcggctacacccggctgagtgatgtggatgccaacacagccatcaagcatgaggagcagagcaatgaagacatccccatcgccgagcagagcagcaaggacatccctgtgacagcccagcccagcaaggatgtgcacgtggtgaaggagcagaaccccccaccagcccggtctgaggacatgcccttcagccccaaggcctctgtggccgccatggaggccaaggagcagctgagcgcccaggagctgatggagagcggcctgcagatccagaagagccctgagcctgaggtgctgagcacccaggaggacctgtttgaccagagcaacaagacagtgtccagtgatggctgcagcacccccagccgggaggagggcggctgcagcctggccagcaccccagccaccaccctgcacctgctgcagctgagcggccagaggagcctggtgcaggacagcctgagcaccaacagcagtgacctggtggcccccagcccagatgccttccgcagcacccccttcatcgtgcccagcagccccacagagcaggagggccggcaggacaagcccatggacacctctgtgctgtctgaggagggcggggagcccttccagaagaagctgcagagcggggagcctgtggagctggagaacccccccctgctgcctgagagcacagtgagcccccaggccagcacccccatcagccagagcacccctgtgtttcctcctggcagcctgcccatccccagccagccccagttcagccatgacatcttcatccccagccccagcctggaggagcagagcaatgatggcaagaaggatggagacatgcacagcagcagcctgactgtggagtgcagcaagaccagcgagattgagcccaagaacagccctgaggacctgggcctgagcctgaccggggacagctgcaagctgatgctgagcaccagcgagtacagccagagccccaagatggagagcctgagcagccacagaattgatgaagatggagagaacacccagatcgaggacacagagcccatgagccctgtgctgaacagcaagtttgtgcctgcagaaaatgacagcatcctgatgaacccagcccaggatggagaggtgcagctgagccagaatgatgacaagaccaagggagatgacacagacaccagagatgacatcagcatcctggccaccggctgcaagggccgggaggagaccgtggccgaggatgtgtgcatcgacctgacctgtgacagcggcagccaggccgtgcccagccctgccaccaggtctgaggccctgagctctgtgctggaccaggaggaggccatggagatcaaggagcaccaccctgaggagggcagcagcggcagcgaggtggaggagatccctgagaccccctgtgagagccagggcgaggagctgaaggaggagaacatggagagcgtgcccctgcacctgagcctgacagagacccagagccagggcctgtgcctgcagaaggagatgcccaagaaggagtgcagcgaggccatggaggtggagaccagcgtcatcagcattgacagcccccagaagctggccatcctggaccaggagctggagcacaaggagcaggaggcctgggaggaggccaccagcgaggacagctctgtggtgattgtggatgtgaaggagcccagcccccgggtggatgtgtcctgtgagcccctggagggcgtggagaagtgcagcgacagccagagctgggaggacatcgcccctgagattgagccctgtgccgagaaccggctggacaccaaggaggagaagtctgtggagtatgaaggagacctgaagtctggaacagctgagacagagcctgtggagcaggacagcagccagcccagcctgcccctggtgcgggcagatgaccccctgcggctggaccaggagctgcagcagccccagacccaggagaagaccagcaacagcctgacagaggacagcaagatggccaatgccaagcagctgagcagtgatgctgaggcccagaagctgggcaagcccagcgcccacgccagccagagcttctgtgagagcagcagcgagacccccttccacttcaccctgcccaaggagggggacatcatcccccccctgaccggggccaccccacccctgattggccacctgaagctggagcccaagaggcacagcacccccatcggcatcagcaactacccagagagcaccatcgccaccagtgatgtgatgtctgagagcatggtggagacccatgaccccatcctgggcagcgggaaaggagacagcggggccgccccagatgtggatgacaagctgtgcctgaggatgaagctggtgtccccagagacagaggccagcgaggagagcctgcagttcaacctggagaagccagccactggagagaggaagaatggcagcacagctgtggccgagagcgtggccagcccccagaagaccatgtctgtgctgagctgcatctgtgaggcccggcaggagaatgaggcccggtctgaggacccccccaccacccccatccggggcaacctgctgcacttccccagcagccagggcgaggaggagaaggagaagctggagggggaccacaccatccggcagagccagcagcccatgaagcccatcagccctgtgaaggaccctgtgtccccagccagccagaagatggtgatccagggccccagcagcccccagggcgaggccatggtgacagatgtgctggaggaccagaaggagggccgcagcaccaacaaggagaaccccagcaaggccctgattgagcggcccagccagaacaacatcggcatccagaccatggagtgcagcctgcgggtgcctgagaccgtgtctgctgccacccagaccatcaagaatgtgtgtgagcagggcaccagcacagtggaccagaactttgggaagcaggatgccaccgtgcagacagagcggggcagcggggagaagcctgtgtctgcccctggagatgacacagagagcctgcacagccagggcgaggaggagtttgacatgccccagccccctcatggccacgtgctgcaccgccacatgaggaccatccgggaggtgaggaccctggtgaccagggtcatcacagatgtgtactacgtggatggaacagaggtggagaggaaggtgacagaggagacagaggagcccatcgtggagtgccaggagtgtgaaacagaggtgagccccagccagacaggaggcagcagcggggacctgggggacatcagcagcttcagcagcaaggccagcagcctgcacaggaccagcagcggcaccagcctgagcgccatgcacagcagcggcagcagtggaaaaggagctggccccctgcggggcaagaccagcggcacagagcctgctgactttgccctgcccagcagcagaggaggccctgggaagctgcgggagacagctgtgcccggccccctgggcatcgaggacatcagccccaacctgagcccagatgacaagagcttcagccgggtggtgccccgggtgcctgacagcaccaggagaacagatgtgggcgctggggccctgcggcggagtgacagccctgagatccccttccaggccgccgccggccccagtgatggcctggatgccagcagccctggcaacagctttgtgggcctgcgggtggtggccaagtggagcagcaatggctacttctacagcggcaagatcaccagagatgtgggcgccggcaagtacaagctgctgtttgatgatggctatgaatgtgatgtgctgggcaaggacatcctgctgtgtgaccccatccccctggacacagaggtgacagccctgtctgaagatgagtacttctctgctggggtggtgaagggccacaggaaggagagcggggagctgtactacagcattgagaaggagggccagaggaagtggtacaagaggatggccgtcatcctgagcctggagcagggcaaccggctgcgggagcagtatggcctgggcccctatgaggccgtgacccccctgaccaaggctgctgacatcagcctggacaacctggtggagggcaagaggaagaggaggagcaatgtgagcagccctgccacccccacagccagcagcagcagcagcaccacccccaccaggaagatcacagagagcccccgggcctccatgggcgtgctgagcggcaagaggaagctgatcaccagcgaggaggagaggagccctgccaagaggggcaggaagagcgccaccgtgaagccaggagctgtgggcgctggggagtttgtgagcccctgtgagagcggggacaacacaggagagcccagcgccctggaggagcagaggggccccctgcccctgaacaagaccctcttcctgggctacgccttcctgctgaccatggccaccaccagtgacaagctggccagccgcagcaagctgcctgatggccccaccggcagcagcgaggaggaggaggagttcctggagatcccccccttcaacaagcagtacacagagagccagctgcgggccggggccggctacatcctggaggacttcaatgaggcccagtgcaacacagcctaccagtgcctgctgattgctgaccagcactgcaggaccaggaagtacttcctgtgcctggccagcggcatcccctgtgtgagccacgtgtgggtgcatgacagctgccacgccaaccagctgcagaactacagaaactacctgctgcctgctggctacagcctggaggagcagaggatcctggactggcagccccgggagaaccccttccagaacctgaaggtgctgctggtgtctgaccagcagcagaacttcctggagctgtggagcgagatcctgatgactggaggagctgcctctgtgaagcagcaccacagcagcgcccacaacaaggacatcgccctgggcgtgtttgatgtggtggtgacagaccccagctgcccagcctctgtgctgaagtgtgccgaggccctgcagctgcctgtggtgtcccaggagtgggtgatccagtgcctgattgtgggggagcgcatcggcttcaagcagcaccccaagtacaagcatgactatgtgagccactag

SEQ ID NO: 22358 - DNA, 5934 bp, synthetic construct
  misc_feature 1..5934: note = Description of Artificial Sequence: Synthetic coding sequence
  source 1..5934: mol_type = other DNA
atgcctggagagcagatggaccccaccggcagccagctggacagcgacttcagccagcaggacaccccctgcctgatcatcgaggacagccagcctgagagccaggtgctggaggatgattctggcagccacttctccatgctgagccgccacctgcccaacctgcagacccacaaggagaaccctgtgctggatgtggtgagcaaccctgagcagacagctggggaggagagaggagatggcaacagcggcttcaatgagcacctgaaggagaacaaggtggccgaccctgtggacagcagcaacctggacacctgtggcagcatcagccaggtgattgagcagctgccccagcccaacagaaccagctctgtgctgggcatgtctgtggagagcgccccagctgtggaggaggagaagggggaggagctggagcagaaggagaaggagaaggaggaggacaccagcggcaacaccacccacagcctgggcgctgaggacacagccagcagccagctgggctttggagtgctggagctgagccagagccaggatgtggaggagaacacagtgccctatgaggtggacaaggagcagctgcagagcgtgaccaccaacagcggctacacccggctgagtgatgtggatgccaacacagccatcaagcatgaggagcagagcaatgaagacatccccatcgccgagcagagcagcaaggacatccctgtgacagcccagcccagcaaggatgtgcacgtggtgaaggagcagaaccccccaccagcccggtctgaggacatgcccttcagccccaaggcctctgtggccgccatggaggccaaggagcagctgagcgcccaggagctgatggagagcggcctgcagatccagaagagccctgagcctgaggtgctgagcacccaggaggacctgtttgaccagagcaacaagacagtgtccagtgatggctgcagcacccccagccgggaggagggcggctgcagcctggccagcaccccagccaccaccctgcacctgctgcagctgagcggccagaggagcctggtgcaggacagcctgagcaccaacagcagtgacctggtggcccccagcccagatgccttccgcagcacccccttcatcgtgcccagcagccccacagagcaggagggccggcaggacaagcccatggacacctctgtgctgtctgaggagggcggggagcccttccagaagaagctgcagagcggggagcctgtggagctggagaacccccccctgctgcctgagagcacagtgagcccccaggccagcacccccatcagccagagcacccctgtgtttcctcctggcagcctgcccatccccagccagccccagttcagccatgacatcttcatccccagccccagcctggaggagcagagcaatgatggcaagaaggatggagacatgcacagcagcagcctgactgtggagtgcagcaagaccagcgagattgagcccaagaacagccctgaggacctgggcctgagcctgaccggggacagctgcaagctgatgctgagcaccagcgagtacagccagagccccaagatggagagcctgagcagccacagaattgatgaagatggagagaacacccagatcgaggacacagagcccatgagccctgtgctgaacagcaagtttgtgcctgcagaaaatgacagcatcctgatgaacccagcccaggatggagaggtgcagctgagccagaatgatgacaagaccaagggagatgacacagacaccagagatgacatcagcatcctggccaccggctgcaagggccgggaggagaccgtggccgaggatgtgtgcatcgacctgacctgtgacagcggcagccaggccgtgcccagccctgccaccaggtctgaggccctgagctctgtgctggaccaggaggaggccatggagatcaaggagcaccaccctgaggagggcagcagcggcagcgaggtggaggagatccctgagaccccctgtgagagccagggcgaggagctgaaggaggagaacatggagagcgtgcccctgcacctgagcctgacagagacccagagccagggcctgtgcctgcagaaggagatgcccaagaaggagtgcagcgaggccatggaggtggagaccagcgtcatcagcattgacagcccccagaagctggccatcctggaccaggagctggagcacaaggagcaggaggcctgggaggaggccaccagcgaggacagctctgtggtgattgtggatgtgaaggagcccagcccccgggtggatgtgtcctgtgagcccctggagggcgtggagaagtgcagcgacagccagagctgggaggacatcgcccctgagattgagccctgtgccgagaaccggctggacaccaaggaggagaagtctgtggagtatgaaggagacctgaagtctggaacagctgagacagagcctgtggagcaggacagcagccagcccagcctgcccctggtgcgggcagatgaccccctgcggctggaccaggagctgcagcagccccagacccaggagaagaccagcaacagcctgacagaggacagcaagatggccaatgccaagcagctgagcagtgatgctgaggcccagaagctgggcaagcccagcgcccacgccagccagagcttctgtgagagcagcagcgagacccccttccacttcaccctgcccaaggagggggacatcatcccccccctgaccggggccaccccacccctgattggccacctgaagctggagcccaagaggcacagcacccccatcggcatcagcaactacccagagagcaccatcgccaccagtgatgtgatgtctgagagcatggtggagacccatgaccccatcctgggcagcgggaaaggagacagcggggccgccccagatgtggatgacaagctgtgcctgaggatgaagctggtgtccccagagacagaggccagcgaggagagcctgcagttcaacctggagaagccagccactggagagaggaagaatggcagcacagctgtggccgagagcgtggccagcccccagaagaccatgtctgtgctgagctgcatctgtgaggcccggcaggagaatgaggcccggtctgaggacccccccaccacccccatccggggcaacctgctgcacttccccagcagccagggcgaggaggagaaggagaagctggagggggaccacaccatccggcagagccagcagcccatgaagcccatcagccctgtgaaggaccctgtgtccccagccagccagaagatggtgatccagggccccagcagcccccagggcgaggccatggtgacagatgtgctggaggaccagaaggagggccgcagcaccaacaaggagaaccccagcaaggccctgattgagcggcccagccagaacaacatcggcatccagaccatggagtgcagcctgcgggtgcctgagaccgtgtctgctgccacccagaccatcaagaatgtgtgtgagcagggcaccagcacagtggaccagaactttgggaagcaggatgccaccgtgcagacagagcggggcagcggggagaagcctgtgtctgcccctggagatgacacagagagcctgcacagccagggcgaggaggagtttgacatgccccagccccctcatggccacgtgctgcaccgccacatgaggaccatccgggaggtgaggaccctggtgaccagggtcatcacagatgtgtactacgtggatggaacagaggtggagaggaaggtgacagaggagacagaggagcccatcgtggagtgccaggagtgtgaaacagaggtgagccccagccagacaggaggcagcagcggggacctgggggacatcagcagcttcagcagcaaggccagcagcctgcacaggaccagcagcggcaccagcctgagcgccatgcacagcagcggcagcagtggaaaaggagctggccccctgcggggcaagaccagcggcacagagcctgctgactttgccctgcccagcagcagaggaggccctgggaagctgagccccaggaagggcgtgtcccagacaggcacccctgtgtgtgaggaggatggagatgctggcctgggcatccggcagggcggcaaggcccctgtgaccccccggggccggggcagaagaggccggccccccagcaggaccaccggcacccgggagacagctgtgcccggccccctgggcatcgaggacatcagccccaacctgagcccagatgacaagagcttcagccgggtggtgccccgggtgcctgacagcaccaggagaacagatgtgggcgctggggccctgcggcggagtgacagccctgagatccccttccaggccgccgccggccccagtgatggcctggatgccagcagccctggcaacagctttgtgggcctgcgggtggtggccaagtggagcagcaatggctacttctacagcggcaagatcaccagagatgtgggcgccggcaagtacaagctgctgtttgatgatggctatgaatgtgatgtgctgggcaaggacatcctgctgtgtgaccccatccccctggacacagaggtgacagccctgtctgaagatgagtacttctctgctggggtggtgaagggccacaggaaggagagcggggagctgtactacagcattgagaaggagggccagaggaagtggtacaagaggatggccgtcatcctgagcctggagcagggcaaccggctgcgggagcagtatggcctgggcccctatgaggccgtgacccccctgaccaaggctgctgacatcagcctggacaacctggtggagggcaagaggaagaggaggagcaatgtgagcagccctgccacccccacagccagcagcagcagcagcaccacccccaccaggaagatcacagagagcccccgggcctccatgggcgtgctgagcggcaagaggaagctgatcaccagcgaggaggagaggagccctgccaagaggggcaggaagagcgccaccgtgaagccaggagctgtgggcgctggggagtttgtgagcccctgtgagagcggggacaacacaggagagcccagcgccctggaggagcagaggggccccctgcccctgaacaagaccctcttcctgggctacgccttcctgctgaccatggccaccaccagtgacaagctggccagccgcagcaagctgcctgatggccccaccggcagcagcgaggaggaggaggagttcctggagatcccccccttcaacaagcagtacacagagagccagctgcgggccggggccggctacatcctggaggacttcaatgaggcccagtgcaacacagcctaccagtgcctgctgattgctgaccagcactgcaggaccaggaagtacttcctgtgcctggccagcggcatcccctgtgtgagccacgtgtgggtgcatgacagctgccacgccaaccagctgcagaactacagaaactacctgctgcctgctggctacagcctggaggagcagaggatcctggactggcagccccgggagaaccccttccagaacctgaaggtgctgctggtgtctgaccagcagcagaacttcctggagctgtggagcgagatcctgatgactggaggagctgcctctgtgaagcagcaccacagcagcgcccacaacaaggacatcgccctgggcgtgtttgatgtggtggtgacagaccccagctgcccagcctctgtgctgaagtgtgccgaggccctgcagctgcctgtggtgtcccaggagtgggtgatccagtgcctgattgtgggggagcgcatcggcttcaagcagcaccccaagtacaagcatgactatgtgagccactag

SEQ ID NO: 22359 - DNA, 5928 bp, synthetic construct
  misc_feature 1..5928: note = Description of Artificial Sequence: Synthetic coding sequence
  source 1..5928: mol_type = other DNA
atgcctggagagcagatggaccccaccggcagccagctggacagcgacttcagccagcaggacaccccctgcctgatcatcgaggacagccagcctgagagccaggtgctggaggatgattctggcagccacttctccatgctgagccgccacctgcccaacctgcagacccacaaggagaaccctgtgctggatgtggtgagcaaccctgagcagacagctggggaggagagaggagatggcaacagcggcttcaatgagcacctgaaggagaacaaggtggccgaccctgtggacagcagcaacctggacacctgtggcagcatcagccaggtgattgagcagctgccccagcccaacagaaccagctctgtgctgggcatgtctgtggagagcgccccagctgtggaggaggagaagggggaggagctggagcagaaggagaaggagaaggaggaggacaccagcggcaacaccacccacagcctgggcgctgaggacacagccagcagccagctgggctttggagtgctggagctgagccagagccaggatgtggaggagaacacagtgccctatgaggtggacaaggagcagctgcagagcgtgaccaccaacagcggctacacccggctgagtgatgtggatgccaacacagccatcaagcatgaggagcagagcaatgaagacatccccatcgccgagcagagcagcaaggacatccctgtgacagcccagcccagcaaggatgtgcacgtggtgaaggagcagaaccccccaccagcccggtctgaggacatgcccttcagccccaaggcctctgtggccgccatggaggccaaggagcagctgagcgcccaggagctgatggagagcggcctgcagatccagaagagccctgagcctgaggtgctgagcacccaggaggacctgtttgaccagagcaacaagacagtgtccagtgatggctgcagcacccccagccgggaggagggcggctgcagcctggccagcaccccagccaccaccctgcacctgctgcagctgagcggccagaggagcctggtgcaggacagcctgagcaccaacagcagtgacctggtggcccccagcccagatgccttccgcagcacccccttcatcgtgcccagcagccccacagagcaggagggccggcaggacaagcccatggacacctctgtgctgtctgaggagggcggggagcccttccagaagaagctgcagagcggggagcctgtggagctggagaacccccccctgctgcctgagagcacagtgagcccccaggccagcacccccatcagccagagcacccctgtgtttcctcctggcagcctgcccatccccagccagccccagttcagccatgacatcttcatccccagccccagcctggaggagcagagcaatgatggcaagaaggatggagacatgcacagcagcagcctgactgtggagtgcagcaagaccagcgagattgagcccaagaacagccctgaggacctgggcctgagcctgaccggggacagctgcaagctgatgctgagcaccagcgagtacagccagagccccaagatggagagcctgagcagccacagaattgatgaagatggagagaacacccagatcgaggacacagagcccatgagccctgtgctgaacagcaagtttgtgcctgcagaaaatgacagcatcctgatgaacccagcccaggatggagaggtgcagctgagccagaatgatgacaagaccaagggagatgacacagacaccagagatgacatcagcatcctggccaccggctgcaagggccgggaggagaccgtggccgaggatgtgtgcatcgacctgacctgtgacagcggcagccaggccgtgcccagccctgccaccaggtctgaggccctgagctctgtgctggaccaggaggaggccatggagatcaaggagcaccaccctgaggagggcagcagcggcagcgaggtggaggagatccctgagaccccctgtgagagccagggcgaggagctgaaggaggagaacatggagagcgtgcccctgcacctgagcctgacagagacccagagccagggcctgtgcctgcagaaggagatgcccaagaaggagtgcagcgaggccatggaggtggagaccagcgtcatcagcattgacagcccccagaagctggccatcctggaccaggagctggagcacaaggagcaggaggcctgggaggaggccaccagcgaggacagctctgtggtgattgtggatgtgaaggagcccagcccccgggtggatgtgtcctgtgagcccctggagggcgtggagaagtgcagcgacagccagagctgggaggacatcgcccctgagattgagccctgtgccgagaaccggctggacaccaaggaggagaagtctgtggagtatgaaggagacctgaagtctggaacagctgagacagagcctgtggagcaggacagcagccagcccagcctgcccctggtgcgggcagatgaccccctgcggctggaccaggagctgcagcagccccagacccaggagaagaccagcaacagcctgacagaggacagcaagatggccaatgccaagcagctgagcagtgatgctgaggcccagaagctgggcaagcccagcgcccacgccagccagagcttctgtgagagcagcagcgagacccccttccacttcaccctgcccaaggagggggacatcatcccccccctgaccggggccaccccacccctgattggccacctgaagctggagcccaagaggcacagcacccccatcggcatcagcaactacccagagagcaccatcgccaccagtgatgtgatgtctgagagcatggtggagacccatgaccccatcctgggcagcgggaaaggagacagcggggccgccccagatgtggatgacaagctgtgcctgaggatgaagctggtgtccccagagacagaggccagcgaggagagcctgcagttcaacctggagaagccagccactggagagaggaagaatggcagcacagctgtggccgagagcgtggccagcccccagaagaccatgtctgtgctgagctgcatctgtgaggcccggcaggagaatgaggcccggtctgaggacccccccaccacccccatccggggcaacctgctgcacttccccagcagccagggcgaggaggagaaggagaagctggagggggaccacaccatccggcagagccagcagcccatgaagcccatcagccctgtgaaggaccctgtgtccccagccagccagaagatggtgatccagggccccagcagcccccagggcgaggccatggtgacagatgtgctggaggaccagaaggagggccgcagcaccaacaaggagaaccccagcaaggccctgattgagcggcccagccagaacaacatcggcatccagaccatggagtgcagcctgcgggtgcctgagaccgtgtctgctgccacccagaccatcaagaatgtgtgtgagcagggcaccagcacagtggaccagaactttgggaagcaggatgccaccgtgcagacagagcggggcagcggggagaagcctgtgtctgcccctggagatgacacagagagcctgcacagccagggcgaggaggagtttgacatgccccagccccctcatggccacgtgctgcaccgccacatgaggaccatccgggaggtgaggaccctggtgaccagggtcatcacagatgtgtactacgtggatggaacagaggtggagaggaaggtgacagaggagacagaggagcccatcgtggagtgccaggagtgtgaaacagaggtgagccccagccagacaggaggcagcagcggggacctgggggacatcagcagcttcagcagcaaggccagcagcctgcacaggaccagcagcggcaccagcctgagcgccatgcacagcagcggcagcagtggaaaaggagctggccccctgcggggcaagaccagcggcacagagcctgctgactttgccctgcccagcagcagaggaggccctgggaagctgagccccaggaagggcgtgtcccagacaggcacccctgtgtgtgaggaggatggagatgctggcctgggcatccggcagggcggcaaggcccctgtgaccccccggggccggggcagaagaggccggccccccagcaggaccaccggcacccgggagacagctgtgcccggccccctgggcatcgaggacatcagccccaacctgagcccagatgacaagagcttcagccgggtggtgccccgggtgcctgacagcaccaggagaacagatgtgggcgctggggccctgcggcggagtgacagccctgagatccccttccaggccgccgccggccccagtgatggcctggatgccagcagccctggcaacagctttgtgggcctgcgggtggtggccaagtggagcagcaatggctacttctacagcggcaagatcaccagagatgtgggcgccggcaagtacaagctgctgtttgatgatggctatgaatgtgatgtgctgggcaaggacatcctgctgtgtgaccccatccccctggacacagaggtgacagccctgtctgaagatgagtacttctctgctggggtggtgaagggccacaggaaggagagcggggagctgtactacagcattgagaaggagggccagaggaagtggtacaagaggatggccgtcatcctgagcctggagcagggcaaccggctgcgggagcagtatggcctgggcccctatgaggccgtgacccccctgaccaaggctgctgacatcagcctggacaacctggtggagggcaagaggaagaggaggagcaatgtgagcagccctgccacccccacagccagcagcagcagcagcaccacccccaccaggaagatcacagagagcccccgggcctccatgggcgtgctgagcggcaagaggaagctgatcaccagcgaggaggagaggagccctgccaagaggggcaggaagagcgccaccgtgaagcctgtgggcgctggggagtttgtgagcccctgtgagagcggggacaacacaggagagcccagcgccctggaggagcagaggggccccctgcccctgaacaagaccctcttcctgggctacgccttcctgctgaccatggccaccaccagtgacaagctggccagccgcagcaagctgcctgatggccccaccggcagcagcgaggaggaggaggagttcctggagatcccccccttcaacaagcagtacacagagagccagctgcgggccggggccggctacatcctggaggacttcaatgaggcccagtgcaacacagcctaccagtgcctgctgattgctgaccagcactgcaggaccaggaagtacttcctgtgcctggccagcggcatcccctgtgtgagccacgtgtgggtgcatgacagctgccacgccaaccagctgcagaactacagaaactacctgctgcctgctggctacagcctggaggagcagaggatcctggactggcagccccgggagaaccccttccagaacctgaaggtgctgctggtgtctgaccagcagcagaacttcctggagctgtggagcgagatcctgatgactggaggagctgcctctgtgaagcagcaccacagcagcgcccacaacaaggacatcgccctgggcgtgtttgatgtggtggtgacagaccccagctgcccagcctctgtgctgaagtgtgccgaggccctgcagctgcctgtggtgtcccaggagtgggtgatccagtgcctgattgtgggggagcgcatcggcttcaagcagcaccccaagtacaagcatgactatgtgagccactag

SEQ ID NO: 22360 - DNA, 1623 bp, synthetic construct
  misc_feature 1..1623: note = Description of Artificial Sequence: Synthetic coding sequence
  source 1..1623: mol_type = other DNA
atggcccagagcacagccaccagcccagatggcggcaccacctttgagcacctgtggagcagcctggagccagacagcacctactttgacctgccccagagcagccggggcaacaatgaggtggtgggcggcacagacagctccatggatgtgttccacctggagggcatgaccacctctgtgatggcccagttcaacctgctgagcagcaccatggaccagatgagcagcagagctgccagcgccagcccctacaccccagagcacgccgcctctgtgcccacccacagcccctatgcccagcccagcagcacctttgacaccatgagccctgcccctgtgatccccagcaacacagactacccaggcccccaccactttgaggtgaccttccagcagagcagcacagccaagagcgccacctggacctacagccccctgctgaagaagctgtactgccagatcgccaagacctgccccatccagatcaaggtgtccaccccacctcctcctggaacagccatccgggccatgcctgtgtacaagaaggccgagcacgtgacagatgtggtgaagcgctgccccaaccacgagctgggccgggacttcaatgaaggccagagcgccccagccagccacctgatccgggtggagggcaacaacctgagccagtatgtggatgatcctgtgacaggccggcagagcgtggtggtgccctatgagcccccccaggtgggcacagagttcaccaccatcctgtacaacttcatgtgcaacagcagctgtgtgggcggcatgaacagaagacccatcctgatcatcatcaccctggagatgagagatggccaggtgctgggcagaagaagctttgagggccgcatctgtgcctgccccggccgggacaggaaggcagatgaggaccactaccgggagcagcaggccctgaatgaatcttctgccaagaatggagctgccagcaagagggccttcaagcagagccccccagctgtgcctgccctgggcgctggggtgaagaagagaagacatggagatgaggacacctactacctgcaggtgcggggcagagaaaattttgagatcctgatgaagctgaaggagagcctggagctgatggagctggtgccccagcccctggtggacagctaccggcagcagcagcagctgctgcagaggcccttcctgaccggcctgggctgccccaactgcatcgagtacttcaccagccagggcctgcagagcatctaccacctgcagaacctgaccatcgaggacctgggcgccctgaagatccctgagcagtacaggatgaccatctggaggggcctgcaggacctgaagcagggccatgactacagcacagcccagcagctgctgcggagcagcaatgctgccaccatcagcattggaggcagcggggagctgcagaggcagagggtgatggaggccgtgcacttccgggtgcgccacaccatcaccatccccaacagaggaggccctgggggcggcccagatgagtgggccgactttggatttgacctgcctgactgcaaggccaggaagcagcccatcaaggaggagttcacagaagctgagatccactag

SEQ ID NO: 22361 - DNA, 1500 bp, synthetic construct
  misc_feature 1..1500: note = Description of Artificial Sequence: Synthetic coding sequence
  source 1..1500: mol_type = other DNA
atggcccagagcacagccaccagcccagatggcggcaccacctttgagcacctgtggagcagcctggagccagacagcacctactttgacctgccccagagcagccggggcaacaatgaggtggtgggcggcacagacagctccatggatgtgttccacctggagggcatgaccacctctgtgatggcccagttcaacctgctgagcagcaccatggaccagatgagcagcagagctgccagcgccagcccctacaccccagagcacgccgcctctgtgcccacccacagcccctatgcccagcccagcagcacctttgacaccatgagccctgcccctgtgatccccagcaacacagactacccaggcccccaccactttgaggtgaccttccagcagagcagcacagccaagagcgccacctggacctacagccccctgctgaagaagctgtactgccagatcgccaagacctgccccatccagatcaaggtgtccaccccacctcctcctggaacagccatccgggccatgcctgtgtacaagaaggccgagcacgtgacagatgtggtgaagcgctgccccaaccacgagctgggccgggacttcaatgaaggccagagcgccccagccagccacctgatccgggtggagggcaacaacctgagccagtatgtggatgatcctgtgacaggccggcagagcgtggtggtgccctatgagcccccccaggtgggcacagagttcaccaccatcctgtacaacttcatgtgcaacagcagctgtgtgggcggcatgaacagaagacccatcctgatcatcatcaccctggagatgagagatggccaggtgctgggcagaagaagctttgagggccgcatctgtgcctgccccggccgggacaggaaggcagatgaggaccactaccgggagcagcaggccctgaatgaatcttctgccaagaatggagctgccagcaagagggccttcaagcagagccccccagctgtgcctgccctgggcgctggggtgaagaagagaagacatggagatgaggacacctactacctgcaggtgcggggcagagaaaattttgagatcctgatgaagctgaaggagagcctggagctgatggagctggtgccccagcccctggtggacagctaccggcagcagcagcagctgctgcagaggcccagccacctgcagccccccagctatggccctgtgctgagccccatgaacaaggtgcacggcggcatgaacaagctgcccagcgtgaaccagctggtgggccagcccccaccccacagcagcgctgccacccccaacctgggccctgtgggccctggcatgctgaacaaccacggccatgctgtgcctgccaatggagagatgagcagcagccacagcgcccagagcatggtgtctggcagccactgcaccccacctccaccctaccacgccgaccccagcctggtgaggacctggggcccctag

SEQ ID NO: 22362 - DNA, 1668 bp, synthetic construct
  misc_feature 1..1668: note = Description of Artificial Sequence: Synthetic coding sequence
  source 1..1668: mol_type = other DNA
atggcccagagcacagccaccagcccagatggcggcaccacctttgagcacctgtggagcagcctggagccagacagcacctactttgacctgccccagagcagccggggcaacaatgaggtggtgggcggcacagacagctccatggatgtgttccacctggagggcatgaccacctctgtgatggcccagttcaacctgctgagcagcaccatggaccagatgagcagcagagctgccagcgccagcccctacaccccagagcacgccgcctctgtgcccacccacagcccctatgcccagcccagcagcacctttgacaccatgagccctgcccctgtgatccccagcaacacagactacccaggcccccaccactttgaggtgaccttccagcagagcagcacagccaagagcgccacctggacctacagccccctgctgaagaagctgtactgccagatcgccaagacctgccccatccagatcaaggtgtccaccccacctcctcctggaacagccatccgggccatgcctgtgtacaagaaggccgagcacgtgacagatgtggtgaagcgctgccccaaccacgagctgggccgggacttcaatgaaggccagagcgccccagccagccacctgatccgggtggagggcaacaacctgagccagtatgtggatgatcctgtgacaggccggcagagcgtggtggtgccctatgagcccccccaggtgggcacagagttcaccaccatcctgtacaacttcatgtgcaacagcagctgtgtgggcggcatgaacagaagacccatcctgatcatcatcaccctggagatgagagatggccaggtgctgggcagaagaagctttgagggccgcatctgtgcctgccccggccgggacaggaaggcagatgaggaccactaccgggagcagcaggccctgaatgaatcttctgccaagaatggagctgccagcaagagggccttcaagcagagccccccagctgtgcctgccctgggcgctggggtgaagaagagaagacatggagatgaggacacctactacctgcaggtgcggggcagagaaaattttgagatcctgatgaagctgaaggagagcctggagctgatggagctggtgccccagcccctggtggacagctaccggcagcagcagcagctgctgcagaggcccccaagagatgcccagcagccctggcccaggtctgccagccagaggagagatgagcagcagccccagaggcctgtgcacggcctgggcgtgcccctgcacagcgccacccccctgccccggcggccccagccccggcaggacctgggcgccctgaagatccctgagcagtacaggatgaccatctggaggggcctgcaggacctgaagcagggccatgactacagcacagcccagcagctgctgcggagcagcaatgctgccaccatcagcatcggcggcagcggggagctgcagaggcagagggtgatggaggccgtgcacttccgggtgcgccacaccatcaccatccccaacagaggaggccctgggggcggcccagatgagtgggccgactttggatttgacctgcctgactgcaaggccaggaagcagcccatcaaggaggagttcacagaggccgagatccactag

SEQ ID NO: 22363 - DNA, 1281 bp, synthetic construct
  misc_feature 1..1281: note = Description of Artificial Sequence: Synthetic coding sequence
  source 1..1281: mol_type = other DNA
atgctgtatgtgggggaccctgcccggcacctggccacagcccagttcaacctgctgagcagcaccatggaccagatgagcagccgggccgccagcgccagcccctacaccccagagcacgccgcctctgtgcccacccacagcccctatgcccagcccagcagcacctttgacaccatgagccctgcccctgtgatccccagcaacacagactacccaggcccccaccactttgaggtgaccttccagcagagcagcacagccaagagcgccacctggacctacagccccctgctgaagaagctgtactgccagatcgccaagacctgccccatccagatcaaggtgtccaccccacctcctcctggaacagccatccgggccatgcctgtgtacaagaaggccgagcacgtgacagatgtggtgaagcgctgccccaaccacgagctgggccgggacttcaatgaaggccagagcgccccagccagccacctgatccgggtggagggcaacaacctgagccagtatgtggatgatcctgtgacaggccggcagagcgtggtggtgccctatgagcccccccaggtgggcacagagttcaccaccatcctgtacaacttcatgtgcaacagcagctgtgtgggcggcatgaacagaagacccatcctgatcatcatcaccctggagatgagagatggccaggtgctgggccgccgcagctttgagggccgcatctgtgcctgccccggccgggacaggaaggcagatgaggaccactaccgggagcagcaggccctgaatgaaagcagcgccaagaatggagctgccagcaagagggccttcaagcagagccccccagctgtgcctgccctgggcgccggcgtgaagaagagaagacatggagatgaggacacctactacctgcaggtgcggggccgggagaactttgagatcctgatgaagctgaaggagagcctggagctgatggagctggtgccccagcccctggtggacagctaccggcagcagcagcagctgctgcagaggcccccaagagatgcccagcagccctggcccaggtctgccagccagaggagagatgagcagcagccccagaggcctgtgcacggcctgggcgtgcccctgcacagcgccacccccctgccccggcggccccagccccggcagttcttcaacagaattggagtgtccaagctgcacagggtcttccacctgccccgggtgacagagcacctgcccccagctgagccagaccactag

SEQ ID NO: 22364 - DNA, 1353 bp, synthetic construct
  misc_feature 1..1353: note = Description of Artificial Sequence: Synthetic coding sequence
  source 1..1353: mol_type = other DNA
atgctgtatgtgggggaccctgcccggcacctggccacagcccagttcaacctgctgagcagcaccatggaccagatgagcagccgggccgccagcgccagcccctacaccccagagcacgccgcctctgtgcccacccacagcccctatgcccagcccagcagcacctttgacaccatgagccctgcccctgtgatccccagcaacacagactacccaggcccccaccactttgaggtgaccttccagcagagcagcacagccaagagcgccacctggacctacagccccctgctgaagaagctgtactgccagatcgccaagacctgccccatccagatcaaggtgtccaccccacctcctcctggaacagccatccgggccatgcctgtgtacaagaaggccgagcacgtgacagatgtggtgaagcgctgccccaaccacgagctgggccgggacttcaatgaaggccagagcgccccagccagccacctgatccgggtggagggcaacaacctgagccagtatgtggatgatcctgtgacaggccggcagagcgtggtggtgccctatgagcccccccaggtgggcacagagttcaccaccatcctgtacaacttcatgtgcaacagcagctgtgtgggcggcatgaacagaagacccatcctgatcatcatcaccctggagatgagagatggccaggtgctgggccgccgcagctttgagggccgcatctgtgcctgccccggccgggacaggaaggcagatgaggaccactaccgggagcagcaggccctgaatgaaagcagcgccaagaatggagctgccagcaagagggccttcaagcagagccccccagctgtgcctgccctgggcgccggcgtgaagaagagaagacatggagatgaggacacctactacctgcaggtgcggggccgggagaactttgagatcctgatgaagctgaaggagagcctggagctgatggagctggtgccccagcccctggtggacagctaccggcagcagcagcagctgctgcagaggcccagccacctgcagcccccatcctatggccctgtgctgagccccatgaacaaggtgcatggaggcatgaacaagctgcccagcgtgaaccagctggtgggccagcccccaccccacagcagcgctgccacccccaacctgggccctgtgggccctggcatgctgaacaaccacggccatgctgtgcctgccaacggggagatgagcagcagccacagcgcccagagcatggtgtctggcagccactgcaccccacctccaccctaccacgccgaccccagcctggtgaggacctggggcccctag

SEQ ID NO: 22365 - DNA, 1764 bp, synthetic construct
  misc_feature 1..1764: note = Description of Artificial Sequence: Synthetic coding sequence
  source 1..1764: mol_type = other DNA
atgctgtatgtgggggaccctgcccggcacctggccacagcccagttcaacctgctgagcagcaccatggaccagatgagcagccgggccgccagcgccagcccctacaccccagagcacgccgcctctgtgcccacccacagcccctatgcccagcccagcagcacctttgacaccatgagccctgcccctgtgatccccagcaacacagactacccaggcccccaccactttgaggtgaccttccagcagagcagcacagccaagagcgccacctggacctacagccccctgctgaagaagctgtactgccagatcgccaagacctgccccatccagatcaaggtgtccaccccacctcctcctggaacagccatccgggccatgcctgtgtacaagaaggccgagcacgtgacagatgtggtgaagcgctgccccaaccacgagctgggccgggacttcaatgaaggccagagcgccccagccagccacctgatccgggtggagggcaacaacctgagccagtatgtggatgatcctgtgacaggccggcagagcgtggtggtgccctatgagcccccccaggtgggcacagagttcaccaccatcctgtacaacttcatgtgcaacagcagctgtgtgggcggcatgaacagaagacccatcctgatcatcatcaccctggagatgagagatggccaggtgctgggccgccgcagctttgagggccgcatctgtgcctgccccggccgggacaggaaggcagatgaggaccactaccgggagcagcaggccctgaatgaaagcagcgccaagaatggagctgccagcaagagggccttcaagcagagccccccagctgtgcctgccctgggcgccggcgtgaagaagagaagacatggagatgaggacacctactacctgcaggtgcggggccgggagaactttgagatcctgatgaagctgaaggagagcctggagctgatggagctggtgccccagcccctggtggacagctaccggcagcagcagcagctgctgcagaggcccagccacctgcagcccccatcctatggccctgtgctgagccccatgaacaaggtgcatggaggcatgaacaagctgcccagcgtgaaccagctggtgggccagcccccaccccacagcagcgctgccacccccaacctgggccctgtgggccctggcatgctgaacaaccacggccatgctgtgcctgccaacggggagatgagcagcagccacagcgcccagagcatggtgtctggcagccactgcaccccacctccaccctaccacgccgaccccagcctggtgtccttcctgaccggcctgggctgccccaactgcatcgagtacttcaccagccagggcctgcagagcatctaccacctgcagaacctgaccatcgaggacctgggcgccctgaagatccctgagcagtacaggatgaccatctggaggggcctgcaggacctgaagcagggccatgactacagcacagcccagcagctgctgcggagcagcaatgctgccaccatcagcatcggcggcagcggggagctgcagaggcagagggtgatggaggccgtgcacttccgggtgcgccacaccatcaccatccccaacagaggaggccctgggggcggcccagatgagtgggccgactttggatttgacctgcctgactgcaaggccaggaagcagcccatcaaggaggagttcacagaggccgagatccactag

SEQ ID NO: 22366 - DNA, 1698 bp, synthetic construct
  misc_feature 1..1698: note = Description of Artificial Sequence: Synthetic coding sequence
  source 1..1698: mol_type = other DNA
atggaccagatgagcagccgggccgccagcgccagcccctacaccccagagcacgccgcctctgtgcccacccacagcccctatgcccagcccagcagcacctttgacaccatgagccctgcccctgtgatccccagcaacacagactacccaggcccccaccactttgaggtgaccttccagcagagcagcacagccaagagcgccacctggacctacagccccctgctgaagaagctgtactgccagatcgccaagacctgccccatccagatcaaggtgtccaccccacctcctcctggaacagccatccgggccatgcctgtgtacaagaaggccgagcacgtgacagatgtggtgaagcgctgccccaaccacgagctgggccgggacttcaatgaaggccagagcgccccagccagccacctgatccgggtggagggcaacaacctgagccagtatgtggatgatcctgtgacaggccggcagagcgtggtggtgccctatgagcccccccaggtgggcacagagttcaccaccatcctgtacaacttcatgtgcaacagcagctgtgtgggcggcatgaacagaagacccatcctgatcatcatcaccctggagatgagagatggccaggtgctgggccgccgcagctttgagggccgcatctgtgcctgccccggccgggacaggaaggcagatgaggaccactaccgggagcagcaggccctgaatgaaagcagcgccaagaatggagctgccagcaagagggccttcaagcagagccccccagctgtgcctgccctgggcgccggcgtgaagaagagaagacatggagatgaggacacctactacctgcaggtgcggggccgggagaactttgagatcctgatgaagctgaaggagagcctggagctgatggagctggtgccccagcccctggtggacagctaccggcagcagcagcagctgctgcagaggcccagccacctgcagcccccatcctatggccctgtgctgagccccatgaacaaggtgcatggaggcatgaacaagctgcccagcgtgaaccagctggtgggccagcccccaccccacagcagcgctgccacccccaacctgggccctgtgggccctggcatgctgaacaaccacggccatgctgtgcctgccaacggggagatgagcagcagccacagcgcccagagcatggtgtctggcagccactgcaccccacctccaccctaccacgccgaccccagcctggtgtccttcctgaccggcctgggctgccccaactgcatcgagtacttcaccagccagggcctgcagagcatctaccacctgcagaacctgaccatcgaggacctgggcgccctgaagatccctgagcagtacaggatgaccatctggaggggcctgcaggacctgaagcagggccatgactacagcacagcccagcagctgctgcggagcagcaatgctgccaccatcagcatcggcggcagcggggagctgcagaggcagagggtgatggaggccgtgcacttccgggtgcgccacaccatcaccatccccaacagaggaggccctgggggcggcccagatgagtgggccgactttggatttgacctgcctgactgcaaggccaggaagcagcccatcaaggaggagttcacagaggccgagatccactag

SEQ ID NO: 22367 - DNA, 1911 bp, synthetic construct
  misc_feature 1..1911: note = Description of Artificial Sequence: Synthetic coding sequence
  source 1..1911: mol_type = other DNA
atggcccagagcacagccaccagcccagatggcggcaccacctttgagcacctgtggagcagcctggagccagacagcacctactttgacctgccccagagcagccggggcaacaatgaggtggtgggcggcacagacagctccatggatgtgttccacctggagggcatgaccacctctgtgatggcccagttcaacctgctgagcagcaccatggaccagatgagcagcagagctgccagcgccagcccctacaccccagagcacgccgcctctgtgcccacccacagcccctatgcccagcccagcagcacctttgacaccatgagccctgcccctgtgatccccagcaacacagactacccaggcccccaccactttgaggtgaccttccagcagagcagcacagccaagagcgccacctggacctacagccccctgctgaagaagctgtactgccagatcgccaagacctgccccatccagatcaaggtgtccaccccacctcctcctggaacagccatccgggccatgcctgtgtacaagaaggccgagcacgtgacagatgtggtgaagcgctgccccaaccacgagctgggccgggacttcaatgaaggccagagcgccccagccagccacctgatccgggtggagggcaacaacctgagccagtatgtggatgatcctgtgacaggccggcagagcgtggtggtgccctatgagcccccccaggtgggcacagagttcaccaccatcctgtacaacttcatgtgcaacagcagctgtgtgggcggcatgaacagaagacccatcctgatcatcatcaccctggagatgagagatggccaggtgctgggcagaagaagctttgagggccgcatctgtgcctgccccggccgggacaggaaggcagatgaggaccactaccgggagcagcaggccctgaatgaatcttctgccaagaatggagctgccagcaagagggccttcaagcagagccccccagctgtgcctgccctgggcgctggggtgaagaagagaagacatggagatgaggacacctactacctgcaggtgcggggcagagaaaattttgagatcctgatgaagctgaaggagagcctggagctgatggagctggtgccccagcccctggtggacagctaccggcagcagcagcagctgctgcagaggcccagccacctgcagccccccagctatggccctgtgctgagccccatgaacaaggtgcacggcggcatgaacaagctgcccagcgtgaaccagctggtgggccagcccccaccccacagcagcgctgccacccccaacctgggccctgtgggccctggcatgctgaacaaccacggccatgctgtgcctgccaatggagagatgagcagcagccacagcgcccagagcatggtgtctggcagccactgcaccccacctccaccctaccacgccgaccccagcctggtgtccttcctgaccggcctgggctgccccaactgcatcgagtacttcaccagccagggcctgcagagcatctaccacctgcagaacctgaccatcgaggacctgggcgccctgaagatccctgagcagtacaggatgaccatctggaggggcctgcaggacctgaagcagggccatgactacagcacagcccagcagctgctgcggagcagcaatgctgccaccatcagcattggaggcagcggggagctgcagaggcagagggtgatggaggccgtgcacttccgggtgcgccacaccatcaccatccccaacagaggaggccctgggggcggcccagatgagtgggccgactttggatttgacctgcctgactgcaaggccaggaagcagcccatcaaggaggagttcacagaagctgagatccactag

SEQ ID NO: 22368 - DNA, 1053 bp, synthetic construct
  misc_feature 1..1053: note = Description of Artificial Sequence: Synthetic coding sequence
  source 1..1053: mol_type = other DNA
atgggcgctggggccagcgctgaggagaagcacagccgggagctggagaagaagctgaaggaggatgctgagaaggatgccaggacagtgaagctgctgctgctgggcgctggggagagcggcaagagcaccatcgtgaagcagatgaagatcatccaccaggacggctacagcctggaggagtgcctggagttcatcgccatcatctacggcaacaccctgcagagcatcctggccatcgtgcgggccatgaccaccctgaacatccagtatggagacagcgcccggcaggatgatgccaggaagctgatgcacatggctgacaccatcgaggagggcaccatgcccaaggagatgtctgacatcatccagaggctgtggaaggacagcggcatccaggcctgctttgagcgggccagcgagtaccagctgaatgattctgctggctactacctgagtgacctggagcggctggtgaccccaggctacgtgcccacagagcaggatgtgctgcggagccgggtgaagaccaccggcatcatcgagacccagttctccttcaaggacctgaacttcaggatgtttgatgtgggcggccagaggtctgagaggaagaagtggatccactgctttgaaggagtgacctgcatcatcttcatcgccgccctgagcgcctatgacatggtgctggtggaggatgatgaggtgaacaggatgcatgagagcctgcacctgttcaacagcatctgcaaccaccgctactttgccaccaccagcatcgtgctcttcctgaacaagaaggatgtgttctttgagaagatcaagaaggcccacctgagcatctgcttcccagactatgatggccccaacacctatgaagatgctggcaactacatcaaggtgcagttcctggagctgaacatgagaagagatgtgaaggagatctacagccacatgacctgtgccacagacacccagaatgtgaagtttgtgtttgatgctgtgacagacatcatcatcaaggagaacctgaaggactgtggcctcttctag

SEQ ID NO: 22369 - DNA, 609 bp, synthetic construct
  misc_feature 1..609: note = Description of Artificial Sequence: Synthetic coding sequence
  source 1..609: mol_type = other DNA
atgatgcaggatgtgagcagcagccctgtgtccccagcagatgacagcctgagcaacagcgaggaggagccagaccggcagcagcccccatctgggaagagaggaggcaggaagagaagaagcagcagaagatctgctgggggcggggccggccctgggggcgccgccggcggcggcgtgggcggcggagatgagcccggcagccctgcccagggcaagaggggcaagaagtctgctggctgcggcggcggcggcggggccggcggcggcggcggcagcagcagcggcggcggcagcccccagagctatgaggagctgcagacccagagggtgatggccaacgtgcgggagcggcagaggacccagagcctgaatgaggcctttgctgccctgaggaagatcatccccaccctgcccagcgacaagctgagcaagatccagaccctgaagctggccgcccgctacatcgacttcctgtaccaggtgctgcagagtgatgagctggacagcaagatggccagctgcagctatgtggcccacgagcggctgtcctatgccttctctgtgtggaggatggagggcgcctggagcatgtctgccagccactag

SEQ ID NO: 22370 - DNA, 741 bp, synthetic construct
  misc_feature 1..741: note = Description of Artificial Sequence: Synthetic coding sequence
  source 1..741: mol_type = other DNA
atgggagaccgggagcagctgctgcagagggcccggctggccgagcaggccgagagatatgatgacatggccagcgccatgaaggctgtgacagagctgaatgagcccctgagcaatgaagatagaaacctgctgtctgtggcctacaagaatgtggtgggcgcccggcgcagctcctggagggtcatcagcagcattgagcagaagaccatggctgatggaaatgagaagaagctggagaaggtgaaggcctaccgggagaagattgagaaggagctggagaccgtgtgcaatgatgtgctgagcctgctggacaagttcctgatcaagaactgcaatgacttccagtatgagagcaaggtgttctacctgaagatgaagggggactactaccgctacctggccgaggtggccagcggggagaagaagaacagcgtggtggaggccagcgaggccgcctacaaggaggcctttgagatcagcaaggagcagatgcagcccacccaccccatccggctgggcctggccctgaacttcagcgtcttctactatgagatccagaatgcccctgagcaggcctgcctgctggccaagcaggcctttgatgatgccatcgccgagctggacaccctgaatgaagattcctacaaggacagcaccctcatcatgcagctgctgcgggacaacctgaccctgtggaccagtgaccagcaggatgaggaggccggggagggcaactag

SEQ ID NO: 22371 - DNA, 1626 bp, synthetic construct
  misc_feature 1..1626: note = Description of Artificial Sequence: Synthetic coding sequence
  source 1..1626: mol_type = other DNA
atggtgtggagggtgccccccttcctgctgcccatcctcttcctgggcacccactaccagctggatgtgcagctgtaccactgcaccctgctgggccctgccagccccccagcccacgtgctgctgcccccatctggccccccagcccccaggcacctgcacgcccaggccctgagtgacagcgagatccagctgacctggaagcaccctgaggccctgcccggccccatcagcaaatatgtggtggaggtgcaggtggccggcggggccggggaccccctgtggattgatgtggacaggcctgaggagaccagcaccatcatccggggcctgaatgccagcacccgctacctgttcaggatgagggccagcatccagggcctgggggactggagcaacacagtggaggagagcaccctgggcaatggcctgcaggccgagggccctgtgcaggagagcagagctgctgaggagggcctggaccagcagctgatcctggccgtggtgggctctgtgtctgccacctgcctgaccatcctggccgccctgctgaccctggtgtgcatccgccgcagctgcctgcacagaagaaggaccttcacctaccagagcggcagcggggaggagaccatcctgcagttcagcagcggcaccctgaccctgacccggcggcccaagctgcagcctgagcccctgagctaccctgtgctggagtgggaggacatcacctttgaagatctcatcggggagggcaactttggccaggtgatccgggccatgatcaagaaggatggcctgaagatgaatgctgccatcaagatgctgaaggagtatgcctctgaaaatgaccaccgggactttgctggggagctggaggtgctgtgcaagctgggccaccaccccaacatcatcaacctgctgggcgcctgcaagaacagaggctacctgtacatcgccatcgagtatgccccctacggcaacctgctggacttcctgaggaagagccgggtgctggagacagatcctgcctttgcccgggagcacggcacagccagcaccctgagcagccggcagctgctgcgctttgccagtgatgctgccaacggcatgcagtacctgtctgagaagcagttcatccaccgggacctggccgccagaaatgtgctggtgggggagaacctggccagcaagattgctgactttggcctgagcagaggagaggaggtgtatgtgaagaagaccatgggccgcctgcctgtgcgctggatggccatcgagagcctgaactacagcgtgtacaccaccaagagtgatgtgtggagctttggagtgctgctgtgggagatcgtgtccctgggcggcaccccctactgcggcatgacctgtgccgagctgtatgagaagctgccccagggctacaggatggagcagcccaggaactgtgatgatgaggtgtatgagctgatgaggcagtgctggagggaccggccctatgaaagacctccatttgcccagatcgccctgcagctgggccgcatgctggaggccaggaaggcctacgtgaacatgagcctgtttgagaacttcacctacgccggcattgatgccacagctgaggaggcctag

SEQ ID NO: 22372 - DNA, 3417 bp, synthetic construct
  misc_feature 1..3417: note = Description of Artificial Sequence: Synthetic coding sequence
  source 1..3417: mol_type = other DNA
atggtgtggagggtgccccccttcctgctgcccatcctcttcctggccagccacgtgggcgctgctgtggacctgaccctgctggccaacctgcggctgacagacccccagcgcttcttcctgacctgtgtgtctggagaggccggggccggccggggcagtgatgcctggggcccccccctgctgctggagaaggatgacagaattgtgaggaccccacctggcccccccctgcggctggccagaaatggcagccaccaggtgaccctgcggggcttcagcaagcccagcgacctggtgggcgtcttcagctgtgtgggcggggccggggcccggaggaccagggtcatctacgtgcacaacagccctggggcccacctgctgcctgacaaggtgacccacacagtgaacaagggggacacagctgtgctgagcgcccgggtgcacaaggagaagcagacagatgtgatctggaagagcaatggcagctacttctacaccctggactggcatgaggcccaggacggccgcttcctgctgcagctgcccaacgtgcagccccccagcagcggcatctacagcgccacctacctggaggccagccccctgggcagcgccttcttccggctgattgtgcggggctgtggggccggccgctggggccctggctgcaccaaggaatgtcctggctgcctgcatggaggagtgtgccacgaccatgatggagaatgtgtgtgccccccaggcttcaccggcacccgctgtgagcaggcctgccgggagggccgcttcggccagagctgccaggagcagtgccccggcatcagcggctgccggggcctgaccttctgcctgcctgacccctacggctgcagctgtggcagcggctggaggggcagccagtgccaggaggcctgtgcccctggccactttggagctgactgccgcctgcagtgccagtgccagaatggaggcacctgtgaccgcttcagcggctgtgtgtgccccagcggctggcacggcgtgcactgtgagaagagtgaccgcatcccccagatcctgaacatggccagcgagctggagttcaacctggagaccatgccccgcatcaactgtgccgctgctggcaaccccttccctgtgcggggcagcattgagctgaggaagccagatggcaccgtgctgctgagcaccaaggccatcgtggagcctgagaagaccacagctgagtttgaggtgccccggctggtgctggccgacagcggcttctgggagtgccgggtgtccaccagcggcggccaggacagccgccgcttcaaggtgaatgtgaaggtgccccctgtgcccctggccgccccccggctgctgaccaagcagagccggcagctggtggtgagccccctggtgtccttctctggagatggccccatcagcacagtgcggctgcactaccggccccaggacagcaccatggactggagcaccatcgtggtggaccccagtgaaaatgtgaccctgatgaacctgcggcccaagacaggctacagcgtgcgggtgcagctgagcaggcctggagagggcggggagggcgcctggggcccccccaccctgatgaccacagactgcccagagcccctgctgcagccctggctggagggctggcacgtggagggcacagaccggctgcgggtgtcctggagcctgcccctggtgcccggccccctggtgggagatggcttcctgctgcggctgtgggatggcacccggggccaggagaggagagaaaatgtgagcagcccccaggccaggacagccctgctgaccggcctgaccccaggcacccactaccagctggatgtgcagctgtaccactgcaccctgctgggccctgccagccccccagcccacgtgctgctgccccccagcggccccccagcccccaggcacctgcacgcccaggccctgagtgacagcgagatccagctgacctggaagcaccctgaggccctgcccggccccatcagcaaatatgtggtggaggtgcaggtggccggcggggccggggaccccctgtggattgatgtggacaggcctgaggagaccagcaccatcatccggggcctgaatgccagcacccgctacctgttcaggatgagggccagcatccagggcctgggggactggagcaacacagtggaggagagcaccctgggcaatggcctgcaggccgagggccctgtgcaggagagcagagctgctgaggagggcctggaccagcagctgatcctggccgtggtgggctctgtgtctgccacctgcctgaccatcctggccgccctgctgaccctggtgtgcatcagaagaagctgcctgcacagaagaaggaccttcacctaccagagcggcagcggggaggagaccatcctgcagttcagcagcggcaccctgaccctgacccggcggcccaagctgcagcctgagcccctgagctaccctgtgctggagtgggaggacatcacctttgaggacctgattggagagggcaactttggccaggtgatccgggccatgatcaagaaggatggcctgaagatgaatgctgccatcaagatgctgaaggagtatgcctctgaaaatgaccaccgggactttgctggggagctggaggtgctgtgcaagctgggccaccaccccaacatcatcaacctgctgggcgcctgcaagaacagaggctacctgtacatcgccattgaatatgccccctacggcaacctgctggacttcctgaggaagagccgggtgctggagacagatcctgcctttgcccgggagcacggcacagccagcaccctgagcagccggcagctgctgcgctttgccagtgatgctgccaacggcatgcagtacctgtctgagaagcagttcatccaccgggacctggccgccagaaatgtgctggtgggggagaacctggccagcaagattgctgactttggcctgagcagaggagaggaggtgtatgtgaagaagaccatgggccgcctgcctgtgcgctggatggccatcgagagcctgaactacagcgtgtacaccaccaagagtgatgtgtggagctttggagtgctgctgtgggagatcgtgtccctgggcggcaccccctactgcggcatgacctgtgccgagctgtatgagaagctgccccagggctacaggatggagcagcccaggaactgtgatgatgaggtgtatgagctgatgaggcagtgctggagggaccggccctatgagcggcccccatttgcccagatcgccctgcagctgggccgcatgctggaggccaggaaggcctacgtgaacatgagcctgtttgagaacttcacctacgccggcattgatgccacagctgaggaggcctag

SEQ ID NO: 22373 - DNA, 2352 bp, synthetic construct
  misc_feature 1..2352: note = Description of Artificial Sequence: Synthetic coding sequence
  source 1..2352: mol_type = other DNA
atggccagcgagctggagttcaacctggagaccatgccccgcatcaactgtgccgccgccggcaaccccttccctgtgcggggcagcattgagctgaggaagccagatggcaccgtgctgctgagcaccaaggccatcgtggagcctgagaagaccacagctgagtttgaggtgccccggctggtgctggccgacagcggcttctgggagtgccgggtgtccaccagcggcggccaggacagccgccgcttcaaggtgaatgtgaaggtgccccctgtgcccctggccgccccccggctgctgaccaagcagagccggcagctggtggtgagccccctggtgtccttctctggagatggccccatcagcacagtgcggctgcactaccggccccaggacagcaccatggactggagcaccatcgtggtggaccccagtgaaaatgtgaccctgatgaacctgcggcccaagacaggctacagcgtgcgggtgcagctgagcaggcctggagagggcggggagggcgcctggggcccccccaccctgatgaccacagactgcccagagcccctgctgcagccctggctggagggctggcacgtggagggcacagaccggctgcgggtgtcctggagcctgcccctggtgcccggccccctggtgggagatggcttcctgctgcggctgtgggatggcacccggggccaggagcggcgggagaatgtgagcagcccccaggccaggacagccctgctgaccggcctgaccccaggcacccactaccagctggatgtgcagctgtaccactgcaccctgctgggccctgccagccccccagcccacgtgctgctgcccccatctggccccccagcccccaggcacctgcacgcccaggccctgagtgacagcgagatccagctgacctggaagcaccctgaggccctgcccggccccatcagcaaatatgtggtggaggtgcaggtggccggcggggccggggaccccctgtggattgatgtggacaggcctgaggagaccagcaccatcatccggggcctgaatgccagcacccgctacctgttcaggatgagggccagcatccagggcctgggggactggagcaacacagtggaggagagcaccctgggcaatggcctgcaggccgagggccctgtgcaggagagcagagctgctgaggagggcctggaccagcagctgatcctggccgtggtgggctctgtgtctgccacctgcctgaccatcctggccgccctgctgaccctggtgtgcatccgccgcagctgcctgcacagaagaaggaccttcacctaccagagcggcagcggggaggagaccatcctgcagttcagcagcggcaccctgaccctgacccggcggcccaagctgcagcctgagcccctgagctaccctgtgctggagtgggaggacatcacctttgaagatctcatcggggagggcaactttggccaggtgatccgggccatgatcaagaaggatggcctgaagatgaatgctgccatcaagatgctgaaggagtatgcctctgaaaatgaccaccgggactttgctggggagctggaggtgctgtgcaagctgggccaccaccccaacatcatcaacctgctgggcgcctgcaagaacagaggctacctgtacatcgccatcgagtatgccccctacggcaacctgctggacttcctgaggaagagccgggtgctggagacagatcctgcctttgcccgggagcacggcacagccagcaccctgagcagccggcagctgctgcgctttgccagtgatgctgccaacggcatgcagtacctgtctgagaagcagttcatccaccgggacctggccgccagaaatgtgctggtgggggagaacctggccagcaagattgctgactttggcctgagcagaggagaggaggtgtatgtgaagaagaccatgggccgcctgcctgtgcgctggatggccatcgagagcctgaactacagcgtgtacaccaccaagagtgatgtgtggagctttggagtgctgctgtgggagatcgtgtccctgggcggcaccccctactgcggcatgacctgtgccgagctgtatgagaagctgccccagggctacaggatggagcagcccaggaactgtgatgatgaggtgtatgagctgatgaggcagtgctggagggaccggccctatgaaagacctccatttgcccagatcgccctgcagctgggccgcatgctggaggccaggaaggcctacgtgaacatgagcctgtttgagaacttcacctacgccggcattgatgccacagctgaggaggcctag

SEQ ID NO: 22374 - DNA, 954 bp, synthetic construct
  misc_feature 1..954: note = Description of Artificial Sequence: Synthetic coding sequence
  source 1..954: mol_type = other DNA
atggtgtggagggtgccccccttcctgctgcccatcctcttcctggccagccacgtgggcgctgctgtggacctgaccctgctggccaacctgcggctgacagacccccagcgcttcttcctgacctgtgtgtctggagaggccggggccggccggggcagtgatgcctggggcccccccctgctgctggagaaggatgacagaattgtgaggaccccacctggcccccccctgcggctggccagaaatggcagccaccaggtgaccctgcggggcttcagcaagcccagcgacctggtgggcgtcttcagctgtgtgggcggggccggggcccggaggaccagggtcatctacgtgcacaacagccctggggcccacctgctgcctgacaaggtgacccacacagtgaacaagggggacacagctgtgctgagcgcccgggtgcacaaggagaagcagacagatgtgatctggaagagcaatggcagctacttctacaccctggactggcatgaggcccaggacggccgcttcctgctgcagctgcccaacgtgcagccccccagcagcggcatctacagcgccacctacctggaggccagccccctgggcagcgccttcttccggctgattgtgcggggctgtggggccggccgctggggccctggctgcaccaaggaatgtcctggctgcctgcatggaggagtgtgccacgaccatgatggagaatgtgtgtgccccccaggcttcaccggcacccgctgtgagcaggcctgccgggagggccgcttcggccagagctgccaggagcagtgccccggcatcagcggctgccggggcctgaccttctgcctgcctgacccctacggctgcagctgtggcagcggctggaggggcagccagtgccaggaggtgcaccagggccactgtggggcccgggaggaccacagctag

SEQ ID NO: 22375 - DNA, 1266 bp, synthetic construct
  misc_feature 1..1266: note = Description of Artificial Sequence: Synthetic coding sequence
  source 1..1266: mol_type = other DNA
atgagggccagcatccagggcctgggggactggagcaacacagtggaggagagcaccctgggcaatggcctgcaggccgagggccctgtgcaggagagcagagctgctgaggagggcctggaccagcagctgatcctggccgtggtgggctctgtgtctgccacctgcctgaccatcctggccgccctgctgaccctggtgtgcatccgccgcagctgcctgcacagaagaaggaccttcacctaccagagcggcagcggggaggagaccatcctgcagttcagcagcggcaccctgaccctgacccggcggcccaagctgcagcctgagcccctgagctaccctgtgctggagtgggaggacatcacctttgaagatctcatcggggagggcaactttggccaggtgatccgggccatgatcaagaaggatggcctgaagatgaatgctgccatcaagatgctgaaggagtatgcctctgaaaatgaccaccgggactttgctggggagctggaggtgctgtgcaagctgggccaccaccccaacatcatcaacctgctgggcgcctgcaagaacagaggctacctgtacatcgccatcgagtatgccccctacggcaacctgctggacttcctgaggaagagccgggtgctggagacagatcctgcctttgcccgggagcacggcacagccagcaccctgagcagccggcagctgctgcgctttgccagtgatgctgccaacggcatgcagtacctgtctgagaagcagttcatccaccgggacctggccgccagaaatgtgctggtgggggagaacctggccagcaagattgctgactttggcctgagcagaggagaggaggtgtatgtgaagaagaccatgggccgcctgcctgtgcgctggatggccatcgagagcctgaactacagcgtgtacaccaccaagagtgatgtgtggagctttggagtgctgctgtgggagatcgtgtccctgggcggcaccccctactgcggcatgacctgtgccgagctgtatgagaagctgccccagggctacaggatggagcagcccaggaactgtgatgatgaggtgtatgagctgatgaggcagtgctggagggaccggccctatgaaagacctccatttgcccagatcgccctgcagctgggccgcatgctggaggccaggaaggcctacgtgaacatgagcctgtttgagaacttcacctacgccggcattgatgccacagctgaggaggcctag

SEQ ID NO: 22376 - DNA, 1140 bp, synthetic construct
  misc_feature 1..1140: note = Description of Artificial Sequence: Synthetic coding sequence
  source 1..1140: mol_type = other DNA
atggtgtggagggtgccccccttcctgctgcccatcctcttcctggccagccacgtgggcgctgctgtggacctgaccctgctggccaacctgcggctgacagacccccagcgcttcttcctgacctgtgtgtctggagaggccggggccggccggggcagtgatgcctggggcccccccctgctgctggagaaggatgacagaattgtgaggaccccacctggcccccccctgcggctggccagaaatggcagccaccaggtgaccctgcggggcttcagcaagcccagcgacctggtgggcgtcttcagctgtgtgggcggggccggggcccggaggaccagggtcatctacgtgcacaacagccctggggcccacctgctgcctgacaaggtgacccacacagtgaacaagggggacacagctgtgctgagcgcccgggtgcacaaggagaagcagacagatgtgatctggaagagcaatggcagctacttctacaccctggactggcatgaggcccaggacggccgcttcctgctgcagctgcccaacgtgcagccccccagcagcggcatctacagcgccacctacctggaggccagccccctgggcagcgccttcttccggctgattgtgcggggctgtggggccggccgctggggccctggctgcaccaaggaatgtcctggctgcctgcatggaggagtgtgccacgaccatgatggagaatgtgtgtgccccccaggcttcaccggcacccgctgtgagcaggcctgccgggagggccgcttcggccagagctgccaggagcagtgccccggcatcagcggctgccggggcctgaccttctgcctgcctgacccctacggctgcagctgtggcagcggctggaggggcagccagtgccaggaggcctgtgcccctggccactttggagctgactgccgcctgcagtgccagtgccagaatggaggcacctgtgaccgcttcagcggctgtgtgtgccccagcggctggcacggcgtgcactgtgagaagagcggctggagggactgggtggacaccagcacagagaagcagaacacagatgagggccgctttggaggccacgtgtctgcccctgtgggcgcccctggatag

SEQ ID NO: 22377 - DNA, 819 bp, synthetic construct
  misc_feature 1..819: note = Description of Artificial Sequence: Synthetic coding sequence
  source 1..819: mol_type = other DNA
atggccctgctggtgcgggtgctgaggaaccagaccagcatcagccagtgggtgcctgtgtgcagccgcctcatccctgtgagccccacccagggccagggcgaccgggccctgagcaggaccagccagtggccccagatgagccagagccgggcctgtggcggcagcgagcagatccctggcatcgacatccagctgaacaggaagtaccacaccaccaggaagctgagcaccaccaaggacagcccccagcctgtggaggagaaggtgggcgccttcaccaagatcatcgaggccatgggcttcaccggccccctgaagtaccgctgccagatgccagacaccttcaacagctggttcctgatcaccctgctgcacgtgtggatgtgcctggtgaggatgaagcaggagggccgcagcggcaagtacatgtgccgcatcatcgtgcacttcatgtgggaggatgtgcagcagaggggccgggtgatgggcgtgaacccctacatcctgaagaagaacatgatcctgatgaccaaccacttctatgctgccatcctgggctatgatgagggcatcctgagtgatgaccacggcctggccgccgccctgtggaggaccttcttcaacagaaaatgtgaggaccccaggcacctggagctgctggtggagtatgtgaggaagcagatccagtacctggacagcatgaatggagaggacctgctgctgactggagaggtgtcctggaggcccctggtggagaagaacccccagagcatcctgaagccccacagccccacctacaatgatgagggcctgtag

SEQ ID NO: 22378 - DNA, 564 bp, synthetic construct
  misc_feature 1..564: note = Description of Artificial Sequence: Synthetic coding sequence
  source 1..564: mol_type = other DNA
atgcagcccatcgacacctgtgtgtcctaccccaggactggaggccagggctctgtgagccacttccctggctgccagatgccagacaccttcaacagctggttcctgatcaccctgctgcacgtgtggatgtgcctggtgaggatgaagcaggagggccgcagcggcaagtacatgtgccgcatcatcgtgcacttcatgtgggaggatgtgcagcagaggggccgggtgatgggcgtgaacccctacatcctgaagaagaacatgatcctgatgaccaaccacttctacgccgccatcctgggctatgatgagggcatcctgagtgatgaccacggcctggccgccgccctgtggaggaccttcttcaacagaaaatgtgaggaccccaggcacctggagctgctggtggagtatgtgaggaagcagatccagtacctggacagcatgaatggagaggacctgctgctgaccggggaggtgtcctggaggcccctggtggagaagaacccccagagcatcctgaagccccacagccccacctacaatgatgagggcctgtag

SEQ ID NO: 22379 - DNA, 696 bp, synthetic construct
  misc_feature 1..696: note = Description of Artificial Sequence: Synthetic coding sequence
  source 1..696: mol_type = other DNA
atggccctgctggtgcgggtgctgaggaaccagaccagcatcagccagtgggtgcctgtgtgcagccgcctcatccctgtgagccccacccagggccagggcgaccgggccctgagcaggaccagccagaagatcaagattgctgccctgaggatgtacaccagctgtgtggagaagacagactttgaggagttcttcctgcgctgccagatgccagacaccttcaacagctggttcctgatcaccctgctgcacgtgtggatgtgcctggtgaggatgaagcaggagggccgcagcggcaagtacatgtgccgcatcatcgtgcacttcatgtgggaggatgtgcagcagaggggccgggtgatgggcgtgaacccctacatcctgaagaagaacatgatcctgatgaccaaccacttctacgccgccatcctgggctatgatgagggcatcctgagtgatgaccacggcctggccgccgccctgtggaggaccttcttcaacagaaaatgtgaggaccccaggcacctggagctgctggtggagtatgtgaggaagcagatccagtacctggacagcatgaatggagaggacctgctgctgaccggggaggtgtcctggaggcccctggtggagaagaacccccagagcatcctgaagccccacagccccacctacaatgatgagggcctgtag

SEQ ID NO: 22380 - DNA, 822 bp, synthetic construct
  misc_feature 1..822: note = Description of Artificial Sequence: Synthetic coding sequence
  source 1..822: mol_type = other DNA
atggccctgctggtgcgggtgctgaggaaccagaccagcatcagccagtgggtgcctgtgtgcagccgcctcatccctgtgagccccacccagggccagggcgaccgggccctgagcaggaccagccagtggccccagatgagccagagccgggcctgtggcggcagcgagcagatccctggcatcgacatccagctgaacaggaagtaccacaccaccaggaagctgagcaccaccaaggacagcccccagcctgtggaggagaaggtgggcgccttcaccaagatcatcgaggccatgggcttcaccggccccctgaagtacagcaagtggaagatcaagattgctgccctgaggatgtacaccagctgtgtggagaagacagactttgaggagttcttcctgcgctgccagatgccagacaccttcaacagctggttcctgatcaccctgctgcacgtgtggatgtgcctggtgaggatgaagcaggagggccgcagcggcaagtacatgtgccgcatcatcgtgcacttcatgtgggaggatgtgcagcagaggggccgggtgatgggcggcatcctgagtgatgaccacggcctggccgccgccctgtggaggaccttcttcaacagaaaatgtgaggaccccaggcacctggagctgctggtggagtatgtgaggaagcagatccagtacctggacagcatgaatggagaggacctgctgctgaccggggaggtgtcctggaggcccctggtggagaagaacccccagagcatcctgaagccccacagccccacctacaatgatgagggcctgtag

SEQ ID NO: 22381 - DNA, 900 bp, synthetic construct
  misc_feature 1..900: note = Description of Artificial Sequence: Synthetic coding sequence
  source 1..900: mol_type = other DNA
atggccctgctggtgcgggtgctgaggaaccagaccagcatcagccagtgggtgcctgtgtgcagccgcctcatccctgtgagccccacccagggccagggcgaccgggccctgagcaggaccagccagtggccccagatgagccagagccgggcctgtggcggcagcgagcagatccctggcatcgacatccagctgaacaggaagtaccacaccaccaggaagctgagcaccaccaaggacagcccccagcctgtggaggagaaggtgggcgccttcaccaagatcatcgaggccatgggcttcaccggccccctgaagtacagcaagtggaagatcaagattgctgccctgaggatgtacaccagctgtgtggagaagacagactttgaggagttcttcctgcgctgccagatgccagacaccttcaacagctggttcctgatcaccctgctgcacgtgtggatgtgcctggtgaggatgaagcaggagggccgcagcggcaagtacatgtgccgcatcatcgtgcacttcatgtgggaggatgtgcagcagaggggccgggtgatgggcgtgaacccctacatcctgaagaagaacatgatcctgatgaccaaccacttctacgccgccatcctgggctatgatgagggcatcctgagtgatgaccacggcctggccgccgccctgtggaggaccttcttcaacagaaaatgtgaggaccccaggcacctggagctgctggtggagtatgtgaggaagcagatccagtacctggacagcatgaatggagaggacctgctgctgaccggggaggtgtcctggaggcccctggtggagaagaacccccagagcatcctgaagccccacagccccacctacaatgatgagggcctgtag

SEQ ID NO: 22382 - DNA, 603 bp, synthetic construct
  misc_feature 1..603: note = Description of Artificial Sequence: Synthetic coding sequence
  source 1..603: mol_type = other DNA
atgggcttcaccggccccctgaagtacagcaagtggaagatcaagattgctgccctgaggatgtacaccagctgtgtggagaagacagactttgaggagttcttcctgcgctgccagatgccagacaccttcaacagctggttcctgatcaccctgctgcacgtgtggatgtgcctggtgaggatgaagcaggagggccgcagcggcaagtacatgtgccgcatcatcgtgcacttcatgtgggaggatgtgcagcagaggggccgggtgatgggcgtgaacccctacatcctgaagaagaacatgatcctgatgaccaaccacttctatgctgccatcctgggctatgatgagggcatcctgagtgatgaccacggcctggccgccgccctgtggaggaccttcttcaacagaaaatgtgaggaccccaggcacctggagctgctggtggagtatgtgaggaagcagatccagtacctggacagcatgaatggagaggacctgctgctgactggagaggtgtcctggaggcccctggtggagaagaacccccagagcatcctgaagccccacagccccacctacaatgatgagggcctgtag

SEQ ID NO: 22383 - DNA, 489 bp, synthetic construct
  misc_feature 1..489: note = Description of Artificial Sequence: Synthetic coding sequence
  source 1..489: mol_type = other DNA
atggccctgctggtgcgggtgctgaggaaccagaccagcatcagccagtgggtgcctgtgtgcagccgcctcatccctgtgagccccacccagggccagggcgaccgggccctgagcaggaccagccagtggccccagatgagccagagccgggcctgtggcggcagcgagcagatccctggcatcgacatccagctgaacaggaagtaccacaccacccccatcctgggctatgatgagggcatcctgagtgatgaccacggcctggccgccgccctgtggaggaccttcttcaacagaaaatgtgaggaccccaggcacctggagctgctggtggagtatgtgaggaagcagatccagtacctggacagcatgaatggagaggacctgctgctgactggagaggtgtcctggaggcccctggtggagaagaacccccagagcatcctgaagccccacagccccacctacaatgatgagggcctgtag

SEQ ID NO: 22384 - DNA, 435 bp, synthetic construct
  misc_feature 1..435: note = Description of Artificial Sequence: Synthetic coding sequence
  source 1..435: mol_type = other DNA
atgtgcctggtgaggatgaagcaggagggccgcagcggcaagtacatgtgccgcatcatcgtgcacttcatgtgggaggatgtgcagcagaggggccgggtgatgggcgtgaacccctacatcctgaagaagaacatgatcctgatgaccaaccacttctatgctgccatcctgggctatgatgagggcatcctgagtgatgaccacggcctggccgccgccctgtggaggaccttcttcaacagaaaatgtgaggaccccaggcacctggagctgctggtggagtatgtgaggaagcagatccagtacctggacagcatgaatggagaggacctgctgctgactggagaggtgtcctggaggcccctggtggagaagaacccccagagcatcctgaagccccacagccccacctacaatgatgagggcctgtag

SEQ ID NO: 22385 - DNA, 447 bp, synthetic construct
  misc_feature 1..447: note = Description of Artificial Sequence: Synthetic coding sequence
  source 1..447: mol_type = other DNA
atggccctgctggtgcgggtgctgaggaaccagaccagcatcagccagtgggtgcctgtgtgcagccgcctcatccctgtgagccccacccagggccagggcgaccgggccctgagcaggaccagccagtggccccagatgagccagagccgggcctgtggcggcagcgagcagatccctggcatcgacatccagctgaacaggaagtaccacaccaccaggaagctgagcaccaccaaggacagcccccagcctgtggaggagaaggtgggcgccttcaccaagatcatcgaggccatgggcttcaccggccccctgaagtacagcaagtgggatgtgagcagccccaatgaagctggccggcctgagtgggaggtgcacgtgtcctaccacagcagcttctacgtgggcggctgcagcgctgcccggcagagccacggcggctag

SEQ ID NO: 22386 - DNA, 825 bp, synthetic construct
  misc_feature 1..825: note = Description of Artificial Sequence: Synthetic coding sequence
  source 1..825: mol_type = other DNA
atgctgtctgtggccagccgcagcggcccctttgcccctgtgctgagcgccaccagcagaggagtggccggggccctgcggcccctggtgcaggccaccgtgcctgccaccccagagcagcctgtgctggacctgaagaggcccttcctgagccgggagagcctgagcggccaggccgtgagaagacccctggtggcctctgtgggcctgaatgtgcctgcctctgtgtgctacagccacacagacatcaaggtgcctgacttcagcgagtaccgccgcctggaggtgctggacagcaccaagagcagccgggagagcagcgaggccaggaagggcttctcctacctggtgactggagtgaccaccgtgggcgtggcctatgctgccaagaatgctgtgacccagtttgtgtcctccatgtctgccagcgcagatgtgctggccctggccaagattgagatcaagctgagtgacatccctgagggcaagaacatggccttcaagtggaggggcaagcccctgtttgtgcgccacaggacccagaaggagattgagcaggaggccgctgtggagctgagccagctgcgggacccccagcacgacctggacagagtgaagaagccagagtgggtgatcctgattggagtgtgcacccacctgggctgtgtgcccatcgccaatgctggggactttggaggctactactgcccctgccacggcagccactatgatgccagcggccgcatccggctgggccctgcccccctgaacctggaggtgcccacctatgagttcaccagtgatgacatggtgattgtgggctag

SEQ ID NO: 22387 - DNA, 1221 bp, synthetic construct
  misc_feature 1..1221: note = Description of Artificial Sequence: Synthetic coding sequence
  source 1..1221: mol_type = other DNA
atggctgctggagctggagctggcagcgccccccgctggctgcgggccctgtctgagcccctgtctgctgcccagctgcggcggctggaggagcaccgctacagcgctgctggggtgtccctgctggagccccccctgcagctgtactggacctggctgctgcagtggatccccctgtggatggcccccaacagcatcaccctgctgggcctggccgtgaatgtggtgaccaccctggtgctgatctcctactgccccacagccacagaggaggccccctactggacctacctgctgtgtgccctgggcctcttcatctaccagagcctggatgccattgatggcaagcaggcccggaggaccaacagctgcagccccctgggggagctgtttgaccacggctgtgacagcctgagcaccgtcttcatggctgtgggcgccagcattgctgcccggctgggcacctacccagactggttcttcttctgcagcttcatcggcatgtttgtgttctactgtgcccactggcagacctacgtgtctggcatgctgcgctttgggaaggtggatgtgacagagatccagatcgccctggtgattgtgtttgtgctgagcgcctttggaggagccaccatgtgggactacaccatccccatcctggagatcaagctgaagatcctgcctgtgctgggcttcctgggcggcgtcatcttcagctgcagcaactacttccacgtgatcctgcatggaggagtgggcaagaatggcagcaccatcgccggcacctctgtgctgagccctggcctgcacatcggcctcatcatcatcctggccatcatgatctacaagaagagcgccacagatgtgtttgagaagcacccctgcctgtacatcctgatgtttggctgtgtgtttgccaaggtgtcccagaagctggtggtggcccacatgaccaagtctgagctgtacctgcaggacacagtgttcctgggccctggcctgctcttcctggaccagtacttcaacaacttcattgatgaatatgtggtgctgtggatggccatggtgatcagcagctttgacatggtgatctacttcagcgccctgtgcctgcagatcagccgccacctgcacctgaacatcttcaagacagcctgccaccaggcccctgagcaggtgcaggtgctgagcagcaagagccaccagaacaacatggactag

SEQ ID NO: 22388 - DNA, 2508 bp, synthetic construct
  misc_feature 1..2508: note = Description of Artificial Sequence: Synthetic coding sequence
  source 1..2508: mol_type = other DNA
atggccgagctgtctgaggaggccctgctgtctgtgctgcccaccatccgggtgcccaaggccggggacagagtgcacaaggatgaatgtgccttctcctttgacaccccagagagcgagggcggcctgtacatctgcatgaacaccttcctgggctttgggaagcagtatgtggagcggcacttcaacaagacaggccagagggtgtacctgcacctgcggaggacccggcggcccaaggaggaggaccctgccaccggcaccggggacccccccaggaagaagcccacccggctggccatcggcgtggagggcggctttgacctgtctgaggagaagtttgagctggatgaagatgtgaagatcgtcatcctgcctgactacctggagatcgccagagatggcctgggcggcctgcctgacatcgtgcgggacagagtgaccagcgctgtggaggccctgctgtctgctgacagcgccagcaggaagcaggaggtgcaggcctgggatggagaggtgcggcaggtgtccaagcacgccttcagcctgaagcagctggacaacccagcccgcatccccccctgtggctggaagtgcagcaaatgtgacatgagggagaacctgtggctgaacctgacagatggcagcatcctgtgtggccgccgctactttgatggcagcggcggcaacaaccacgctgtggagcactaccgggagaccggctaccccctggccgtgaagctgggcaccatcaccccagatggagcagatgtgtacagctatgatgaagatgacatggtgctggaccccagcctggccgagcacctgagccactttggaattgacatgctgaagatgcagaagacagacaagaccatgacagagctggagattgacatgaaccagagaattggagagtgggagctgatccaggagagcggcgtgcccctgaagcccctgtttggacctggctacacaggcatccggaacctgggcaacagctgctacctgaacagcgtggtgcaggtgctcttcagcatcccagacttccagaggaaatatgtggacaagctggagaagatcttccagaatgcccccacagaccccacccaggacttcagcacccaggtggccaagctgggccacggcctgctgagcggggagtacagcaagcctgtgcctgagagcggagatggagagcgggtgcctgagcagaaggaggtgcaggacggcatcgcccccaggatgttcaaggccctgattggcaagggccaccctgagttcagcaccaaccggcagcaggatgcccaggagttcttcctgcacctgatcaacatggtggagaggaactgccgcagcagcgagaaccccaatgaggtgttccgcttcctggtggaggagaagatcaagtgcctggccacagagaaggtgaagtacacccagagggtggactacatcatgcagctgcctgtgcccatggatgctgccctgaacaaggaggagctgctggagtatgaggagaagaagaggcaggccgaggaggagaagatggccctgcctgagctggtgcgggcccaggtgcccttcagcagctgcctggaggcctacggggcccctgagcaggtggatgacttctggagcacagccctgcaggccaagtctgtggccgtgaagaccaccaggtttgccagcttcccagactacctggtgatccagatcaagaagttcaccttcggcctggactgggtgcccaagaagctggatgtgtccattgagatgcctgaggagctggacatcagccagctgcggggcaccggcctgcagcctggagaggaggagctgcctgacatcgccccacccctggtgaccccagatgagcccaaggcccccatgctggatgaatctgtcatcatccagctggtggagatgggcttccccatggatgcctgcaggaaggctgtgtactacacaggcaacagcggggctgaggccgccatgaactgggtgatgagccacatggatgatcctgactttgccaaccccctcatcctgcccggcagcagcggccctggcagcaccagcgctgctgctgaccccccacctgaggactgtgtgaccaccatcgtgtccatgggcttcagccgggaccaggccctgaaggccctgcgggccaccaacaacagcctggagagagctgtggactggatcttcagccacattgatgacctggatgctgaggccgccatggacatcagcgagggccgctctgctgctgacagcatcagcgagagcgtgcctgtgggccccaaggtgagagatggccctgggaagtaccagctgtttgccttcatcagccacatgggcaccagcaccatgtgtggccactacgtgtgccacatcaagaaggagggccgctgggtgatctacaatgaccagaaggtgtgtgccagcgagaagccacccaaggacctgggctacatctacttctaccagagggtggccagctag

SEQ ID NO: 22389 - DNA, 2385 bp, synthetic construct
  misc_feature 1..2385: note = Description of Artificial Sequence: Synthetic coding sequence
  source 1..2385: mol_type = other DNA
atggctgatgcctgggaggagatccggcggctggccgctgacttccagagggcccagtttgctgaggccacccagaggctgtctgagaggaactgcattgaaattgtgaacaagctgattgcccagaagcagctggaggtggtgcacaccctggatggcaaggagtacatcaccccagcccagatcagcaaggagatgagagatgagctgcacgtgcggggcggccgggtgaacatcgtggacctgcagcaggtgatcaacgtggacctgatccacatcgagaacagaattggagacatcatcaagtctgagaagcacgtgcagctggtgctgggccagctgattgatgagaactacctggaccggctggccgaggaggtgaatgacaagctgcaggagagcggccaggtgaccatcagcgagctgtgcaagacctatgacctgcccggcaacttcctgacccaggccctgacccagaggctgggccgcatcatcagcggccacatcgacctggacaacagaggagtcatcttcacagaggcctttgtggcccggcacaaggcccgcatccggggcctcttcagcgccatcacccggcccacagctgtgaacagcctcatcagcaaatatggcttccaggagcagctgctgtacagcgtgctggaggagctggtgaacagcggccgcctgcggggcaccgtggtgggcggccggcaggacaaggctgtgtttgtgcctgacatctacagcaggacccagagcacctgggtggacagcttcttccggcagaatggctacctggagtttgatgccctgagccggctgggcatcccagatgctgtgtcctacatcaagaagcgctacaagaccacccagctgctcttcctgaaggccgcctgtgtgggccagggcctggtggaccaggtggaggcctctgtggaggaggccatcagcagcggcacctgggtggacatcgcccccctgctgcccaccagcctgtctgtggaggatgctgccatcctgctgcagcaggtgatgagggccttcagcaagcaggccagcacagtggtgttcagtgacacagtggtggtgtctgagaagttcatcaatgactgcacagagctgttccgggagctgatgcaccagaaggccgagaaggagatgaagaacaaccctgtgcacctgatcacagaggaggacctgaagcagatcagcaccctggagagcgtgtccaccagcaagaaggacaagaaggatgaaagaagaaggaaggccacagagggcagcggctccatgaggggcggcggcggcggcaatgcccgggagtacaagatcaagaaggtgaagaagaagggcaggaaggatgatgacagtgatgatgagagccagagcagccacacaggcaagaagaagccagagatctccttcatgttccaggatgaaattgaggacttcctgaggaagcacatccaggatgcccctgaggagttcatcagcgagctggccgagtacctgatcaagcccctgaacaagacctacctggaggtggtgcgctctgtgttcatgagcagcaccaccagcgccagcggcactggaaggaagaggaccatcaaggacctgcaggaggaggtgagcaacctgtacaacaacatccggctgtttgagaagggcatgaagttctttgctgatgacacccaggccgccctgaccaagcacctgctgaagtctgtgtgcacagacatcaccaacctgatcttcaacttcctggccagtgacctgatgatggctgtggatgatcctgctgccatcaccagcgagatcaggaagaagatcctgagcaagctgtctgaggagaccaaggtggccctgaccaagctgcacaacagcctgaatgagaagagcattgaggacttcatcagctgcctggacagcgctgctgaggcctgtgacatcatggtgaagagaggagacaagaagcgggagcggcagatcctcttccagcaccggcaggccctggccgagcagctgaaggtgacagaggaccctgccctgatcctgcacctgacctctgtgctgctcttccagttcagcacccacagcatgctgcacgcccctggccgctgtgtgccccagatcatcgccttcctgaacagcaagatccctgaggaccagcacgccctgctggtgaagtaccagggcctggtggtgaagcagctggtgtcccagagcaagaagacaggccagggcgactaccccctgaacaatgagctggacaaggagcaggaggatgtggccagcaccaccaggaaggagctgcaggagctgagcagcagcatcaaggacctggtgctgaagagcaggaagagctctgtgacagaggagtag

SEQ ID NO: 22390 - DNA, 942 bp, synthetic construct
  misc_feature 1..942: note = Description of Artificial Sequence: Synthetic coding sequence
  source 1..942: mol_type = other DNA
atgattggccagaagaccctgtacagcttcttcagccccagccctgccaggaagagacatgcccccagccctgagcctgctgtgcagggcactggagtggccggcgtgcctgaggagagcggagatgctgctgccatcccagccaagaaggccccagctggccaggaggagcccggcaccccacccagcagccccctgtctgctgagcagctggaccgcatccagaggaacaaggccgccgccctgctgcggctggccgccagaaatgtgcctgtgggctttggagagagctggaagaagcacctgtctggagaatttgggaagccctacttcatcaagctgatgggctttgtggccgaggagaggaagcactacacagtgtaccccccaccccaccaggtgttcacctggacccagatgtgtgacatcaaggatgtgaaggtggtgatcctgggccaggacccctaccacggccccaaccaggcccacggcctgtgcttctctgtgcagaggcctgtgcccccaccacccagcctggagaacatctacaaggagctgagcacagacattgaagattttgtgcaccctggccacggggacctgagcggctgggccaagcagggcgtgctgctgctgaatgctgtgctgactgtgcgggcccaccaggccaacagccacaaggagcggggctgggagcagttcacagatgctgtggtgtcctggctgaaccagaacagcaatggcctggtgttcctgctgtggggcagctatgcccagaagaagggcagcgccatcgacaggaagaggcaccacgtgctgcagacagcccaccccagccccctgtctgtgtaccggggcttcttcggctgccgccacttcagcaagaccaatgagctgctgcagaagagcggcaagaagcccatcgactggaaggagctgtag

SEQ ID NO: 22391 - DNA, 915 bp, synthetic construct
  misc_feature 1..915: note = Description of Artificial Sequence: Synthetic coding sequence
  source 1..915: mol_type = other DNA
atgggcgtcttctgcctgggcccctggggcctgggcaggaagctgcggacccctgggaagggccccctgcagctgctgagccggctgtgtggggaccacctgcaggccatcccagccaagaaggccccagctggccaggaggagcccggcaccccacccagcagccccctgtctgctgagcagctggaccgcatccagaggaacaaggctgctgccctgctgcggctggccgccagaaatgtgcctgtgggctttggagagagctggaagaagcacctgagcggggagtttgggaagccctacttcatcaagctgatgggctttgtggccgaggagaggaagcactacacagtgtaccccccaccccaccaggtgttcacctggacccagatgtgtgacatcaaggatgtgaaggtggtgatcctgggccaggacccctaccacggccccaaccaggcccacggcctgtgcttctctgtgcagaggcctgtgcccccaccacccagcctggagaacatctacaaggagctgagcacagacatcgaggactttgtgcaccctggccatggagacctgagcggctgggccaagcagggcgtgctgctgctgaatgctgtgctgactgtgcgggcccaccaggccaacagccacaaggagcggggctgggagcagttcacagatgctgtggtgtcctggctgaaccagaacagcaatggcctggtgttcctgctgtggggcagctatgcccagaagaagggcagcgccatcgacaggaagaggcaccacgtgctgcagacagcccaccccagccccctgtctgtgtaccggggcttcttcggctgccgccacttcagcaagaccaatgagctgctgcagaagagcggcaagaagcccatcgactggaaggagctgtag

SEQ ID NO: 22392 - DNA, 813 bp, synthetic construct
  misc_feature 1..813: note = Description of Artificial Sequence: Synthetic coding sequence
  source 1..813: mol_type = other DNA
atgggcgtcttctgcctgggcccctggggcctgggcaggaagctgcggacccctgggaagggccccctgtctgctgagcagctggaccgcatccagaggaacaaggctgctgccctgctgcggctggccgccagaaatgtgcctgtgggctttggagagagctggaagaagcacctgagcggggagtttgggaagccctacttcatcaagctgatgggctttgtggccgaggagaggaagcactacacagtgtaccccccaccccaccaggtgttcacctggacccagatgtgtgacatcaaggatgtgaaggtggtgatcctgggccaggacccctaccacggccccaaccaggcccacggcctgtgcttctctgtgcagaggcctgtgcccccaccacccagcctggagaacatctacaaggagctgagcacagacatcgaggactttgtgcaccctggccatggagacctgagcggctgggccaagcagggcgtgctgctgctgaatgctgtgctgactgtgcgggcccaccaggccaacagccacaaggagcggggctgggagcagttcacagatgctgtggtgtcctggctgaaccagaacagcaatggcctggtgttcctgctgtggggcagctatgcccagaagaagggcagcgccatcgacaggaagaggcaccacgtgctgcagacagcccaccccagccccctgtctgtgtaccggggcttcttcggctgccgccacttcagcaagaccaatgagctgctgcagaagagcggcaagaagcccatcgactggaaggagctgtag

SEQ ID NO: 22393 - DNA, 9288 bp, synthetic construct
  misc_feature 1..9288: note = Description of Artificial Sequence: Synthetic coding sequence
  source 1..9288: mol_type = other DNA
atggtgtttgaatctgtggtggtggatgtgctgaaccgcttcctgggggactatgtggtggacctggacaccagccagctgagcctgggcatctggaagggagctgtggccctgaagaacctgcagatcaaggaaaatgccctgagccagctggatgtgcccttcaaggtgaaggtgggccacatcggcaacctgaagctgatcatcccctggaagaacctgtacacccagcctgtggaggccgtgctggaggagatctacctgctgattgtgcccagcagccgcatcaagtatgaccccctgaaggaggagaagcagctgatggaggccaagcagcaggagctgaagagaattgaggaggccaagcagaaggtggtggaccaggagcagcacctgcctgagaagcaggacacctttgctgagaagctggtgacccagatcatcaagaacctgcaggtgaagatcagcagcatccacatccgctatgaagatgacatcaccaacagagacaagcccctgagctttggcatcagcctgcagaacctgtccatgcagaccacagaccagtactgggtgccctgcctgcatgatgaaacagagaagctggtgaggaagctgatccggctggacaacctgtttgcctactggaatgtgaagagccagatgttctacctgagtgactatgacaacagcctggatgacctgaagaatggaattgtgaatgaaaacatcgtgcctgagggctatgactttgtgttccggcccatcagcgccaatgccaagctggtgatgaacagaagaagtgactttgacttcagcgcccccaagatcaacctggagattgagctgcacaacatcgccatcgagttcaacaagccccagtacttcagcatcatggagctgctggagagcgtggacatgatggcccagaacctgccctacaggaagttcaagccagatgtgcccctgcaccaccacgcccgggagtggtgggcctatgccatccacggcgtgctggaggtgaatgtgtgcccccggctgtggatgtggagctggaagcacatcaggaagcaccggcagaaggtgaagcagtacaaggagctgtacaagaagaagctgaccagcaagaagcccccaggagagctgctggtgtccctggaggagctggagaagaccctggatgtgttcaacatcaccatcgcccggcagacagctgaggtggaggtgaagaaggccggctacaagatctacaaggagggcgtgaaggaccctgaggacaacaagggctggttctcctggctgtggagctggagcgagcagaacaccaatgagcagcagccagatgtgcagcctgagaccctggaggagatgctgaccccagaggagaaggccctgctgtatgaggccatcggctacagcgagacagctgtggaccccaccctgctgaagacctttgaggccctgaagttctttgtgcacctgaagtccatgagcatcgtgctgcgggagaaccaccagaagccagagctggtggacatcgtgattgaggagttcagcaccctcatcgtgcagaggcctggggcccaggccatcaagtttgagaccaagattgacagcttccacatcaccggcctgcctgacaacagcgagaagccccggctgctgagcagcctggatgatgccatgagcctcttccagatcacctttgagatcaaccccctggatgaaacagtgtcccagcgctgcatcatcgaggccgagcccctggagatcatctatgatgccaggacagtgaacagcatcgtggagttcttccggccccccaaggaggtgcacctggcccagctgacagctgccaccctgaccaagctggaggagttccgcagcaagacagccaccggcctgctgtacatcatcgagacccagaaggtgctggacctgaagatcaacctgaaggccagctacatcatcgtgccccaggacggcatcttcagccccaccagcaacctgctgctgctggacctgggccacctgaaggtgaccagcaagagccgctctgagctgcctgatgtgaagcagggcgaggccaacctgaaggagatcatggaccgggcctatgacagctttgacatccagctgacctctgtgcagctgctgtacagccgggtgggggacaactggagggaggccaggaagctgtctgtgtccacccagcacatcctggtgcccatgcacttcaacctggagctgagcaaggccatggtgttcatggatgtgaggatgcccaagttcaagatctacggcaagctgcccctcatcagcctgcgcatcagtgacaagaagctgcagggcatcatggagctgattgagagcatccccaagccagagcctgtgacagaggtgtctgcccctgtgaagagcttccagatccagaccagcaccagcctgggcaccagccagatcagccagaagatcatccccctgctggagctgcccagcgtgtctgaagatgattctgaggaggagttctttgatgccccctgcagccccctggaggagcccctgcagttccccactggagtgaagagcatccgcaccaggaagctgcagaagcaggactgcagcgtgaacatgaccaccttcaagatccgctttgaggtgcccaaggtgctgattgagttctaccacctggtgggggactgtgagctgtctgtggtggagatcctggtgctgggcctgggcgctgagattgagatccgcacctatgacctgaaggccaatgccttcctgaaggagttctgcctgaagtgcccagagtacctggatgagaacaagaagcctgtgtacctggtgaccaccctggacaacaccatggaggacctgctgaccctggagtatgtgaaggccgagaagaatgtgcctgacctgaagagcacctacaacaacgtgctgcagctgatcaaggtgaacttcagcagcctggacatccacctgcacacagaggccctgctgaacaccatcaactacctgcacaacatcctgccccagagcgaggagaagagcgcccctgtgtccaccacagaaacagaggacaagggagatgtgatcaagaagctggccctgaagctgagcaccaatgaagacatcatcaccctgcagatcctggccgagctgagctgcctgcagatcttcatccaggaccagaagtgcaacatcagcgagatcaagattgagggcctggacagcgagatgatcatgaggccttctgaaacagagatcaatgccaagctgaggaacatcatcgtgctggacagcgacatcacagccatctacaagaaggctgtgtacatcaccgggaaggaggtgttctccttcaagatggtgtcctacatggatgccacagctggcagcgcctacacagacatgaatgtggtggacatccaggtgaacctgattgtgggctgcatcgaggtggtgtttgtgaccaagttcctgtacagcatcctggccttcatcgacaacttccaggccgccaagcaggccctggccgaggccaccgtgcaggccgccggcatggccgccactggagtgaaggagctggcccagaggagcagcaggatggccctggacatcaacatcaaggcccctgtggtggtgatcccccagagccctgtgtctgaaaatgtgtttgtggccgactttggcctcatcaccatgaccaacaccttccacatgatcacagagagccagagcagccccccacctgtgattgacctgatcaccatcaagctgtctgagatgaggctgtaccgcagccgcttcatcaatgatgcctaccaggaggtgctggacctgctgctgcccctgaacctggaggtggtggtggagaggaacctgtgctgggagtggtaccaggaggtgccctgcttcaacgtgaatgcccagctgaagcccatggagttcatcctgagccaggaggacatcaccaccatcttcaagaccctgcacggcaacatctggtatgagaaggatggcagcgccagccctgctgtgaccaaggaccagtacagcgccaccagcggcgtgaccaccaatgccagccaccacagcggcggggccaccgtggtgacagctgctgtggtggaggtgcacagccgggccctgctggtgaagaccaccctgaacatctccttcaagacagatgacctgaccatggtgctgtacagccctggccccaagcaggccagcttcacagatgtgcgggaccccagcctgaagctggccgagttcaagctggagaacatcatcagcaccctgaagatgtacacagatggcagcaccttcagcagcttcagcctgaagaactgcatcctggatgacaagaggccccacgtgaagaaggccacccccaggatgattggcctgactgtgggctttgacaagaaggacatgatggacatcaagtacaggaaggtgagagatggctgtgtgacagatgctgtgttccaggagatgtacatctgtgcctctgtggagttcctgcagacagtggccaacgtgttcctggaggcctacaccactggaacagctgtggagacctctgtgcagacctggacagccaaggaggaggtgcccacccaggagagcgtgaagtgggagatcaacgtcatcatcaagaaccctgagatcgtgtttgtggccgacatgaccaagaatgatgccccagccctggtgatcaccacccagtgtgagatctgctacaagggcaacctggagaacagcaccatgacagctgccatcaaggacctgcaggtgcgggcctgccccttcctgcctgtgaagaggaagggcaagatcaccaccgtgctgcagccctgtgacctcttctaccagaccacccagaagggcacagacccccaggtgattgacatgtctgtgaagagcctgaccctgaaggtgtcccctgtgatcatcaacaccatgatcaccatcaccagcgccctgtacaccaccaaggagaccatccctgaggagacagccagcagcacagcccacctgtgggagaagaaggacaccaagaccctgaagatgtggttcctggaggagagcaatgaaacagagaagatcgcccccaccacagagctggtgcccaagggggagatgatcaagatgaacatcgacagcatcttcatcgtgctggaggccggcatcggccacaggacagtgcccatgctgctggccaagagccgcttcagcggggagggcaagaactggagcagcctcatcaacctgcactgccagctggagctggaggtgcactactacaatgagatgtttggagtgtgggagcccctgctggagcccctggagattgaccagacagaggacttccggccctggaacctgggcatcaagatgaagaagaaggccaagatggccatcgtggagagtgaccctgaggaggagaactacaaggtgcctgagtacaagacagtcatctccttccacagcaaggaccagctgaacatcaccctgagcaaatgtggcctggtgatgctgaacaacctggtgaaggccttcacagaagctgccaccggcagcagcgctgactttgtgaaggacctggcccccttcatgatcctgaacagcctgggcctgaccatctctgtgagccccagcgacagcttctctgtgctgaacatccccatggccaagagctatgtgctgaagaatggagagagcctgtccatggactacatccgcaccaaggacaatgaccacttcaatgccatgaccagcctgagcagcaagctgttcttcatcctgctgacccctgtgaaccacagcacagctgacaagatccccctgaccaaggtgggcagaagactctacacagtgcgccaccgggagagcggcgtggagaggagcatcgtgtgccagattgacacagtggagggcagcaagaaggtgaccatccgcagccctgtgcagatccggaaccacttctctgtgcccctgtctgtgtatgaaggagacaccctgctgggcacagccagcccagaaaatgagttcaacatccccctgggcagctaccgctccttcatcttcctgaagccagaagatgagaactaccagatgtgtgagggcatcgactttgaggagatcatcaagaatgatggagccctgctgaagaagaagtgccgcagcaagaaccccagcaaggagagcttcctgatcaacatcgtgcctgagaaggacaacctgaccagcctgtctgtgtacagtgaagatggctgggacctgccctacatcatgcacctgtggccacccatcctgctgaggaacctgctgccctacaagatcgcctactacatcgagggcattgaaaattctgtgttcaccctgtctgagggccacagcgcccagatctgcacagcccagctgggcaaggcccggctgcacctgaagctgctggactacctgaaccacgactggaagtctgagtaccacatcaagcccaaccagcaggacatcagctttgtgtccttcacctgtgtgacagagatggagaagacagacctggacattgctgtgcacatgacctacaacacaggccagacagtggtggccttccacagcccctactggatggtgaacaagacaggccgcatgctgcagtacaaggcagatggcatccacaggaagcacccccccaactacaagaagcctgtgctcttctccttccagcccaaccacttcttcaacaacaacaaggtgcagctgatggtgacagacagcgagctgagcaaccagttcagcattgacacagtgggcagccacggggctgtgaagtgcaagggcctgaagatggactaccaggtgggcgtgaccatcgacctgagcagcttcaacatcacccgcatcgtgaccttcacccccttctacatgatcaagaacaagagcaagtaccacatctctgtggccgaggagggcaatgacaagtggctgagcctggacctggagcagtgcatccccttctggccagaatatgccagcagcaagctgctgatccaggtggagaggagtgaagatcctcccaagaggatctacttcaacaagcaggagaactgcatcctgctgcggctggacaatgagctgggcggcatcatcgccgaggtgaacctggccgagcacagcaccgtcatcaccttcctggactaccatgatggagctgccaccttcctgctgatcaaccacaccaagaatgagctggtgcagtacaaccagagcagcctgtctgaaattgaggacagcctgcccccaggcaaggctgtgttctacacctgggccgaccctgtgggcagccggcggctgaagtggcgctgcaggaagagccacggggaggtgacccagaaggatgacatgatgatgcccatcgacctgggggagaagaccatctacctggtgtccttctttgagggcctgcagaggatcatcctcttcacagaggaccccagggtcttcaaggtgacctatgagagcgagaaggccgagctggccgagcaggagattgctgtggccctgcaggatgtgggcatcagcctggtgaacaactacaccaagcaggaggtggcctacatcggcatcaccagcagtgatgtggtgtgggagaccaagcccaagaagaaggcccgctggaagcccatgtctgtgaagcacacagagaagctggagcgggagttcaaggagtacacagagagcagccccagcgaggacaaggtgatccagctggacaccaacgtgcctgtgcggctgacccccaccggccacaacatgaagatcctgcagccccacgtgattgccctgcggaggaactacctgcctgccctgaaggtggagtacaacaccagcgcccaccagagcagcttccgcatccagatctaccgcatccagatccagaaccagatccatggagctgtgttcccctttgtgttctaccctgtgaagccacccaagtctgtgaccatggacagcgcccccaagcccttcacagatgtgtccatcgtgatgaggtctgctggccacagccagatcagccgcatcaagtacttcaaggtgctgatccaggagatggacctgcggctggacctgggcttcatctatgccctgacagacctgatgacagaggccgaggtgacagagaacacagaggtggagctgttccacaaggacatcgaggccttcaaggaggagtacaagacagccagcctggtggaccagagccaggtgtccctgtatgagtacttccacatcagccccatcaagctgcacctgtctgtgtccctgagcagcggccgggaggaggccaaggacagcaagcagaatggaggcctcatccctgtgcacagcctgaacctgctgctgaagagcattggagccaccctgacagatgtgcaggatgtggtgttcaagctggccttctttgagctgaactaccagttccacaccaccagtgacctgcagagcgaggtgatccgccactacagcaagcaggccatcaagcagatgtatgtgctgatcctgggcctggatgtgctgggcaaccccttcggcctcatccgggagttcagcgagggcgtggaggccttcttctatgagccctaccagggcgccatccagggccctgaggagtttgtggagggcatggccctgggcctgaaggccctggtgggcggcgctgtgggcggcctggccggggccgccagcaagatcactggagccatggccaagggcgtggccgccatgaccatggatgaggactaccagcagaagagaagagaggccatgaacaagcagcctgctggcttccgggagggcatcacccggggcggcaagggcctggtgtctggctttgtgtctggcatcaccggcatcgtgaccaagcccatcaagggggcccagaagggcggggccgccggcttcttcaagggcgtgggcaagggcctggtgggcgctgtggcccggcccaccggcggcatcatcgacatggccagcagcaccttccagggcatcaagagggccacagagaccagcgaggtggagagcctgcggcccccacgcttcttcaatgaagatggagtcatccggccctaccgcctgagagatggcactggaaaccagatgctgcagaagatccagttctaccgggagtggatcatgacccacagcagcagcagtgatgatgatgatgatgatgatgatgatgatgaaagtgacctgaaccactag

SEQ ID NO: 22394 - DNA, 9525 bp, synthetic construct
  misc_feature 1..9525: note = Description of Artificial Sequence: Synthetic coding sequence
  source 1..9525: mol_type = other DNA
atggtgtttgaatctgtggtggtggatgtgctgaaccgcttcctgggggactatgtggtggacctggacaccagccagctgagcctgggcatctggaagggagctgtggccctgaagaacctgcagatcaaggaaaatgccctgagccagctggatgtgcccttcaaggtgaaggtgggccacatcggcaacctgaagctgatcatcccctggaagaacctgtacacccagcctgtggaggccgtgctggaggagatctacctgctgattgtgcccagcagccgcatcaagtatgaccccctgaaggaggagaagcagctgatggaggccaagcagcaggagctgaagagaattgaggaggccaagcagaaggtggtggaccaggagcagcacctgcctgagaagcaggacacctttgctgagaagctggtgacccagatcatcaagaacctgcaggtgaagatcagcagcatccacatccgctatgaagatgacatcaccaacagagacaagcccctgagctttggcatcagcctgcagaacctgtccatgcagaccacagaccagtactgggtgccctgcctgcatgatgaaacagagaagctggtgaggaagctgatccggctggacaacctgtttgcctactggaatgtgaagagccagatgttctacctgagtgactatgacaacagcctggatgacctgaagaatggaattgtgaatgaaaacatcgtgcctgagggctatgactttgtgttccggcccatcagcgccaatgccaagctggtgatgaacagaagaagtgactttgacttcagcgcccccaagatcaacctggagattgagctgcacaacatcgccatcgagttcaacaagccccagtacttcagcatcatggagctgctggagagcgtggacatgatggcccagaacctgccctacaggaagttcaagccagatgtgcccctgcaccaccacgcccgggagtggtgggcctatgccatccacggcgtgctggaggtgaatgtgtgcccccggctgtggatgtggagctggaagcacatcaggaagcaccggcagaaggtgaagcagtacaaggagctgtacaagaagaagctgaccagcaagaagcccccaggagagctgctggtgtccctggaggagctggagaagaccctggatgtgttcaacatcaccatcgcccggcagacagctgaggtggaggtgaagaaggccggctacaagatctacaaggagggcgtgaaggaccctgaggacaacaagggctggttctcctggctgtggagctggagcgagcagaacaccaatgagcagcagccagatgtgcagcctgagaccctggaggagatgctgaccccagaggagaaggccctgctgtatgaggccatcggctacagcgagacagctgtggaccccaccctgctgaagacctttgaggccctgaagttctttgtgcacctgaagtccatgagcatcgtgctgcgggagaaccaccagaagccagagctggtggacatcgtgattgaggagttcagcaccctcatcgtgcagaggcctggggcccaggccatcaagtttgagaccaagattgacagcttccacatcaccggcctgcctgacaacagcgagaagccccggctgctgagcagcctggatgatgccatgagcctcttccagatcacctttgagatcaaccccctggatgaaacagtgtcccagcgctgcatcatcgaggccgagcccctggagatcatctatgatgccaggacagtgaacagcatcgtggagttcttccggccccccaaggaggtgcacctggcccagctgacagctgccaccctgaccaagctggaggagttccgcagcaagacagccaccggcctgctgtacatcatcgagacccagaaggtgctggacctgaagatcaacctgaaggccagctacatcatcgtgccccaggacggcatcttcagccccaccagcaacctgctgctgctggacctgggccacctgaaggtgaccagcaagagccgctctgagctgcctgatgtgaagcagggcgaggccaacctgaaggagatcatggaccgggcctatgacagctttgacatccagctgacctctgtgcagctgctgtacagccgggtgggggacaactggagggaggccaggaagctgtctgtgtccacccagcacatcctggtgcccatgcacttcaacctggagctgagcaaggccatggtgttcatggatgtgaggatgcccaagttcaagatctacggcaagctgcccctcatcagcctgcgcatcagtgacaagaagctgcagggcatcatggagctgattgagagcatccccaagccagagcctgtgacagaggtgtctgcccctgtgaagagcttccagatccagaccagcaccagcctgggcaccagccagatcagccagaagatcatccccctgctggagctgcccagcgtgtctgaagatgattctgaggaggagttctttgatgccccctgcagccccctggaggagcccctgcagttccccactggagtgaagagcatccgcaccaggaagctgcagaagcaggactgcagcgtgaacatgaccaccttcaagatccgctttgaggtgcccaaggtgctgattgagttctaccacctggtgggggactgtgagctgtctgtggtggagatcctggtgctgggcctgggcgctgagattgagatccgcacctatgacctgaaggccaatgccttcctgaaggagttctgcctgaagtgcccagagtacctggatgagaacaagaagcctgtgtacctggtgaccaccctggacaacaccatggaggacctgctgaccctggagtatgtgaaggccgagaagaatgtgcctgacctgaagagcacctacaacaacgtgctgcagctgatcaaggtgaacttcagcagcctggacatccacctgcacacagaggccctgctgaacaccatcaactacctgcacaacatcctgccccagagcgaggagaagagcgcccctgtgtccaccacagaaacagaggacaagggagatgtgatcaagaagctggccctgaagctgagcaccaatgaagacatcatcaccctgcagatcctggccgagctgagctgcctgcagatcttcatccaggaccagaagtgcaacatcagcgagatcaagattgagggcctggacagcgagatgatcatgaggccttctgaaacagagatcaatgccaagctgaggaacatcatcgtgctggacagcgacatcacagccatctacaagaaggctgtgtacatcaccgggaaggaggtgttctccttcaagatggtgtcctacatggatgccacagctggcagcgcctacacagacatgaatgtggtggacatccaggtgaacctgattgtgggctgcatcgaggtggtgtttgtgaccaagttcctgtacagcatcctggccttcatcgacaacttccaggccgccaagcaggccctggccgaggccaccgtgcaggccgccggcatggccgccactggagtgaaggagctggcccagaggagcagcaggatggccctggacatcaacatcaaggcccctgtggtggtgatcccccagagccctgtgtctgaaaatgtgtttgtggccgactttggcctcatcaccatgaccaacaccttccacatgatcacagagagccagagcagccccccacctgtgattgacctgatcaccatcaagctgtctgagatgaggctgtaccgcagccgcttcatcaatgatgcctaccaggaggtgctggacctgctgctgcccctgaacctggaggtggtggtggagaggaacctgtgctgggagtggtaccaggaggtgccctgcttcaacgtgaatgcccagctgaagcccatggagttcatcctgagccaggaggacatcaccaccatcttcaagaccctgcacggcaacatctggtatgagaaggatggcagcgccagccctgctgtgaccaaggaccagtacagcgccaccagcggcgtgaccaccaatgccagccaccacagcggcggggccaccgtggtgacagctgctgtggtggaggtgcacagccgggccctgctggtgaagaccaccctgaacatctccttcaagacagatgacctgaccatggtgctgtacagccctggccccaagcaggccagcttcacagatgtgcgggaccccagcctgaagctggccgagttcaagctggagaacatcatcagcaccctgaagatgtacacagatggcagcaccttcagcagcttcagcctgaagaactgcatcctggatgacaagaggccccacgtgaagaaggccacccccaggatgattggcctgactgtgggctttgacaagaaggacatgatggacatcaagtacaggaaggtgagagatggctgtgtgacagatgctgtgttccaggagatgtacatctgtgcctctgtggagttcctgcagacagtggccaacgtgttcctggaggcctacaccactggaacagctgtggagacctctgtgcagacctggacagccaaggaggaggtgcccacccaggagagcgtgaagtgggagatcaacgtcatcatcaagaaccctgagatcgtgtttgtggccgacatgaccaagaatgatgccccagccctggtgatcaccacccagtgtgagatctgctacaagggcaacctggagaacagcaccatgacagctgccatcaaggacctgcaggtgcgggcctgccccttcctgcctgtgaagaggaagggcaagatcaccaccgtgctgcagccctgtgacctcttctaccagaccacccagaagggcacagacccccaggtgattgacatgtctgtgaagagcctgaccctgaaggtgtcccctgtgatcatcaacaccatgatcaccatcaccagcgccctgtacaccaccaaggagaccatccctgaggagacagccagcagcacagcccacctgtgggagaagaaggacaccaagaccctgaagatgtggttcctggaggagagcaatgaaacagagaagatcgcccccaccacagagctggtgcccaagggggagatgatcaagatgaacatcgacagcatcttcatcgtgctggaggccggcatcggccacaggacagtgcccatgctgctggccaagagccgcttcagcggggagggcaagaactggagcagcctcatcaacctgcactgccagctggagctggaggtgcactactacaatgagatgtttggagtgtgggagcccctgctggagcccctggagattgaccagacagaggacttccggccctggaacctgggcatcaagatgaagaagaaggccaagatggccatcgtggagagtgaccctgaggaggagaactacaaggtgcctgagtacaagacagtcatctccttccacagcaaggaccagctgaacatcaccctgagcaaatgtggcctggtgatgctgaacaacctggtgaaggccttcacagaagctgccaccggcagcagcgctgactttgtgaaggacctggcccccttcatgatcctgaacagcctgggcctgaccatctctgtgagccccagcgacagcttctctgtgctgaacatccccatggccaagagctatgtgctgaagaatggagagagcctgtccatggactacatccgcaccaaggacaatgaccacttcaatgccatgaccagcctgagcagcaagctgttcttcatcctgctgacccctgtgaaccacagcacagctgacaagatccccctgaccaaggtgggcagaagactctacacagtgcgccaccgggagagcggcgtggagaggagcatcgtgtgccagattgacacagtggagggcagcaagaaggtgaccatccgcagccctgtgcagatccggaaccacttctctgtgcccctgtctgtgtatgaaggagacaccctgctgggcacagccagcccagaaaatgagttcaacatccccctgggcagctaccgctccttcatcttcctgaagccagaagatgagaactaccagatgtgtgagggcatcgactttgaggagatcatcaagaatgatggagccctgctgaagaagaagtgccgcagcaagaaccccagcaaggagagcttcctgatcaacatcgtgcctgagaaggacaacctgaccagcctgtctgtgtacagtgaagatggctgggacctgccctacatcatgcacctgtggccacccatcctgctgaggaacctgctgccctacaagatcgcctactacatcgagggcattgaaaattctgtgttcaccctgtctgagggccacagcgcccagatctgcacagcccagctgggcaaggcccggctgcacctgaagctgctggactacctgaaccacgactggaagtctgagtaccacatcaagcccaaccagcaggacatcagctttgtgtccttcacctgtgtgacagagatggagaagacagacctggacattgctgtgcacatgacctacaacacaggccagacagtggtggccttccacagcccctactggatggtgaacaagacaggccgcatgctgcagtacaaggcagatggcatccacaggaagcacccccccaactacaagaagcctgtgctcttctccttccagcccaaccacttcttcaacaacaacaaggtgcagctgatggtgacagacagcgagctgagcaaccagttcagcattgacacagtgggcagccacggggctgtgaagtgcaagggcctgaagatggactaccaggtgggcgtgaccatcgacctgagcagcttcaacatcacccgcatcgtgaccttcacccccttctacatgatcaagaacaagagcaagtaccacatctctgtggccgaggagggcaatgacaagtggctgagcctggacctggagcagtgcatccccttctggccagaatatgccagcagcaagctgctgatccaggtggagaggagtgaagatcctcccaagaggatctacttcaacaagcaggagaactgcatcctgctgcggctggacaatgagctgggcggcatcatcgccgaggtgaacctggccgagcacagcaccgtcatcaccttcctggactaccatgatggagctgccaccttcctgctgatcaaccacaccaagaatgagctggtgcagtacaaccagagcagcctgtctgaaattgaggacagcctgcccccaggcaaggctgtgttctacacctgggccgaccctgtgggcagccggcggctgaagtggcgctgcaggaagagccacggggaggtgacccagaaggatgacatgatgatgcccatcgacctgggggagaagaccatctacctggtgtccttctttgagggcctgcagaggatcatcctcttcacagaggaccccagggtcttcaaggtgacctatgagagcgagaaggccgagctggccgagcaggagattgctgtggccctgcaggatgtgggcatcagcctggtgaacaactacaccaagcaggaggtggcctacatcggcatcaccagcagtgatgtggtgtgggagaccaagcccaagaagaaggcccgctggaagcccatgtctgtgaagcacacagagaagctggagcgggagttcaaggagtacacagagagcagccccagcgaggacaaggtgatccagctggacaccaacgtgcctgtgcggctgacccccaccggccacaacatgaagatcctgcagccccacgtgattgccctgcggaggaactacctgcctgccctgaaggtggagtacaacaccagcgcccaccagagcagcttccgcatccagatctaccgcatccagatccagaaccagatccatggagctgtgttcccctttgtgttctaccctgtgaagccacccaagtctgtgaccatggacagcgcccccaagcccttcacagatgtgtccatcgtgatgaggtctgctggccacagccagatcagccgcatcaagtacttcaaggtgctgatccaggagatggacctgcggctggacctgggcttcatctatgccctgacagacctgatgacagaggccgaggtgacagagaacacagaggtggagctgttccacaaggacatcgaggccttcaaggaggagtacaagacagccagcctggtggaccagagccaggtgtccctgtatgagtacttccacatcagccccatcaagctgcacctgtctgtgtccctgagcagcggccgggaggaggccaaggacagcaagcagaatggaggcctcatccctgtgcacagcctgaacctgctgctgaagagcattggagccaccctgacagatgtgcaggatgtggtgttcaagctggccttctttgagctgaactaccagttccacaccaccagtgacctgcagagcgaggtgatccgccactacagcaagcaggccatcaagcagatgtatgtgctgatcctgggcctggatgtgctgggcaaccccttcggcctcatccgggagttcagcgagggcgtggaggccttcttctatgagccctaccagggcgccatccagggccctgaggagtttgtggagggcatggccctgggcctgaaggccctggtgggcggcgctgtgggcggcctggccggggccgccagcaagatcactggagccatggccaagggcgtggccgccatgaccatggatgaggactaccagcagaagagaagagaggccatgaacaagcagcctgctggcttccgggagggcatcacccggggcggcaagggcctggtgtctggctttgtgtctggcatcaccggcatcgtgaccaagcccatcaagggggcccagaagggcggggccgccggcttcttcaagggcgtgggcaagggcctggtgggcgctgtggcccggcccaccggcggcatcatcgacatggccagcagcaccttccagggcatcaagagggccacagagaccagcgaggtggagagcctgcggcccccacgcttcttcaatgaagatggagtcatccggccctaccgcctgagagatggcactggaaaccagatgctgcaggtgatggagaatggccgctttgccaagtacaagtacttcacccacgtgatgatcaacaagacagacatgctgatgatcaccaggagaggagtgctgtttgtgaccaagggcaccttcggccagctgacctgtgagtggcagtacagctttgatgagttcaccaaggagcccttcatcgtgcacggccggcggctgcgcatcgaggccaaggagcgggtgaagagcgtcttccacgcccgggagtttgggaagatcatcaacttcaagaccccagaagatgcccgctggatcctgaccaagctgcaggaggcccgggagcccagccccagcctgtag

SEQ ID NO: 22395 - DNA, 9210 bp, synthetic construct
  misc_feature 1..9210: note = Description of Artificial Sequence: Synthetic coding sequence
  source 1..9210: mol_type = other DNA
atggtgtttgaatctgtggtggtggatgtgctgaaccgcttcctgggggactatgtggtggacctggacaccagccagctgagcctgggcatctggaagggagctgtggccctgaagaacctgcagatcaaggaaaatgccctgagccagctggatgtgcccttcaaggtgaaggtgggccacatcggcaacctgaagctgatcatcccctggaagaacctgtacacccagcctgtggaggccgtgctggaggagatctacctgctgattgtgcccagcagccgcatcaagtatgaccccctgaaggaggagaagcagctgatggaggccaagcagcaggagctgaagagaattgaggaggccaagcagaaggtggtggaccaggagcagcacctgcctgagaagcaggacacctttgctgagaagctggtgacccagatcatcaagaacctgcaggtgaagatcagcagcatccacatccgctatgaagatgacatcaccaacagagacaagcccctgagctttggcatcagcctgcagaacctgtccatgcagaccacagaccagtactgggtgccctgcctgcatgatgaaacagagaagctggtgaggaagctgatccggctggacaacctgtttgcctactggaatgtgaagagccagatgttctacctgagtgactatgacaacagcctggatgacctgaagaatggaattgtgaatgaaaacatcgtgcctgagggctatgactttgtgttccggcccatcagcgccaatgccaagctggtgatgaacagaagaagtgactttgacttcagcgcccccaagatcaacctggagattgagctgcacaacatcgccatcgagttcaacaagccccagtacttcagcatcatggagctgctggagagcgtggacatgatggcccagaacctgccctacaggaagttcaagccagatgtgcccctgcaccaccacgcccgggagtggtgggcctatgccatccacggcgtgctggaggtgaatgtgtgcccccggctgtggatgtggagctggaagcacatcaggaagcaccggcagaaggtgaagcagtacaaggagctgtacaagaagaagctgaccagcaagaagcccccaggagagctgctggtgtccctggaggagctggagaagaccctggatgtgttcaacatcaccatcgcccggcagacagctgaggtggaggtgaagaaggccggctacaagatctacaaggagggcgtgaaggaccctgaggacaacaagggctggttctcctggctgtggagctggagcgagcagaacaccaatgagcagcagccagatgtgcagcctgagaccctggaggagatgctgaccccagaggagaaggccctgctgtatgaggccatcggctacagcgagacagctgtggaccccaccctgctgaagacctttgaggccctgaagttctttgtgcacctgaagtccatgagcatcgtgctgcgggagaaccaccagaagccagagctggtggacatcgtgattgaggagttcagcaccctcatcgtgcagaggcctggggcccaggccatcaagtttgagaccaagattgacagcttccacatcaccggcctgcctgacaacagcgagaagccccggctgctgagcagcctggatgatgccatgagcctcttccagatcacctttgagatcaaccccctggatgaaacagtgtcccagcgctgcatcatcgaggccgagcccctggagatcatctatgatgccaggacagtgaacagcatcgtggagttcttccggccccccaaggaggtgcacctggcccagctgacagctgccaccctgaccaagctggaggagttccgcagcaagacagccaccggcctgctgtacatcatcgagacccagaaggtgctggacctgaagatcaacctgaaggccagctacatcatcgtgccccaggacggcatcttcagccccaccagcaacctgctgctgctggacctgggccacctgaaggtgaccagcaagagccgctctgagctgcctgatgtgaagcagggcgaggccaacctgaaggagatcatggaccgggcctatgacagctttgacatccagctgacctctgtgcagctgctgtacagccgggtgggggacaactggagggaggccaggaagctgtctgtgtccacccagcacatcctggtgcccatgcacttcaacctggagctgagcaaggccatggtgttcatggatgtgaggatgcccaagttcaagatctacggcaagctgcccctcatcagcctgcgcatcagtgacaagaagctgcagggcatcatggagctgattgagagcatccccaagccagagcctgtgacagaggtgtctgcccctgtgaagagcttccagatccagaccagcaccagcctgggcaccagccagatcagccagaagatcatccccctgctggagctgcccagcgtgtctgaagatgattctgaggaggagttctttgatgccccctgcagccccctggaggagcccctgcagttccccactggagtgaagagcatccgcaccaggaagctgcagaagcaggactgcagcgtgaacatgaccaccttcaagatccgctttgaggtgcccaaggtgctgattgagttctaccacctggtgggggactgtgagctgtctgtggtggagatcctggtgctgggcctgggcgctgagattgagatccgcacctatgacctgaaggccaatgccttcctgaaggagttctgcctgaagtgcccagagtacctggatgagaacaagaagcctgtgtacctggtgaccaccctggacaacaccatggaggacctgctgaccctggagtatgtgaaggccgagaagaatgtgcctgacctgaagagcacctacaacaacgtgctgcagctgatcaaggtgaacttcagcagcctggacatccacctgcacacagaggccctgctgaacaccatcaactacctgcacaacatcctgccccagagcgaggagaagagcgcccctgtgtccaccacagaaacagaggacaagggagatgtgatcaagaagctggccctgaagctgagcaccaatgaagacatcatcaccctgcagatcctggccgagctgagctgcctgcagatcttcatccaggaccagaagtgcaacatcagcgagatcaagattgagggcctggacagcgagatgatcatgaggccttctgaaacagagatcaatgccaagctgaggaacatcatcgtgctggacagcgacatcacagccatctacaagaaggctgtgtacatcaccgggaaggaggtgttctccttcaagatggtgtcctacatggatgccacagctggcagcgcctacacagacatgaatgtggtggacatccaggtgaacctgattgtgggctgcatcgaggtggtgtttgtgaccaagttcctgtacagcatcctggccttcatcgacaacttccaggccgccaagcaggccctggccgaggccaccgtgcaggccgccggcatggccgccactggagtgaaggagctggcccagaggagcagcaggatggccctggacatcaacatcaaggcccctgtggtggtgatcccccagagccctgtgtctgaaaatgtgtttgtggccgactttggcctcatcaccatgaccaacaccttccacatgatcacagagagccagagcagccccccacctgtgattgacctgatcaccatcaagctgtctgagatgaggctgtaccgcagccgcttcatcaatgatgcctaccaggaggtgctggacctgctgctgcccctgaacctggaggtggtggtggagaggaacctgtgctgggagtggtaccaggaggtgccctgcttcaacgtgaatgcccagctgaagcccatggagttcatcctgagccaggaggacatcaccaccatcttcaagaccctgcacggcaacatctggtatgagaaggatggcagcgccagccctgctgtgaccaaggaccagtacagcgccaccagcggcgtgaccaccaatgccagccaccacagcggcggggccaccgtggtgacagctgctgtggtggaggtgcacagccgggccctgctggtgaagaccaccctgaacatctccttcaagacagatgacctgaccatggtgctgtacagccctggccccaagcaggccagcttcacagatgtgcgggaccccagcctgaagctggccgagttcaagctggagaacatcatcagcaccctgaagatgtacacagatggcagcaccttcagcagcttcagcctgaagaactgcatcctggatgacaagaggccccacgtgaagaaggccacccccaggatgattggcctgactgtgggctttgacaagaaggacatgatggacatcaagtacaggaaggtgagagatggctgtgtgacagatgctgtgttccaggagatgtacatctgtgcctctgtggagttcctgcagacagtggccaacgtgttcctggaggcctacaccactggaacagctgtggagacctctgtgcagacctggacagccaaggaggaggtgcccacccaggagagcgtgaagtgggagatcaacgtcatcatcaagaaccctgagatcgtgtttgtggccgacatgaccaagaatgatgccccagccctggtgatcaccacccagtgtgagatctgctacaagggcaacctggagaacagcaccatgacagctgccatcaaggacctgcaggtgcgggcctgccccttcctgcctgtgaagaggaagggcaagatcaccaccgtgctgcagccctgtgacctcttctaccagaccacccagaagggcacagacccccaggtgattgacatgtctgtgaagagcctgaccctgaaggtgtcccctgtgatcatcaacaccatgatcaccatcaccagcgccctgtacaccaccaaggagaccatccctgaggagacagccagcagcacagcccacctgtgggagaagaaggacaccaagaccctgaagatgtggttcctggaggagagcaatgaaacagagaagatcgcccccaccacagagctggtgcccaagggggagatgatcaagatgaacatcgacagcatcttcatcgtgctggaggccggcatcggccacaggacagtgcccatgctgctggccaagagccgcttcagcggggagggcaagaactggagcagcctcatcaacctgcactgccagctggagctggaggtgcactactacaatgagatgtttggagtgtgggagcccctgctggagcccctggagattgaccagacagaggacttccggccctggaacctgggcatcaagatgaagaagaaggccaagatggccatcgtggagagtgaccctgaggaggagaactacaaggtgcctgagtacaagacagtcatctccttccacagcaaggaccagctgaacatcaccctgagcaaatgtggcctggtgatgctgaacaacctggtgaaggccttcacagaagctgccaccggcagcagcgctgactttgtgaaggacctggcccccttcatgatcctgaacagcctgggcctgaccatctctgtgagccccagcgacagcttctctgtgctgaacatccccatggccaagagctatgtgctgaagaatggagagagcctgtccatggactacatccgcaccaaggacaatgaccacttcaatgccatgaccagcctgagcagcaagctgttcttcatcctgctgacccctgtgaaccacagcacagctgacaagatccccctgaccaaggtgggcagaagactctacacagtgcgccaccgggagagcggcgtggagaggagcatcgtgtgccagattgacacagtggagggcagcaagaaggtgaccatccgcagccctgtgcagatccggaaccacttctctgtgcccctgtctgtgtatgaaggagacaccctgctgggcacagccagcccagaaaatgagttcaacatccccctgggcagctaccgctccttcatcttcctgaagccagaagatgagaactaccagatgtgtgagggcatcgactttgaggagatcatcaagaatgatggagccctgctgaagaagaagtgccgcagcaagaaccccagcaaggagagcttcctgatcaacatcgtgcctgagaaggacaacctgaccagcctgtctgtgtacagtgaagatggctgggacctgccctacatcatgcacctgtggccacccatcctgctgaggaacctgctgccctacaagatcgcctactacatcgagggcattgaaaattctgtgttcaccctgtctgagggccacagcgcccagatctgcacagcccagctgggcaaggcccggctgcacctgaagctgctggactacctgaaccacgactggaagtctgagtaccacatcaagcccaaccagcaggacatcagctttgtgtccttcacctgtgtgacagagatggagaagacagacctggacattgctgtgcacatgacctacaacacaggccagacagtggtggccttccacagcccctactggatggtgaacaagacaggccgcatgctgcagtacaaggcagatggcatccacaggaagcacccccccaactacaagaagcctgtgctcttctccttccagcccaaccacttcttcaacaacaacaaggtgcagctgatggtgacagacagcgagctgagcaaccagttcagcattgacacagtgggcagccacggggctgtgaagtgcaagggcctgaagatggactaccaggtgggcgtgaccatcgacctgagcagcttcaacatcacccgcatcgtgaccttcacccccttctacatgatcaagaacaagagcaagtaccacatctctgtggccgaggagggcaatgacaagtggctgagcctggacctggagcagtgcatccccttctggccagaatatgccagcagcaagctgctgatccaggtggagaggagtgaagatcctcccaagaggatctacttcaacaagcaggagaactgcatcctgctgcggctggacaatgagctgggcggcatcatcgccgaggtgaacctggccgagcacagcaccgtcatcaccttcctggactaccatgatggagctgccaccttcctgctgatcaaccacaccaagaatgagctggtgcagtacaaccagagcagcctgtctgaaattgaggacagcctgcccccaggcaaggctgtgttctacacctgggccgaccctgtgggcagccggcggctgaagtggcgctgcaggaagagccacggggaggtgacccagaaggatgacatgatgatgcccatcgacctgggggagaagaccatctacctggtgtccttctttgagggcctgcagaggatcatcctcttcacagaggaccccagggtcttcaaggtgacctatgagagcgagaaggccgagctggccgagcaggagattgctgtggccctgcaggatgtgggcatcagcctggtgaacaactacaccaagcaggaggtggcctacatcggcatcaccagcagtgatgtggtgtgggagaccaagcccaagaagaaggcccgctggaagcccatgtctgtgaagcacacagagaagctggagcgggagttcaaggagtacacagagagcagccccagcgaggacaaggtgatccagctggacaccaacgtgcctgtgcggctgacccccaccggccacaacatgaagatcctgcagccccacgtgattgccctgcggaggaactacctgcctgccctgaaggtggagtacaacaccagcgcccaccagagcagcttccgcatccagatctaccgcatccagatccagaaccagatccatggagctgtgttcccctttgtgttctaccctgtgaagccacccaagtctgtgaccatggacagcgcccccaagcccttcacagatgtgtccatcgtgatgaggtctgctggccacagccagatcagccgcatcaagtacttcaaggtgctgatccaggagatggacctgcggctggacctgggcttcatctatgccctgacagacctgatgacagaggccgaggtgacagagaacacagaggtggagctgttccacaaggacatcgaggccttcaaggaggagtacaagacagccagcctggtggaccagagccaggtgtccctgtatgagtacttccacatcagccccatcaagctgcacctgtctgtgtccctgagcagcggccgggaggaggccaaggacagcaagcagaatggaggcctcatccctgtgcacagcctgaacctgctgctgaagagcattggagccaccctgacagatgtgcaggatgtggtgttcaagctggccttctttgagctgaactaccagttccacaccaccagtgacctgcagagcgaggtgatccgccactacagcaagcaggccatcaagcagatgtatgtgctgatcctgggcctggatgtgctgggcaaccccttcggcctcatccgggagttcagcgagggcgtggaggccttcttctatgagccctaccagggcgccatccagggccctgaggagtttgtggagggcatggccctgggcctgaaggccctggtgggcggcgctgtgggcggcctggccggggccgccagcaagatcactggagccatggccaagggcgtggccgccatgaccatggatgaggactaccagcagaagagaagagaggccatgaacaagcagcctgctggcttccgggagggcatcacccggggcggcaagggcctggtgtctggctttgtgtctggcatcaccggcatcgtgaccaagcccatcaagggggcccagaagggcggggccgccggcttcttcaagggcgtgggcaagggcctggtgggcgctgtggcccggcccaccggcggcatcatcgacatggccagcagcaccttccagggcatcaagagggccacagagaccagcgaggtggagagcctgcggcccccacgcttcttcaatgaagatggagtcatccggccctaccgcctgagagatggcactggaaaccagatgctgcaggccagcaagagcctcatctag

SEQ ID NO: 22396 - DNA, 9408 bp, synthetic construct
  misc_feature 1..9408: note = Description of Artificial Sequence: Synthetic coding sequence
  source 1..9408: mol_type = other DNA
atggtgtttgaatctgtggtggtggatgtgctgaaccgcttcctgggggactatgtggtggacctggacaccagccagctgagcctgggcatctggaagggagctgtggccctgaagaacctgcagatcaaggaaaatgccctgagccagctggatgtgcccttcaaggtgaaggtgggccacatcggcaacctgaagctgatcatcccctggaagaacctgtacacccagcctgtggaggccgtgctggaggagatctacctgctgattgtgcccagcagccgcatcaagtatgaccccctgaaggaggagaagcagctgatggaggccaagcagcaggagctgaagagaattgaggaggccaagcagaaggtggtggaccaggagcagcacctgcctgagaagcaggacacctttgctgagaagctggtgacccagatcatcaagaacctgcaggtgaagatcagcagcatccacatccgctatgaagatgacatcaccaacagagacaagcccctgagctttggcatcagcctgcagaacctgtccatgcagaccacagaccagtactgggtgccctgcctgcatgatgaaacagagaagctggtgaggaagctgatccggctggacaacctgtttgcctactggaatgtgaagagccagatgttctacctgagtgactatgacaacagcctggatgacctgaagaatggaattgtgaatgaaaacatcgtgcctgagggctatgactttgtgttccggcccatcagcgccaatgccaagctggtgatgaacagaagaagtgactttgacttcagcgcccccaagatcaacctggagattgagctgcacaacatcgccatcgagttcaacaagccccagtacttcagcatcatggagctgctggagagcgtggacatgatggcccagaacctgccctacaggaagttcaagccagatgtgcccctgcaccaccacgcccgggagtggtgggcctatgccatccacggcgtgctggaggtgaatgtgtgcccccggctgtggatgtggagctggaagcacatcaggaagcaccggcagaaggtgaagcagtacaaggagctgtacaagaagaagctgaccagcaagaagcccccaggagagctgctggtgtccctggaggagctggagaagaccctggatgtgttcaacatcaccatcgcccggcagacagctgaggtggaggtgaagaaggccggctacaagatctacaaggagggcgtgaaggaccctgaggacaacaagggctggttctcctggctgtggagctggagcgagcagaacaccaatgagcagcagccagatgtgcagcctgagaccctggaggagatgctgaccccagaggagaaggccctgctgtatgaggccatcggctacagcgagacagctgtggaccccaccctgctgaagacctttgaggccctgaagttctttgtgcacctgaagtccatgagcatcgtgctgcgggagaaccaccagaagccagagctggtggacatcgtgattgaggagttcagcaccctcatcgtgcagaggcctggggcccaggccatcaagtttgagaccaagattgacagcttccacatcaccggcctgcctgacaacagcgagaagccccggctgctgagcagcctggatgatgccatgagcctcttccagatcacctttgagatcaaccccctggatgaaacagtgtcccagcgctgcatcatcgaggccgagcccctggagatcatctatgatgccaggacagtgaacagcatcgtggagttcttccggccccccaaggaggtgcacctggcccagctgacagctgccaccctgaccaagctggaggagttccgcagcaagacagccaccggcctgctgtacatcatcgagacccagaaggtgctggacctgaagatcaacctgaaggccagctacatcatcgtgccccaggacggcatcttcagccccaccagcaacctgctgctgctggacctgggccacctgaaggtgaccagcaagagccgctctgagctgcctgatgtgaagcagggcgaggccaacctgaaggagatcatggaccgggcctatgacagctttgacatccagctgacctctgtgcagctgctgtacagccgggtgggggacaactggagggaggccaggaagctgtctgtgtccacccagcacatcctggtgcccatgcacttcaacctggagctgagcaaggccatggtgttcatggatgtgaggatgcccaagttcaagatctacggcaagctgcccctcatcagcctgcgcatcagtgacaagaagctgcagggcatcatggagctgattgagagcatccccaagccagagcctgtgacagaggtgtctgcccctgtgaagagcttccagatccagaccagcaccagcctgggcaccagccagatcagccagaagatcatccccctgctggagctgcccagcgtgtctgaagatgattctgaggaggagttctttgatgccccctgcagccccctggaggagcccctgcagttccccactggagtgaagagcatccgcaccaggaagctgcagaagcaggactgcagcgtgaacatgaccaccttcaagatccgctttgaggtgcccaaggtgctgattgagttctaccacctggtgggggactgtgagctgtctgtggtggagatcctggtgctgggcctgggcgctgagattgagatccgcacctatgacctgaaggccaatgccttcctgaaggagttctgcctgaagtgcccagagtacctggatgagaacaagaagcctgtgtacctggtgaccaccctggacaacaccatggaggacctgctgaccctggagtatgtgaaggccgagaagaatgtgcctgacctgaagagcacctacaacaacgtgctgcagctgatcaaggtgaacttcagcagcctggacatccacctgcacacagaggccctgctgaacaccatcaactacctgcacaacatcctgccccagagcgaggagaagagcgcccctgtgtccaccacagaaacagaggacaagggagatgtgatcaagaagctgggcctggacagcgagatgatcatgaggcccagcgagacagagatcaatgccaagctgaggaacatcatcgtgctggacagcgacatcacagccatctacaagaaggctgtgtacatcaccgggaaggaggtgttctccttcaagatggtgtcctacatggatgccacagctggcagcgcctacacagacatgaatgtggtggacatccaggtgaacctgattgtgggctgcatcgaggtggtgtttgtgaccaagttcctgtacagcatcctggccttcatcgacaacttccaggccgccaagcaggccctggccgaggccaccgtgcaggccgccggcatggccgccaccggggtgaaggagctggcccagaggagcagcaggatggccctggacatcaacatcaaggcccctgtggtggtgatcccccagagccctgtgtctgaaaatgtgtttgtggccgactttggcctcatcaccatgaccaacaccttccacatgatcacagagagccagagcagccccccacctgtgattgacctgatcaccatcaagctgtctgagatgaggctgtaccgcagccgcttcatcaatgatgcctaccaggaggtgctggacctgctgctgcccctgaacctggaggtggtggtggagaggaacctgtgctgggagtggtaccaggaggtgccctgcttcaacgtgaatgcccagctgaagcccatggagttcatcctgagccaggaggacatcaccaccatcttcaagaccctgcacggcaacatctggtatgagaaggatggcagcgccagccctgctgtgaccaaggaccagtacagcgccaccagcggcgtgaccaccaatgccagccaccacagcggcggggccaccgtggtgacagctgctgtggtggaggtgcacagccgggccctgctggtgaagaccaccctgaacatctccttcaagacagatgacctgaccatggtgctgtacagccctggccccaagcaggccagcttcacagatgtgcgggaccccagcctgaagctggccgagttcaagctggagaacatcatcagcaccctgaagatgtacacagatggcagcaccttcagcagcttcagcctgaagaactgcatcctggatgacaagaggcctcatgtgaagaaggccacccccaggatgattggcctgactgtgggctttgacaagaaggacatgatggacatcaagtacaggaaggtgagagatggctgtgtgacagatgctgtgttccaggagatgtacatctgtgcctctgtggagttcctgcagacagtggccaacgtgttcctggaggcctacaccaccggcacagctgtggagacctctgtgcagacctggacagccaaggaggaggtgcccacccaggagagcgtgaagtgggagatcaacgtcatcatcaagaaccctgagatcgtgtttgtggccgacatgaccaagaatgatgccccagccctggtgatcaccacccagtgtgagatctgctacaagggcaacctggagaacagcaccatgacagctgccatcaaggacctgcaggtgcgggcctgccccttcctgcctgtgaagaggaagggcaagatcaccaccgtgctgcagccctgtgacctcttctaccagaccacccagaagggcacagacccccaggtgattgacatgtctgtgaagagcctgaccctgaaggtgtcccctgtgatcatcaacaccatgatcaccatcaccagcgccctgtacaccaccaaggagaccatccctgaggagacagccagcagcacagcccacctgtgggagaagaaggacaccaagaccctgaagatgtggttcctggaggagagcaatgaaacagagaagatcgcccccaccacagagctggtgcccaagggggagatgatcaagatgaacatcgacagcatcttcatcgtgctggaggccggcatcggccacaggacagtgcccatgctgctggccaagagccgcttctctggagagggcaagaactggagcagcctcatcaacctgcactgccagctggagctggaggtgcactactacaatgagatgtttggagtgtgggagcccctgctggagcccctggagattgaccagacagaggacttccggccctggaacctgggcatcaagatgaagaagaaggccaagatggccatcgtggagagtgaccctgaggaggagaactacaaggtgcctgagtacaagacagtcatctccttccacagcaaggaccagctgaacatcaccctgagcaaatgtggcctggtgatgctgaacaacctggtgaaggccttcacagaggccgccaccggcagcagcgctgactttgtgaaggacctggcccccttcatgatcctgaacagcctgggcctgaccatctctgtgagccccagcgacagcttctctgtgctgaacatccccatggccaagagctatgtgctgaagaatggagagagcctgtccatggactacatccgcaccaaggacaatgaccacttcaatgccatgaccagcctgagcagcaagctgttcttcatcctgctgacccctgtgaaccacagcacagctgacaagatccccctgaccaaggtgggccggcggctgtacacagtgcgccaccgggagagcggcgtggagaggagcatcgtgtgccagattgacacagtggagggcagcaagaaggtgaccatccgcagccctgtgcagatccggaaccacttctctgtgcccctgtctgtgtatgaaggagacaccctgctgggcacagccagcccagaaaatgagttcaacatccccctgggcagctaccgctccttcatcttcctgaagccagaagatgagaactaccagatgtgtgagggcatcgactttgaggagatcatcaagaatgatggagccctgctgaagaagaagtgccgcagcaagaaccccagcaaggagagcttcctgatcaacatcgtgcctgagaaggacaacctgaccagcctgtctgtgtacagtgaagatggctgggacctgccctacatcatgcacctgtggccacccatcctgctgaggaacctgctgccctacaagatcgcctactacatcgagggcatcgagaacagcgtcttcaccctgtctgagggccacagcgcccagatctgcacagcccagctgggcaaggcccggctgcacctgaagctgctggactacctgaaccacgactggaagtctgagtaccacatcaagcccaaccagcaggacatcagctttgtgtccttcacctgtgtgacagagatggagaagacagacctggacattgctgtgcacatgacctacaacacaggccagacagtggtggccttccacagcccctactggatggtgaacaagacaggccgcatgctgcagtacaaggcagatggcatccacaggaagcacccccccaactacaagaagcctgtgctcttctccttccagcccaaccacttcttcaacaacaacaaggtgcagctgatggtgacagattctgagctgagcaaccagttcagcattgacacagtgggcagccatggagctgtgaagtgcaagggcctgaagatggactaccaggtgggcgtgaccatcgacctgagcagcttcaacatcaccagaattgtgaccttcacccccttctacatgatcaagaacaagagcaagtaccacatctctgtggccgaggagggcaatgacaagtggctgagcctggacctggagcagtgcatccccttctggccagaatatgccagcagcaagctgctgatccaggtggagaggtctgaggacccccccaagaggatctacttcaacaagcaggagaactgcatcctgctgcggctggacaatgagctgggcggcatcatcgccgaggtgaacctggccgagcacagcaccgtcatcaccttcctggactaccatgatggagctgccaccttcctgctgatcaaccacaccaagaatgagctggtgcagtacaaccagagcagcctgtctgaaattgaggacagcctgcccccaggcaaggctgtgttctacacctgggccgaccctgtgggcagccggcggctgaagtggcgctgcaggaagagccatggagaggtgacccagaaggatgacatgatgatgcccatcgacctgggggagaagaccatctacctggtgtccttctttgagggcctgcagaggatcatcctcttcacagaggaccccagggtcttcaaggtgacctatgaaagtgagaaggccgagctggccgagcaggagattgctgtggccctgcaggatgtgggcatcagcctggtgaacaactacaccaagcaggaggtggcctacatcggcatcaccagcagtgatgtggtgtgggagaccaagcccaagaagaaggcccgctggaagcccatgtctgtgaagcacacagagaagctggagcgggagttcaaggagtacacagagagcagccccagcgaggacaaggtgatccagctggacaccaacgtgcctgtgcggctgacccccaccggccacaacatgaagatcctgcagccccacgtgattgccctgcggaggaactacctgcctgccctgaaggtggagtacaacaccagcgcccaccagagcagcttccgcatccagatctaccgcatccagatccagaaccagatccacggggctgtgttcccctttgtgttctaccctgtgaagccacccaagtctgtgaccatggattctgcccccaagcccttcacagatgtgtccatcgtgatgaggtctgctggccacagccagatcagccgcatcaagtacttcaaggtgctgatccaggagatggacctgcggctggacctgggcttcatctatgccctgacagacctgatgacagaagctgaggtgacagaaaatacagaggtggagctgttccacaaggacatcgaggccttcaaggaggagtacaagacagccagcctggtggaccagagccaggtgtccctgtatgagtacttccacatcagccccatcaagctgcacctgtctgtgtccctgagcagcggccgggaggaggccaaggacagcaagcagaatggaggcctcatccctgtgcacagcctgaacctgctgctgaagagcatcggggccaccctgacagatgtgcaggatgtggtgttcaagctggccttctttgagctgaactaccagttccacaccaccagtgacctgcagagcgaggtgatccgccactacagcaagcaggccatcaagcagatgtatgtgctgatcctgggcctggatgtgctgggcaaccccttcggcctcatccgggagttcagcgagggcgtggaggccttcttctatgagccctaccagggcgccatccagggccctgaggagtttgtggagggcatggccctgggcctgaaggccctggtgggcggcgctgtgggcggcctggccggggccgccagcaagatcaccggggccatggccaagggcgtggccgccatgaccatggatgaggactaccagcagaagaggcgggaggccatgaacaagcagcctgctggcttccgggagggcatcacccggggcggcaagggcctggtgtctggctttgtgtctggcatcactggaattgtgaccaagcccatcaagggggcccagaagggcggcgctgctggcttcttcaagggcgtgggcaagggcctggtgggcgctgtggcccggcccactggaggcatcatcgacatggccagcagcaccttccagggcatcaagagggccacagagaccagcgaggtggagagcctgcggcccccacgcttcttcaatgaagatggagtcatccggccctaccgcctgagagatggcaccggcaaccagatgctgcaggtgatggagaatggccgctttgccaagtacaagtacttcacccacgtgatgatcaacaagacagacatgctgatgatcacccggcggggcgtgctgtttgtgaccaagggcaccttcggccagctgacctgtgagtggcagtacagctttgatgagttcaccaaggagcccttcatcgtgcatggaagaaggctgagaattgaggccaaggagcgggtgaagtctgtgttccacgcccgggagtttgggaagatcatcaacttcaagaccccagaagatgcccgctggatcctgaccaagctgcaggaggcccgggagcccagccccagcctgtag

SEQ ID NO: 22397 - DNA, 1317 bp, synthetic construct
  misc_feature 1..1317: note = Description of Artificial Sequence: Synthetic coding sequence
  source 1..1317: mol_type = other DNA
atgaatgaggtgtctgtcatcaaggagggctggctgcacaagagaggagagtacatcaagacctggaggccccgctacttcctgctgaagagtgatggcagcttcatcggctacaaggagaggcctgaggccccagaccagaccctgccccccctgaacaacttctctgtggccgagtgccagctgatgaagacagagcggccccggcccaacacctttgtgatccgctgcctgcagtggaccaccgtcatcgagaggaccttccacgtggacagcccagatgagcgggaggagtggatgagggccatccagatggtggccaacagcctgaagcagagggcccctggagaggaccccatggactacaagtgtggcagccccagcgacagcagcaccacagaggagatggaggtggccgtgtccaaggcccgggccaaggtgaccatgaatgactttgactacctgaagctgctgggcaagggcaccttcggcaaggtgatcctggtgcgggagaaggccaccggccgctactatgccatgaagatcctgaggaaggaggtgatcatcgccaaggatgaggtggcccacacagtgacagagagccgggtgctgcagaacaccaggcaccccttcctgacagccctgaagtatgccttccagacccatgaccggctgtgctttgtgatggagtatgccaatggaggagagctgttcttccacctgagccgggagagggtcttcacagaggagcgggcccgcttctatggagctgagatcgtgtctgccctggagtacctgcacagcagagatgtggtgtacagagacatcaaggtgctggaggacaatgactatggccgggctgtggactggtggggcctgggcgtggtgatgtatgagatgatgtgtggccgcctgcccttctacaaccaggaccacgagcggctgtttgagctgatcctgatggaggagatccgcttccccaggaccctgagccctgaggccaagagcctgctggccggcctgctgaagaaggaccccaagcagaggctgggcggcggccccagtgatgccaaggaggtgatggagcaccgcttcttcctgagcatcaactggcaggatgtggtgcagaagaagctgctgccccccttcaagccccaggtgaccagcgaggtggacacccgctactttgatgatgagttcaccgcccagagcatcaccatcaccccaccagacagatatgacagcctgggcctgctggagctggaccagaggacccacttcccccagttctcctacagcgccagcatccgggagtag

SEQ ID NO: 22398 - DNA, 444 bp, synthetic construct
  misc_feature 1..444: note = Description of Artificial Sequence: Synthetic coding sequence
  source 1..444: mol_type = other DNA
atgcgctgcctgagcagcaagaaggccggcagcacctctgtggtgaagtacatcaagacctggaggccccgctacttcctgctgaagagtgatggcagcttcatcggctacaaggagaggcctgaggccccagaccagaccctgccccccctgaacaacttctctgtggccgagtgccagctgatgaagacagagcggccccggcccaacaccttcgtcatccgctgcctgcagtggaccaccgtgattgaaagaaccttccacgtggacagcccagatgagcgggaggagtggatgagggccatccagatggtggccaacagcctgcagccccacctgtgtgcccagacccgcatctggaagaccccacctccagcccaggcctgggccgtgggccgcctggagatccaggtgctgatccacaccagccccagcgagggctag

SEQ ID NO: 22399 - DNA, 1149 bp, synthetic construct
  misc_feature 1..1149: note = Description of Artificial Sequence: Synthetic coding sequence
  source 1..1149: mol_type = other DNA
atgagggccatccagatggtggccaacagcctgaagcagagggcccctggagaggaccccatggactacaagtgtggcagccccagcgacagcagcaccacagaggagatggaggtggccgtgtccaaggcccgggccaaggtgaccatgaatgactttgactacctgaagctgctgggcaagggcaccttcggcaaggtgatcctggtgcgggagaaggccaccggccgctactatgccatgaagatcctgaggaaggaggtgatcatcgccaaggatgaggtggcccacacagtgacagagagccgggtgctgcagaacaccaggcaccccttcctgacagccctgaagtatgccttccagacccatgaccggctgtgctttgtgatggagtatgccaacggcggggagctgttcttccacctgagccgggagagggtcttcacagaggagcgggcccgcttctacggggctgagatcgtgtctgccctggagtacctgcacagcagagatgtggtgtacagagacatcaagctggagaacctgatgctggacaaggatggccacatcaagatcacagactttggcctgtgcaaggagggcatcagtgatggagccaccatgaagaccttctgtggcaccccagagtacctggcccctgaggtgctggaggacaatgactatggccgggctgtggactggtggggcctgggcgtggtgatgtatgagatgatgtgtggccgcctgcccttctacaaccaggaccacgagcggctgtttgagctgatcctgatggaggagatccgcttccccaggaccctgagccctgaggccaagagcctgctggccggcctgctgaagaaggaccccaagcagaggctgggcggcggccccagtgatgccaaggaggtgatggagcaccgcttcttcctgagcatcaactggcaggatgtggtgcagaagaagctgctgccccccttcaagccccaggtgaccagcgaggtggacacccgctactttgatgatgagttcaccgcccagagcatcaccatcaccccaccagacagatatgacagcctgggcctgctggagctggaccagaggacccacttcccccagttctcctacagcgccagcatccgggagtag

SEQ ID NO: 22400 - DNA, 402 bp, synthetic construct
  misc_feature 1..402: note = Description of Artificial Sequence: Synthetic coding sequence
  source 1..402: mol_type = other DNA
atgaatgaggtgtctgtcatcaaggagggctggctgcacaagagaggagagtacatcaagacctggaggccccgctacttcctgctgaagagtgatggcagcttcatcggctacaaggagaggcctgaggccccagaccagaccctgccccccctgaacaacttctctgtggccgagtgccagctgatgaagacagagcggccccggcccaacacctttgtgatccgctgcctgcagtggaccaccgtcatcgagaggaccttccacgtggacagcccagatgagcgggaggagtggatgagggccatccagatggtggccaacagcctgaagcagagggcccctggagaggaccccatggactacaagtgtggcagccccagcgacagcagcaccacctag

SEQ ID NO: 22401 - DNA, 1446 bp, synthetic construct
  misc_feature 1..1446: note = Description of Artificial Sequence: Synthetic coding sequence
  source 1..1446: mol_type = other DNA
atgaatgaggtgtctgtcatcaaggagggctggctgcacaagagaggagagtacatcaagacctggaggccccgctacttcctgctgaagagtgatggcagcttcatcggctacaaggagaggcctgaggccccagaccagaccctgccccccctgaacaacttctctgtggccgagtgccagctgatgaagacagagcggccccggcccaacacctttgtgatccgctgcctgcagtggaccaccgtcatcgagaggaccttccacgtggacagcccagatgagcgggaggagtggatgagggccatccagatggtggccaacagcctgaagcagagggcccctggagaggaccccatggactacaagtgtggcagccccagcgacagcagcaccacagaggagatggaggtggccgtgtccaaggcccgggccaaggtgaccatgaatgactttgactacctgaagctgctgggcaagggcaccttcggcaaggtgatcctggtgcgggagaaggccaccggccgctactatgccatgaagatcctgaggaaggaggtgatcatcgccaaggatgaggtggcccacacagtgacagagagccgggtgctgcagaacaccaggcaccccttcctgacagccctgaagtatgccttccagacccatgaccggctgtgctttgtgatggagtatgccaatggaggagagctgttcttccacctgagccgggagagggtcttcacagaggagcgggcccgcttctatggagctgagatcgtgtctgccctggagtacctgcacagcagagatgtggtgtacagagacatcaagctggagaacctgatgctggacaaggatggccacatcaagatcacagactttggcctgtgcaaggagggcatcagtgatggagccaccatgaagaccttctgtggcaccccagagtacctggcccctgaggtgctggaggacaatgactatggccgggctgtggactggtggggcctgggcgtggtgatgtatgagatgatgtgtggccgcctgcccttctacaaccaggaccacgagcggctgtttgagctgatcctgatggaggagatccgcttccccaggaccctgagccctgaggccaagagcctgctggccggcctgctgaagaaggaccccaagcagaggctgggcggcggccccagtgatgccaaggaggtgatggagcaccgcttcttcctgagcatcaactggcaggatgtggtgcagaagaagctgctgccccccttcaagccccaggtgaccagcgaggtggacacccgctactttgatgatgagttcaccgcccagagcatcaccatcaccccaccagacagatatgacagcctgggcctgctggagctggaccagaggacccacttcccccagttctcctacagcgccagcatccgggagtag

SEQ ID NO: 22402 - DNA, 402 bp, synthetic construct; identical to SEQ ID NO: 22400
  misc_feature 1..402: note = Description of Artificial Sequence: Synthetic coding sequence
  source 1..402: mol_type = other DNA

SEQ ID NO: 22403 - DNA, 291 bp, synthetic construct
  misc_feature 1..291: note = Description of Artificial Sequence: Synthetic coding sequence
  source 1..291: mol_type = other DNA
atgaatgaggtgtctgtcatcaaggagggctggctgcacaagagaggagagtacatcaagacctggaggccccgctacttcctgctgaagagtgatggcagcttcatcggctacaaggagaggcctgaggccccagaccagaccctgccccccctgaacaacttctctgtggccgagtgccagctgatgaagacagagcggccccggcccaacacctttgtgatccgctgcctgcagtggaccaccgtcatcgagaggaccttccacgtggacagcccagatgagaggtag

SEQ ID NO: 22404 - DNA, 360 bp, synthetic construct
  misc_feature 1..360: note = Description of Artificial Sequence: Synthetic coding sequence
  source 1..360: mol_type = other DNA
atgaatgaggtgtctgtcatcaaggagggctggctgcacaagagaggagagtacatcaagacctggaggccccgctacttcctgctgaagagtgatggcagcttcatcggctacaaggagaggcctgaggccccagaccagaccctgccccccctgaacaacttctctgtggccgagtgccagctgatgaagacagagcggccccggcccaacacctttgtgatccgctgcctgcagtggaccaccgtcatcgagaggaccttccacgtggacagcccagatgagcgggaggagtggatgagggccatccagatggtggccaacagcctgaagcagagggcccctggagaggacccctag

SEQ ID NO: 22405 - DNA, 1446 bp, synthetic construct; identical to SEQ ID NO: 22401
  misc_feature 1..1446: note = Description of Artificial Sequence: Synthetic coding sequence
  source 1..1446: mol_type = other DNA

SEQ ID NO: 22406 - DNA, 204 bp, synthetic construct
  misc_feature 1..204: note = Description of Artificial Sequence: Synthetic coding sequence
  source 1..204: mol_type = other DNA
atgaatgaggtgtctgtcatcaaggagggctggctgcacaagagaggagagtacatcaagacctggaggccccgctacttcctgctgaagagtgatggcagcttcatcggctacaaggagaggcctgaggccccagaccagaccctgccccccctgaacaacttctctgtggccgagtgccagctgatgaagacagaaagatag

SEQ ID NO: 22407 - DNA, 144 bp, synthetic construct
  misc_feature 1..144: note = Description of Artificial Sequence: Synthetic coding sequence
  source 1..144: mol_type = other DNA
atgaatgaggtgtctgtcatcaaggagggctggctgcacaagagaggagagtacatcaagacctggaggccccgctacttcctgctgaagagtgatggcagcttcatcggctacaaggagaggcctgaggccccagaccagtag

SEQ ID NO: 22408 - DNA, 405 bp, synthetic construct
  misc_feature 1..405: note = Description of Artificial Sequence: Synthetic coding sequence
  source 1..405: mol_type = other DNA
atgaatgaggtgtctgtcatcaaggagggctggctgcacaagagaggagagtacatcaagacctggaggccccgctacttcctgctgaagagtgatggcagcttcatcggctacaaggagaggcctgaggccccagaccagaccctgccccccctgaacaacttctctgtggccgagtgccagctgatgaagacagagcggccccggcccaacacctttgtgatccgctgcctgcagtggaccaccgtcatcgagaggaccttccacgtggacagcccagatgagcgggaggagtggatgagggccatccagatggtggccaacagcctgaagcagagggcccctggagaggaccccatggactacaagtgtggcagccccagcgacagcagcaccacagaatag

SEQ ID NO: 22409 - DNA, 324 bp, synthetic construct
  misc_feature 1..324: note = Description of Artificial Sequence: Synthetic coding sequence
  source 1..324: mol_type = other DNA
atgaatgaggtgtctgtcatcaaggagggctggctgcacaagagaggagagtacatcaagacctggaggccccgctacttcctgctgaagagtgatggcagcttcatcggctacaaggagaggcctgaggccccagaccagaccctgccccccctgaacaacttctctgtggccgagtgccagctgatgaagacagagcggccccggcccaacacctttgtgatccgctgcctgcagtggaccaccgtcatcgagaggaccttccacgtggacagcccagatgagcgggaggagtggatgagggccatccagatggtggcctag

SEQ ID NO: 22410 - DNA, 867 bp, synthetic construct
  misc_feature 1..867: note = Description of Artificial Sequence: Synthetic coding sequence
  source 1..867: mol_type = other DNA
atgaatgaggtgtctgtcatcaaggagggctggctgcacaagagaggagagtacatcaagacctggaggccccgctacttcctgctgaagagtgatggcagcttcatcggctacaaggagaggcctgaggccccagaccagaccctgccccccctgaacaacttctctgtggccgagtgccagctgatgaagacagagcggccccggcccaacacctttgtgatccgctgcctgcagtggaccaccgtcatcgagaggaccttccacgtggacagcccagatgagcgggaggagtggatgagggccatccagatggtggccaacagcctgaagcagagggcccctggagaggaccccatggactacaagtgtggcagccccagcgacagcagcaccacagaggagatggaggtggccgtgtccaaggcccgggccaaggtgaccatgaatgactttgactacctgaagctgctgggcaagggcaccttcggcaaggtgatcctggtgcgggagaaggccaccggccgctactatgccatgaagatcctgaggaaggaggtgatcatcgccaaggatgaggtggcccacacagtgacagagagccgggtgctgcagaacaccaggcaccccttcctgactgtgtcctgcccccccctgccccggcagtgtgaggccagcctgtggacagagctgcgggagcgggccctgatcttctggtacaaggcccagagctggggccggcctgggggccagggcaaggtgctgctgcggcctgccaagagcagcgagcccaggcatgtggtgggcgtgtcccggctgggggagtgggagggggacagcttcttcattgatggcggcttcatgtag

SEQ ID NO: 22411 - DNA, 1440 bp, synthetic construct
  misc_feature 1..1440: note = Description of Artificial Sequence: Synthetic coding sequence
  source 1..1440: mol_type = other DNA
atgtctgatgtgaccatcgtgaaggagggctgggtgcagaagagaggagagtacatcaagaactggaggccccgctacttcctgctgaagacagatggcagcttcatcggctacaaggagaagccccaggatgtggacctgccctaccccctgaacaacttctctgtggccaagtgccagctgatgaagacagagcggcccaagcccaacaccttcatcatccgctgcctgcagtggaccaccgtgattgaaagaaccttccacgtggacaccccagaggagcgggaggagtggacagaggccatccaggccgtggccgaccggctgcagaggcaggaggaggagaggatgaactgcagccccaccagccagattgacaacatcggggaggaggagatggatgccagcaccacccaccacaagaggaagaccatgaatgactttgactacctgaagctgctgggcaagggcaccttcggcaaggtgatcctggtgcgggagaaggccagcggcaagtactatgccatgaagatcctgaagaaggaggtgatcatcgccaaggatgaggtggcccacaccctgacagagagccgggtgctgaagaacaccaggcaccccttcctgaccagcctgaagtacagcttccagaccaaggaccggctgtgctttgtgatggagtatgtgaatggaggagagctgttcttccacctgagccgggagagggtcttcagcgaggacaggacccgcttctatggagctgagatcgtgtctgccctggactacctgcacagcggcaagatcgtgtacagagacctgaagctggagaacctgatgctggacaaggatggccacatcaagatcacagactttggcctgtgcaaggagggcatcacagatgctgccaccatgaagaccttctgtggcaccccagagtacctggcccctgaggtgctggaggacaatgactatggccgggctgtggactggtggggcctgggcgtggtgatgtatgagatgatgtgtggccgcctgcccttctacaaccaggaccacgagaagctgtttgagctgatcctgatggaggacatcaagttccccaggaccctgagcagtgatgccaagagcctgctgagcggcctgctgatcaaggaccccaacaagaggctgggcggcggcccagatgatgccaaggagatcatgaggcacagcttcttcagcggcgtgaactggcaggatgtgtatgacaagaagctggtgccccccttcaagccccaggtgaccagcgagacagacacccgctactttgatgaggagttcaccgcccagaccatcaccatcaccccacctgagaagtatgatgaagatggcatggactgcatggacaatgaaagaagaccccacttcccccagttctcctacagcgccagcggccgggagtag

SEQ ID NO: 22412 - DNA, 1398 bp, synthetic construct
  misc_feature 1..1398: note = Description of Artificial Sequence: Synthetic coding sequence
  source 1..1398: mol_type = other DNA
atgtctgatgtgaccatcgtgaaggagggctgggtgcagaagagaggagagtacatcaagaactggaggccccgctacttcctgctgaagacagatggcagcttcatcggctacaaggagaagccccaggatgtggacctgccctaccccctgaacaacttctctgtggccaagtgccagctgatgaagacagagcggcccaagcccaacaccttcatcatccgctgcctgcagtggaccaccgtgattgaaagaaccttccacgtggacaccccagaggagcgggaggagtggacagaggccatccaggccgtggccgaccggctgcagaggcaggaggaggagaggatgaactgcagccccaccagccagattgacaacatcggggaggaggagatggatgccagcaccacccaccacaagaggaagaccatgaatgactttgactacctgaagctgctgggcaagggcaccttcggcaaggtgatcctggtgcgggagaaggccagcggcaagtactatgccatgaagatcctgaagaaggaggtgatcatcgccaaggatgaggtggcccacaccctgacagagagccgggtgctgaagaacaccaggcaccccttcctgaccagcctgaagtacagcttccagaccaaggaccggctgtgctttgtgatggagtatgtgaatggaggagagctgttcttccacctgagccgggagagggtcttcagcgaggacaggacccgcttctatggagctgagatcgtgtctgccctggactacctgcacagcggcaagatcgtgtacagagacctgaagctggagaacctgatgctggacaaggatggccacatcaagatcacagactttggcctgtgcaaggagggcatcacagatgctgccaccatgaagaccttctgtggcaccccagagtacctggcccctgaggtgctggaggacaatgactatggccgggctgtggactggtggggcctgggcgtggtgatgtatgagatgatgtgtggccgcctgcccttctacaaccaggaccacgagaagctgtttgagctgatcctgatggaggacatcaagttccccaggaccctgagcagtgatgccaagagcctgctgagcggcctgctgatcaaggaccccaacaagaggctgggcggcggcccagatgatgccaaggagatcatgaggcacagcttcttcagcggcgtgaactggcaggatgtgtatgacaagaagctggtgccccccttcaagccccaggtgaccagcgagacagacacccgctactttgatgaggagttcaccgcccagaccatcaccatcaccccacctgagaagtgccagcagagcgactgtggcatgctgggcaactggaagaagtag

SEQ ID NO: 22413 - DNA, 1440 bp, synthetic construct; identical to SEQ ID NO: 22411
  misc_feature 1..1440: note = Description of Artificial Sequence: Synthetic coding sequence
  source 1..1440: mol_type = other DNA

SEQ ID NO: 22414 - DNA, 1398 bp, synthetic construct; identical to SEQ ID NO: 22412
  misc_feature 1..1398: note = Description of Artificial Sequence: Synthetic coding sequence
  source 1..1398: mol_type = other DNA

SEQ ID NO: 22415 - DNA, 420 bp, synthetic construct
  misc_feature 1..420: note = Description of Artificial Sequence: Synthetic coding sequence
  source 1..420: mol_type = other DNA
atgtctgatgtgaccatcgtgaaggagggctgggtgcagaagagaggagagtacatcaagaactggaggccccgctacttcctgctgaagacagatggcagcttcatcggctacaaggagaagccccaggatgtggacctgccctaccccctgaacaacttctctgtggccaagtgccagctgatgaagacagagcggcccaagcccaacaccttcatcatccgctgcctgcagtggaccaccgtgattgaaagaaccttccacgtggacaccccagaggagcgggaggagtggacagaggccatccaggccgtggccgaccggctgcagaggcaggaggaggagaggatgaactgcagccccaccagccagattgacaacatcggggaggaggagatggatgccagcaccacccactag

SEQ ID NO: 22416 - DNA, 624 bp, synthetic construct
  misc_feature 1..624: note = Description of Artificial Sequence: Synthetic coding sequence
  source 1..624: mol_type = other DNA
atgagccccctgctgcggcggctgctgctggccgccctgctgcagctggccccagcccaggcccctgtgtcccagccagatgcccctggccaccagaggaaggtggtgtcctggattgatgtgtacacccgggccacctgccagccccgggaggtggtggtgcccctgactgtggagctgatgggcaccgtggccaagcagctggtgcccagctgtgtgacagtgcagagatgtggcggctgctgcccagatgatggcctggagtgtgtgcccaccggccagcaccaggtgaggatgcagatcctgatgatccgctaccccagcagccagctgggggagatgagcctggaggagcacagccagtgtgaatgtcggcccaagaagaaggacagcgctgtgaagccagaccgggccgccaccccccaccaccggccccagcccaggtctgtgcccggctgggacagcgcccctggggcccccagccctgctgacatcacccaccccaccccagcccctggccccagcgcccacgccgcccccagcaccaccagcgccctgaccccaggccctgctgctgctgctgctgatgctgctgccagctctgtggccaagggcggggcctag

SEQ ID NO: 22417 - DNA, 567 bp, synthetic construct
  misc_feature 1..567: note = Description of Artificial Sequence: Synthetic coding sequence
  source 1..567: mol_type = other DNA
atgagccccctgctgcggcggctgctgctggccgccctgctgcagctggccccagcccaggcccctgtgtcccagccagatgcccctggccaccagaggaaggtggtgtcctggattgatgtgtacacccgggccacctgccagccccgggaggtggtggtgcccctgactgtggagctgatgggcaccgtggccaagcagctggtgcccagctgtgtgacagtgcagagatgtggcggctgctgcccagatgatggcctggagtgtgtgcccaccggccagcaccaggtgaggatgcagatcctgatgatccgctaccccagcagccagctgggggagatgagcctggaggagcacagccagtgtgaatgtcggcccaagaagaaggacagcgctgtgaagccagacagcccccggcccctgtgcccccgctgcacccagcaccaccagaggccagaccccaggacctgccgctgccgctgcagaagaagaagcttcctgcgctgccagggccggggcctggagctgaacccagacacctgccgctgcaggaagctgcggaggtag

SEQ ID NO: 22418 - DNA, 1143 bp, synthetic construct
  misc_feature 1..1143: note = Description of Artificial Sequence: Synthetic coding sequence
  source 1..1143: mol_type = other DNA
atgtctgagaccgtcatctgcagcagccgggccaccgtgatgctgtatgatgatggcaacaagcgctggctgcctgctggcaccggcccccaggccttcagccgggtgcagatctaccacaaccccacagccaacagcttccgggtggtgggcaggaagatgcagcctgaccagcaggtggtgatcaactgtgccatcgtgcggggcgtgaagtacaaccaggccacccccaacttccaccagtggagagatgcccggcaggtgtggggcctgaactttggcagcaaagaagatgctgcccagtttgctgctggcatggccagcgccctggaggccctggagggcggcggccccccacctcctccagccctgcccacctggagcgtgcccaacggccccagccctgaggaggtggagcagcagaagaggcagcagcccggccccagcgagcacatcgagcggcgggtgtccaatgccggcggccccccagcccctcctgctgggggccccccacctcctcctggccccccacctcctcctggccccccacctcctcctggcctgcccccatctggagtgcctgctgctgcccacggggccggcggcggccccccaccagccccacccctgcctgctgcccagggccctgggggcggcggggccggggcccctggcctggccgccgccatcgccggggccaagctgaggaaggtgtccaagcaggaggaggccagcggcggccccacagcccccaaggccgagagcggccgcagcggcggcggcggcctgatggaggagatgaatgccatgctggcccggcggaggaaggccacccaggtgggggagaagacccccaaggatgaaagtgccaaccaggaggagcctgaggcccgggtgcctgcccagagcgagagcgtgagaagaccctgggagaagaacagcaccaccctgcccaggatgaagagcagcagctctgtgaccaccagcgagacccagccctgcacccccagcagcagtgactacagcgacctgcagagggtgaagcaggagctgctggaggaggtgaagaaggagctgcagaaggtgaaggaggagatcatcgaggcctttgtgcaggagctgaggaagaggggcagcccctag

SEQ ID NO: 22419 - DNA, 915 bp, synthetic construct
  misc_feature 1..915: note = Description of Artificial Sequence: Synthetic coding sequence
  source 1..915: mol_type = other DNA
atggccggcaactttgattctgaggagaggagctcctggtactggggccgcctgagccggcaggaggccgtggccctgctgcagggccagagacatggagtcttcctggtgcgggacagcagcaccagccctggggactatgtgctgtctgtgtctgagaacagccgggtgagccactacatcatcaacagcagcggccccaggcctcctgtgccccccagccctgcccagcccccacctggggtgagccccagccggctgagaattggagaccaggagtttgacagcctgcctgccctgctggagttctacaagatccactacctggacaccaccaccctgattgagcctgtgagccgcagccggcagggcagcggggtcatcctgcggcaggaggaggccgagtatgtgcgggccctgtttgacttcaatggaaatgatgaggaggacctgcccttcaagaagggggacatcctgcgcatccgggacaagccagaggagcagtggtggaatgcagaagattctgagggcaagaggggcatgatccctgtgccctacgtggagaagtacagacctgccagcgcctctgtgtctgccctgattggaggcaaccaggagggcagccacccccagcccctgggcggccctgagcccggcccctatgcccagcccagcgtgaacacccccctgcccaacctgcagaatggccccatctatgcccgggtcatccagaagagggtgcccaatgcctatgacaagacagccctggccctggaggtgggggagctggtgaaggtgaccaagatcaacgtgtctggccagtgggagggggagtgcaatggcaagaggggccacttccccttcacccacgtgcggctgctggaccagcagaacccagatgaggacttctcctag

SEQ ID NO: 22420 - DNA, 615 bp, synthetic construct
  misc_feature 1..615: note = Description of Artificial Sequence: Synthetic coding sequence
  source 1..615: mol_type = other DNA
atggccggcaactttgattctgaggagaggagctcctggtactggggccgcctgagccggcaggaggccgtggccctgctgcagggccagagacatggagtcttcctggtgcgggacagcagcaccagccctggggactatgtgctgtctgtgtctgagaacagccgggtgagccactacatcatcaacagcagcggccccaggcctcctgtgccccccagccctgcccagcccccacctggggtgagccccagccggctgagaattggagaccaggagtttgacagcctgcctgccctgctggagttctacaagatccactacctggacaccaccaccctgattgagcctgtgagccgcagccggcagggcagcggggtcatcctgcggcaggaggaggccgagtatgtgcgggccctgtttgacttcaatggaaatgatgaggaggacctgcccttcaagaagggggacatcctgcgcatccgggacaagccagaggagcagtggtggaatgcagaagattctgagggcaagaggggcatgatccctgtgccctacgtggagaagtacagacctgccagcgcctctgtgtctgccctgattggaggccgctag

SEQ ID NO: 22421 - DNA, 2196 bp, synthetic construct
  misc_feature 1..2196: note = Description of Artificial Sequence: Synthetic coding sequence
  source 1..2196: mol_type = other DNA
tgaaaaccagccaccggcctgtgggtgtgggtgtccctgctggtggccgccggcaccgtgcagcccagcgacagccagagcgtgtgtgccggcacagagaacaagctgagcagcctgagtgacctggagcagcagtaccgggccctgaggaagtactatgagaactgtgaggtggtgatgggcaacctggagatcaccagcattgagcacaacagagacctgtccttcctgcggtctgtgcgggaggtgacaggctacgtgctggtggccctgaaccagttccgctacctgcccctggagaacctgcgcatcatccggggcaccaagctgtatgaggacagatatgccctggccatcttcctgaactacaggaaggatggcaactttggcctgcaggagctgggcctgaagaacctgacagagatcctgaatggaggagtgtatgtggaccagaacaagttcctgtgctacgccgacaccatccactggcaggacatcgtgaggaacccctggcccagcaacctgaccctggtgtccaccaacggcagcagcggctgcggccgctgccacaagagctgcaccggccgctgctggggccccacagagaaccactgccagaccctgaccaggacagtgtgtgccgagcagtgtgatggccgctgctacggcccctacgtgtctgactgctgccacagagaatgtgccggcggctgcagcggccccaaggacacagactgctttgcctgcatgaacttcaatgattctggggcctgtgtgacccagtgcccccagacctttgtgtacaaccccaccaccttccagctggagcacaacttcaatgccaagtacacctatggagccttctgtgtgaagaagtgcccccacaactttgtggtggacagcagcagctgtgtgcgggcctgccccagcagcaagatggaggtggaggagaatggcatcaagatgtgcaagccctgcacagacatctgccccaaggcctgtgatggcattggaacaggcagcctgatgtctgcccagacagtggacagcagcaacatcgacaagttcatcaactgcaccaagatcaatggaaacctgatcttcctggtgacaggcatccacggggacccctacaatgccatcgaggccatcgaccctgagaagctgaatgtgttcagaacagtgcgggagatcaccggcttcctgaacatccagagctggccacccaacatgacagacttctctgtgttcagcaacctggtgaccatcggcggccgggtgctgtacagcggcctgagcctgctgatcctgaagcagcagggcatcaccagcctgcagttccagagcctgaaggagatctctgctggcaacatctacatcacagacaacagcaacctgtgctactaccacaccatcaactggaccaccctcttcagcaccatcaaccagagaattgtcatccgggacaacaggaaggccgagaactgcacagctgagggcatggtgtgcaaccacctgtgcagcagtgatggctgctggggccctggccctgaccagtgcctgagctgccgccgcttcagccggggccgcatctgcatcgagagctgcaacctgtatgatggagagttccgggagtttgaaaatggcagcatctgtgtggagtgtgacccccagtgtgagaagatggaggatggcctgctgacctgccacggccctggccctgacaactgcaccaagtgcagccacttcaaggatggccccaactgtgtggagaagtgcccagatggcctgcagggcgccaacagcttcatcttcaagtatgctgaccctgaccgggagtgccacccctgccaccccaactgcacccagggctgcatcggcagcagcattgaggactgcatcggcctgatggacaggacccccctgattgctgctggggtcatcggcggcctcttcatcctggtgattgtgggcctgacctttgctgtgtatgtgcggaggaagagcatcaagaagaagagggccctgcggcgcttcctggagacagagctggtggagcccctgaccccatctggaacagcccccaaccaggcccagctgcgcatcctgaaggagacagagctgaagagggtgaaggtgctgggcagcggggcctttggaacagtgtacaagggcatctgggtgcctgagggctag

SEQ ID NO: 22422 - DNA, 3927 bp, synthetic construct
  misc_feature 1..3927: note = Description of Artificial Sequence: Synthetic coding sequence
  source 1..3927: mol_type = other DNA
atgaagccagccaccggcctgtgggtgtgggtgtccctgctggtggccgccggcaccgtgcagcccagcgacagccagagcgtgtgtgccggcacagagaacaagctgagcagcctgagtgacctggagcagcagtaccgggccctgaggaagtactatgagaactgtgaggtggtgatgggcaacctggagatcaccagcattgagcacaacagagacctgtccttcctgcggtctgtgcgggaggtgacaggctacgtgctggtggccctgaaccagttccgctacctgcccctggagaacctgcgcatcatccggggcaccaagctgtatgaggacagatatgccctggccatcttcctgaactacaggaaggatggcaactttggcctgcaggagctgggcctgaagaacctgacagagatcctgaatggaggagtgtatgtggaccagaacaagttcctgtgctacgccgacaccatccactggcaggacatcgtgaggaacccctggcccagcaacctgaccctggtgtccaccaacggcagcagcggctgcggccgctgccacaagagctgcaccggccgctgctggggccccacagagaaccactgccagaccctgaccaggacagtgtgtgccgagcagtgtgatggccgctgctacggcccctacgtgtctgactgctgccacagagaatgtgccggcggctgcagcggccccaaggacacagactgctttgcctgcatgaacttcaatgattctggggcctgtgtgacccagtgcccccagacctttgtgtacaaccccaccaccttccagctggagcacaacttcaatgccaagtacacctatggagccttctgtgtgaagaagtgcccccacaactttgtggtggacagcagcagctgtgtgcgggcctgccccagcagcaagatggaggtggaggagaatggcatcaagatgtgcaagccctgcacagacatctgccccaaggcctgtgatggcattggaacaggcagcctgatgtctgcccagacagtggacagcagcaacatcgacaagttcatcaactgcaccaagatcaatggaaacctgatcttcctggtgacaggcatccacggggacccctacaatgccatcgaggccatcgaccctgagaagctgaatgtgttcagaacagtgcgggagatcaccggcttcctgaacatccagagctggccacccaacatgacagacttctctgtgttcagcaacctggtgaccatcggcggccgggtgctgtacagcggcctgagcctgctgatcctgaagcagcagggcatcaccagcctgcagttccagagcctgaaggagatctctgctggcaacatctacatcacagacaacagcaacctgtgctactaccacaccatcaactggaccaccctcttcagcaccatcaaccagagaattgtcatccgggacaacaggaaggccgagaactgcacagctgagggcatggtgtgcaaccacctgtgcagcagtgatggctgctggggccctggccctgaccagtgcctgagctgccgccgcttcagccggggccgcatctgcatcgagagctgcaacctgtatgatggagagttccgggagtttgaaaatggcagcatctgtgtggagtgtgacccccagtgtgagaagatggaggatggcctgctgacctgccacggccctggccctgacaactgcaccaagtgcagccacttcaaggatggccccaactgtgtggagaagtgcccagatggcctgcagggcgccaacagcttcatcttcaagtatgctgaccctgaccgggagtgccacccctgccaccccaactgcacccagggctgcaatggccccaccagccatgactgcatctactacccctggacaggccacagcaccctgccccagcacgcccggacccccctgattgctgctggggtcatcggcggcctcttcatcctggtgattgtgggcctgacctttgctgtgtatgtgcggaggaagagcatcaagaagaagagggccctgcggcgcttcctggagacagagctggtggagcccctgaccccatctggaacagcccccaaccaggcccagctgcgcatcctgaaggagacagagctgaagagggtgaaggtgctgggcagcggggcctttggaacagtgtacaagggcatctgggtgcctgagggggagaccgtgaagatccctgtggccatcaagatcctgaatgagaccaccggccccaaggccaacgtggagttcatggatgaggccctgatcatggcctccatggaccacccccacctggtgcggctgctgggcgtgtgcctgagccccaccatccagctggtgacccagctgatgcctcatggctgcctgctggagtatgtgcatgagcacaaggacaacatcggcagccagctgctgctgaactggtgtgtgcagatcgccaagggcatgatgtacctggaggagcggcggctggtgcaccgggacctggccgccagaaatgtgctggtgaagagccccaaccacgtgaagatcacagactttggcctggcccggctgctggagggagatgagaaggagtacaatgctgatggcggcaagatgcccatcaagtggatggccctggagtgcatccactacaggaagttcacccaccagagtgatgtgtggagctatggagtgaccatctgggagctgatgaccttcggcggcaagccctatgatggcatccccacccgggagatcccagacctgctggagaagggggagcggctgccccagccccccatctgcaccattgatgtgtacatggtgatggtgaagtgctggatgattgatgctgacagccggcccaagttcaaggagctggccgctgagttcagcaggatggcccgggacccccagcgctacctggtgatccagggagatgacaggatgaagctgcccagccccaatgacagcaagttcttccagaacctgctggatgaggaggacctggaggacatgatggatgctgaggagtacctggtgccccaggccttcaacatccccccacccatctacaccagccgggccagaattgacagcaacagaagtgagatcggccacagccccccaccagcctacacccccatgagcggcaaccagtttgtgtacagagatggcggctttgctgctgagcagggcgtgtctgtgccctaccgggcccccaccagcaccatccctgaggcccctgtggcccagggcgccacagctgagatctttgatgacagctgctgcaatggcaccctgaggaagcctgtggccccccacgtgcaggaggacagcagcacccagcgctacagcgctgaccccaccgtgtttgcccctgagaggagccccagaggagagctggatgaggagggctacatgacccccatgagggacaagcccaagcaggagtacctgaaccctgtggaggagaacccctttgtgtccaggaggaagaatggagacctgcaggccctggacaaccctgagtaccacaatgccagcaatggaccacccaaggcagaagatgaatatgtgaatgagcccctgtacctgaacacctttgccaacaccctgggcaaggccgagtacctgaagaacaacatcctgtccatgcctgagaaggccaagaaggcctttgacaacccagactactggaaccacagcctgccccccaggagcaccctgcagcacccagactacctgcaggagtacagcaccaagtacttctacaagcagaatggccgcatccggcccatcgtggccgagaaccctgagtacctgtctgagttcagcctgaagccaggcaccgtgctgcccccaccaccctaccgccacaggaacacagtggtgtag

SEQ ID NO: 22423 - DNA, 3897 bp, synthetic construct
  misc_feature 1..3897: note = Description of Artificial Sequence: Synthetic coding sequence
  source 1..3897: mol_type = other DNA
atgaagccagccaccggcctgtgggtgtgggtgtccctgctggtggccgccggcaccgtgcagcccagcgacagccagagcgtgtgtgccggcacagagaacaagctgagcagcctgagtgacctggagcagcagtaccgggccctgaggaagtactatgagaactgtgaggtggtgatgggcaacctggagatcaccagcattgagcacaacagagacctgtccttcctgcggtctgtgcgggaggtgacaggctacgtgctggtggccctgaaccagttccgctacctgcccctggagaacctgcgcatcatccggggcaccaagctgtatgaggacagatatgccctggccatcttcctgaactacaggaaggatggcaactttggcctgcaggagctgggcctgaagaacctgacagagatcctgaatggaggagtgtatgtggaccagaacaagttcctgtgctacgccgacaccatccactggcaggacatcgtgaggaacccctggcccagcaacctgaccctggtgtccaccaacggcagcagcggctgcggccgctgccacaagagctgcaccggccgctgctggggccccacagagaaccactgccagaccctgaccaggacagtgtgtgccgagcagtgtgatggccgctgctacggcccctacgtgtctgactgctgccacagagaatgtgccggcggctgcagcggccccaaggacacagactgctttgcctgcatgaacttcaatgattctggggcctgtgtgacccagtgcccccagacctttgtgtacaaccccaccaccttccagctggagcacaacttcaatgccaagtacacctatggagccttctgtgtgaagaagtgcccccacaactttgtggtggacagcagcagctgtgtgcgggcctgccccagcagcaagatggaggtggaggagaatggcatcaagatgtgcaagccctgcacagacatctgccccaaggcctgtgatggcattggaacaggcagcctgatgtctgcccagacagtggacagcagcaacatcgacaagttcatcaactgcaccaagatcaatggaaacctgatcttcctggtgacaggcatccacggggacccctacaatgccatcgaggccatcgaccctgagaagctgaatgtgttcagaacagtgcgggagatcaccggcttcctgaacatccagagctggccacccaacatgacagacttctctgtgttcagcaacctggtgaccatcggcggccgggtgctgtacagcggcctgagcctgctgatcctgaagcagcagggcatcaccagcctgcagttccagagcctgaaggagatctctgctggcaacatctacatcacagacaacagcaacctgtgctactaccacaccatcaactggaccaccctcttcagcaccatcaaccagagaattgtcatccgggacaacaggaaggccgagaactgcacagctgagggcatggtgtgcaaccacctgtgcagcagtgatggctgctggggccctggccctgaccagtgcctgagctgccgccgcttcagccggggccgcatctgcatcgagagctgcaacctgtatgatggagagttccgggagtttgaaaatggcagcatctgtgtggagtgtgacccccagtgtgagaagatggaggatggcctgctgacctgccacggccctggccctgacaactgcaccaagtgcagccacttcaaggatggccccaactgtgtggagaagtgcccagatggcctgcagggcgccaacagcttcatcttcaagtatgctgaccctgaccgggagtgccacccctgccaccccaactgcacccagggctgcatcggcagcagcattgaggactgcatcggcctgatggacaggacccccctgattgctgctggggtcatcggcggcctcttcatcctggtgattgtgggcctgacctttgctgtgtatgtgcggaggaagagcatcaagaagaagagggccctgcggcgcttcctggagacagagctggtggagcccctgaccccatctggaacagcccccaaccaggcccagctgcgcatcctgaaggagacagagctgaagagggtgaaggtgctgggcagcggggcctttggaacagtgtacaagggcatctgggtgcctgagggggagaccgtgaagatccctgtggccatcaagatcctgaatgagaccaccggccccaaggccaacgtggagttcatggatgaggccctgatcatggcctccatggaccacccccacctggtgcggctgctgggcgtgtgcctgagccccaccatccagctggtgacccagctgatgcctcatggctgcctgctggagtatgtgcatgagcacaaggacaacatcggcagccagctgctgctgaactggtgtgtgcagatcgccaagggcatgatgtacctggaggagcggcggctggtgcaccgggacctggccgccagaaatgtgctggtgaagagccccaaccacgtgaagatcacagactttggcctggcccggctgctggagggagatgagaaggagtacaatgctgatggcggcaagatgcccatcaagtggatggccctggagtgcatccactacaggaagttcacccaccagagtgatgtgtggagctatggagtgaccatctgggagctgatgaccttcggcggcaagccctatgatggcatccccacccgggagatcccagacctgctggagaagggggagcggctgccccagccccccatctgcaccattgatgtgtacatggtgatggtgaagtgctggatgattgatgctgacagccggcccaagttcaaggagctggccgctgagttcagcaggatggcccgggacccccagcgctacctggtgatccagggagatgacaggatgaagctgcccagccccaatgacagcaagttcttccagaacctgctggatgaggaggacctggaggacatgatggatgctgaggagtacctggtgccccaggccttcaacatccccccacccatctacaccagccgggccagaattgacagcaacagaagtgagatcggccacagccccccaccagcctacacccccatgagcggcaaccagtttgtgtacagagatggcggctttgctgctgagcagggcgtgtctgtgccctaccgggcccccaccagcaccatccctgaggcccctgtggcccagggcgccacagctgagatctttgatgacagctgctgcaatggcaccctgaggaagcctgtggccccccacgtgcaggaggacagcagcacccagcgctacagcgctgaccccaccgtgtttgcccctgagaggagccccagaggagagctggatgaggagggctacatgacccccatgagggacaagcccaagcaggagtacctgaaccctgtggaggagaacccctttgtgtccaggaggaagaatggagacctgcaggccctggacaaccctgagtaccacaatgccagcaatggaccacccaaggcagaagatgaatatgtgaatgagcccctgtacctgaacacctttgccaacaccctgggcaaggccgagtacctgaagaacaacatcctgtccatgcctgagaaggccaagaaggcctttgacaacccagactactggaaccacagcctgccccccaggagcaccctgcagcacccagactacctgcaggagtacagcaccaagtacttctacaagcagaatggccgcatccggcccatcgtggccgagaaccctgagtacctgtctgagttcagcctgaagccaggcaccgtgctgcccccaccaccctaccgccacaggaacacagtggtgtag

SEQ ID NO: 22424 - DNA, 387 bp, synthetic construct
  misc_feature 1..387: note = Description of Artificial Sequence: Synthetic coding sequence
  source 1..387: mol_type = other DNA
atgggcaacctggagatcaccagcattgagcacaacagagacctgtccttcctgcggtctgtgcgggaggtgacaggctacgtgctggtggccctgaaccagttccgctacctgcccctggagaacctgcgcatcatccggggcaccaagctgtatgaagatagatatgccctggccatcttcctgaactacaggaaggatggcaactttggcctgcaggagctgggcctgaagaacctgacagagatcctgaatggaggagtgtatgtggaccagaacaagttcctgtgctatgctgacaccatccactggcaggacatcgtgaggaacccctggcccagcaacctgaccctggtgtccaccaacggcagcagcggctgcggctag

SEQ ID NO: 22425 - DNA, 3879 bp, synthetic construct
  misc_feature 1..3879: note = Description of Artificial Sequence: Synthetic coding sequence
  source 1..3879: mol_type = other DNA
atgaagccagccaccggcctgtgggtgtgggtgtccctgctggtggccgccggcaccgtgcagcccagcgacagccagagcgtgtgtgccggcacagagaacaagctgagcagcctgagtgacctggagcagcagtaccgggccctgaggaagtactatgagaactgtgaggtggtgatgggcaacctggagatcaccagcattgagcacaacagagacctgtccttcctgcggtctgtgcgggaggtgacaggctacgtgctggtggccctgaaccagttccgctacctgcccctggagaacctgcgcatcatccggggcaccaagctgtatgaggacagatatgccctggccatcttcctgaactacaggaaggatggcaactttggcctgcaggagctgggcctgaagaacctgacagagatcctgaatggaggagtgtatgtggaccagaacaagttcctgtgctacgccgacaccatccactggcaggacatcgtgaggaacccctggcccagcaacctgaccctggtgtccaccaacggcagcagcggctgcggccgctgccacaagagctgcaccggccgctgctggggccccacagagaaccactgccagaccctgaccaggacagtgtgtgccgagcagtgtgatggccgctgctacggcccctacgtgtctgactgctgccacagagaatgtgccggcggctgcagcggccccaaggacacagactgctttgcctgcatgaacttcaatgattctggggcctgtgtgacccagtgcccccagacctttgtgtacaaccccaccaccttccagctggagcacaacttcaatgccaagtacacctatggagccttctgtgtgaagaagtgcccccacaactttgtggtggacagcagcagctgtgtgcgggcctgccccagcagcaagatggaggtggaggagaatggcatcaagatgtgcaagccctgcacagacatctgccccaaggcctgtgatggcattggaacaggcagcctgatgtctgcccagacagtggacagcagcaacatcgacaagttcatcaactgcaccaagatcaatggaaacctgatcttcctggtgacaggcatccacggggacccctacaatgccatcgaggccatcgaccctgagaagctgaatgtgttcagaacagtgcgggagatcaccggcttcctgaacatccagagctggccacccaacatgacagacttctctgtgttcagcaacctggtgaccatcggcggccgggtgctgtacagcggcctgagcctgctgatcctgaagcagcagggcatcaccagcctgcagttccagagcctgaaggagatctctgctggcaacatctacatcacagacaacagcaacctgtgctactaccacaccatcaactggaccaccctcttcagcaccatcaaccagagaattgtcatccgggacaacaggaaggccgagaactgcacagctgagggcatggtgtgcaaccacctgtgcagcagtgatggctgctggggccctggccctgaccagtgcctgagctgccgccgcttcagccggggccgcatctgcatcgagagctgcaacctgtatgatggagagttccgggagtttgaaaatggcagcatctgtgtggagtgtgacccccagtgtgagaagatggaggatggcctgctgacctgccacggccctggccctgacaactgcaccaagtgcagccacttcaaggatggccccaactgtgtggagaagtgcccagatggcctgcagggcgccaacagcttcatcttcaagtatgctgaccctgaccgggagtgccacccctgccaccccaactgcacccagggctgcaatggccccaccagccatgactgcatctactacccctggacaggccacagcaccctgccccagcacgcccggacccccctgattgctgctggggtcatcggcggcctcttcatcctggtgattgtgggcctgacctttgctgtgtatgtgcggaggaagagcatcaagaagaagagggccctgcggcgcttcctggagacagagctggtggagcccctgaccccatctggaacagcccccaaccaggcccagctgcgcatcctgaaggagacagagctgaagagggtgaaggtgctgggcagcggggcctttggaacagtgtacaagggcatctgggtgcctgagggggagaccgtgaagatccctgtggccatcaagatcctgaatgagaccaccggccccaaggccaacgtggagttcatggatgaggccctgatcatggcctccatggaccacccccacctggtgcggctgctgggcgtgtgcctgagccccaccatccagctggtgacccagctgatgcctcatggctgcctgctggagtatgtgcatgagcacaaggacaacatcggcagccagctgctgctgaactggtgtgtgcagatcgccaagggcatgatgtacctggaggagcggcggctggtgcaccgggacctggccgccagaaatgtgctggtgaagagccccaaccacgtgaagatcacagactttggcctggcccggctgctggagggagatgagaaggagtacaatgctgatggcggcaagatgcccatcaagtggatggccctggagtgcatccactacaggaagttcacccaccagagtgatgtgtggagctatggagtgaccatctgggagctgatgaccttcggcggcaagccctatgatggcatccccacccgggagatcccagacctgctggagaagggggagcggctgccccagccccccatctgcaccattgatgtgtacatggtgatggtgaagtgctggatgattgatgctgacagccggcccaagttcaaggagctggccgctgagttcagcaggatggcccgggacccccagcgctacctggtgatccagggagatgacaggatgaagctgcccagccccaatgacagcaagttcttccagaacctgctggatgaggaggacctggaggacatgatggatgctgaggagtacctggtgccccaggccttcaacatccccccacccatctacaccagccgggccagaattgacagcaacagaaaccagtttgtgtacagagatggcggctttgctgctgagcagggcgtgtctgtgccctaccgggcccccaccagcaccatccctgaggcccctgtggcccagggcgccacagctgagatctttgatgacagctgctgcaatggcaccctgaggaagcctgtggccccccacgtgcaggaggacagcagcacccagcgctacagcgctgaccccaccgtgtttgcccctgagaggagccccagaggagagctggatgaggagggctacatgacccccatgagggacaagcccaagcaggagtacctgaaccctgtggaggagaacccctttgtgtccaggaggaagaatggagacctgcaggccctggacaaccctgagtaccacaatgccagcaatggaccacccaaggcagaagatgaatatgtgaatgagcccctgtacctgaacacctttgccaacaccctgggcaaggccgagtacctgaagaacaacatcctgtccatgcctgagaaggccaagaaggcctttgacaacccagactactggaaccacagcctgccccccaggagcaccctgcagcacccagactacctgcaggagtacagcaccaagtacttctacaagcagaatggccgcatccggcccatcgtggccgagaaccctgagtacctgtctgagttcagcctgaagccaggcaccgtgctgcccccaccaccctaccgccacaggaacacagtggtgtag

SEQ ID NO: 22426 - DNA, 4029 bp, synthetic construct
  misc_feature 1..4029: note = Description of Artificial Sequence: Synthetic coding sequence
  source 1..4029: mol_type = other DNA
atgagggccaatgatgccctgcaggtgctgggcctgctcttcagcctggcccggggcagcgaggtgggcaacagccaggccgtgtgccccggcaccctgaatggcctgtctgtgactggagatgctgagaaccagtaccagaccctgtacaagctgtatgagcgctgtgaggtggtgatgggcaacctggagatcgtgctgaccggccacaatgctgacctgtccttcctgcagtggatccgggaggtgacaggctacgtgctggtggccatgaatgagttcagcaccctgcccctgcccaacctgcgggtggtgcggggcacccaggtgtatgatggcaagtttgccatctttgtgatgctgaactacaacaccaacagcagccacgccctgcggcagctgcggctgacccagctgacagagatcctgagcggcggcgtgtacatcgagaagaatgacaagctgtgccacatggacaccatcgactggagggacatcgtgcgggacagagatgctgagatcgtggtgaaggacaatggccgcagctgccccccctgccacgaggtgtgcaagggccgctgctggggccctggcagcgaggactgccagaccctgaccaagaccatctgtgccccccagtgcaatggccactgcttcggccccaaccccaaccagtgctgccatgatgaatgtgccggcggctgcagcggcccccaggacacagactgctttgcctgccgccacttcaatgacagcggggcctgtgtgccccgctgcccccagcccctggtgtacaacaagctgaccttccagctggagcccaacccccacaccaagtaccagtatggaggagtgtgtgtggccagctgcccccacaactttgtggtggaccagaccagctgtgtgcgggcctgccccccagacaagatggaggtggacaagaatggcctgaagatgtgtgagccctgtggcggcctgtgccccaaggcctgtgagggcaccggcagcggcagccgcttccagacagtggacagcagcaacattgatggctttgtgaactgcaccaagatcctgggcaacctggacttcctgatcaccggcctgaatggagacccctggcacaagatcccagccctggaccctgagaagctgaatgtgttcagaacagtgcgggagatcaccggctacctgaacatccagagctggccaccccacatgcacaacttcagcgtcttcagcaacctgaccaccatcggcggccgcagcctgtacaacagaggcttcagcctgctgatcatgaagaacctgaatgtgaccagcctgggcttccgcagcctgaaggagatctctgctggccgcatctacatcagcgccaaccggcagctgtgctaccaccacagcctgaactggaccaaggtgctgcggggccccacagaggagcggctggacatcaagcacaaccggccccggcgggactgtgtggccgagggcaaggtgtgtgaccccctgtgcagcagcggcggctgctggggccctggccctggccagtgcctgagctgcaggaactacagccggggcggcgtgtgtgtgacccactgcaacttcctgaatggagagccccgggagtttgcccatgaagctgagtgcttcagctgccaccctgagtgccagcccatggagggcacagccacctgcaatggcagcggcagtgacacctgtgcccagtgtgcccacttcagagatggcccccactgtgtgagcagctgcccccatggagtgctgggcgccaagggccccatctacaagtacccagatgtgcagaatgaatgtcggccctgccacgagaactgcacccagggctgcaagggccctgagctgcaggactgcctgggccagaccctggtgctgattggcaagacccacctgaccatggccctgactgtgattgctggcctggtggtgatcttcatgatgctgggcggcaccttcctgtactggagaggaagacgcatccagaacaagagggccatgaggcgctacctggagcggggggagagcattgagcccctggaccccagcgagaaggccaacaaggtgctggcccgcatcttcaaggagacagagctgaggaagctgaaggtgctgggcagcggcgtgtttggcaccgtgcacaagggcgtgtggatccctgagggggagagcatcaagatccctgtgtgcatcaaggtgattgaggacaagagcggccggcagagcttccaggccgtgacagaccacatgctggccatcggcagcctggaccacgcccacatcgtgcggctgctgggcctgtgccccggcagcagcctgcagctggtgacccagtacctgcccctgggcagcctgctggaccacgtgcggcagcacagaggagccctgggcccccagctgctgctgaactggggcgtgcagatcgccaagggcatgtactacctggaggagcacggcatggtgcacaggaacctggccgccagaaatgtgctgctgaagagccccagccaggtgcaggtggccgactttggagtggccgacctgctgcccccagatgacaagcagctgctgtacagcgaggccaagacccccatcaagtggatggccctggagagcatccactttgggaagtacacccaccagagtgatgtgtggagctatggagtgacagtgtgggagctgatgacctttggagctgagccctatgccggcctgcggctggccgaggtgcctgacctgctggagaagggggagcggctggcccagccccagatctgcaccattgatgtgtacatggtgatggtgaagtgctggatgattgatgagaacatccggcccaccttcaaggagctggccaatgagttcaccaggatggcccgggaccccccacgctacctggtgatcaagcgggagagcggccctggcatcgcccctggccctgagccccacggcctgaccaacaagaagctggaggaggtggagctggagcctgagctggacctggacctggacctggaggccgaggaggacaacctggccaccaccaccctgggcagcgccctgagcctgcctgtgggcaccctgaaccggccccggggcagccagagcctgctgagccccagcagcggctacatgcccatgaaccagggcaacctgggggagagctgccaggagagcgctgtgtctggcagcagcgagcgctgccccaggcctgtgtccctgcaccccatgccccggggctgcctggccagcgagagcagcgagggccacgtgacaggcagcgaggccgagctgcaggagaaggtgtccatgtgccgcagccgcagccgcagccgcagcccccggcccaggggggacagcgcctaccacagccagaggcacagcctgctgacccctgtgacccccctgagccccccaggcctggaggaggaggatgtgaatggctacgtgatgccagacacccacctgaagggcacccccagcagccgggagggcaccctgagctctgtgggcctgagctctgtgctgggcacagaggaggaggatgaagatgaggagtatgagtacatgaacagaagaagaagacacagccccccccaccccccccggcccagcagcctggaggagctgggctatgagtacatggatgtgggcagtgacctgagcgccagcctgggcagcacccagagctgccccctgcaccctgtgcccatcatgcccacagctggcaccaccccagatgaggactatgagtacatgaaccggcagagagatggcggcggccctggaggagactatgctgccatgggcgcctgcccagccagcgagcagggctatgaggagatgagggccttccagggccctggccaccaggccccccacgtgcactacgcccggctgaagaccctgcggagcctggaggccacagattctgcctttgacaacccagactactggcacagccgcctcttccccaaggccaatgcccagaggacatag

SEQ ID NO: 22427 - DNA, 996 bp, synthetic construct
  misc_feature 1..996: note = Description of Artificial Sequence: Synthetic coding sequence
  source 1..996: mol_type = other DNA
atgagggccaatgatgccctgcaggtgctgggcctgctcttcagcctggcccggggcagcgaggtgggcaacagccaggccgtgtgccccggcaccctgaatggcctgtctgtgactggagatgctgagaaccagtaccagaccctgtacaagctgtatgagcgctgtgaggtggtgatgggcaacctggagatcgtgctgaccggccacaatgctgacctgtccttcctgcagtggatccgggaggtgacaggctacgtgctggtggccatgaatgagttcagcaccctgcccctgcccaacctgcgggtggtgcggggcacccaggtgtatgatggcaagtttgccatctttgtgatgctgaactacaacaccaacagcagccacgccctgcggcagctgcggctgacccagctgacagagatcctgagcggcggcgtgtacatcgagaagaatgacaagctgtgccacatggacaccatcgactggagggacatcgtgcgggacagagatgctgagatcgtggtgaaggacaatggccgcagctgccccccctgccacgaggtgtgcaagggccgctgctggggccctggcagcgaggactgccagaccctgaccaagaccatctgtgccccccagtgcaatggccactgcttcggccccaaccccaaccagtgctgccatgatgaatgtgccggcggctgcagcggcccccaggacacagactgctttgcctgccgccacttcaatgacagcggggcctgtgtgccccgctgcccccagcccctggtgtacaacaagctgaccttccagctggagcccaacccccacaccaagtaccagtatggaggagtgtgtgtggccagctgcccccacaactttgtggtggaccagaccagctgtgtgcgggcctgccccccagacaagatggaggtggacaagaatggcctgaagatgtgtgagccctgtggcggcctgtgccccaaggtgttctag

SEQ ID NO: 22428 - DNA, 552 bp, synthetic construct
  misc_feature 1..552: note = Description of Artificial Sequence: Synthetic coding sequence
  source 1..552: mol_type = other DNA
atgagggccaatgatgccctgcaggtgctgggcctgctcttcagcctggcccggggcagcgaggtgggcaacagccaggccgtgtgccccggcaccctgaatggcctgtctgtgactggagatgctgagaaccagtaccagaccctgtacaagctgtatgagcgctgtgaggtggtgatgggcaacctggagatcgtgctgaccggccacaatgctgacctgtccttcctgcagtggatccgggaggtgacaggctacgtgctggtggccatgaatgagttcagcaccctgcccctgcccaacctgcgggtggtgcggggcacccaggtgtatgatggcaagtttgccatctttgtgatgctgaactacaacaccaacagcagccacgccctgcggcagctgcggctgacccagctgaccggccagttccccatggtgcccagcggcctgaccccccagcctgcccaggactggtacctgctggatgatgacccccggctgctgaccctgagcgccagcagcaaggtgcctgtgaccctggccgctgtgtag

SEQ ID NO: 22429 - DNA, 3852 bp, synthetic construct
  misc_feature 1..3852: note = Description of Artificial Sequence: Synthetic coding sequence
  source 1..3852: mol_type = other DNA
atgggcaacctggagatcgtgctgaccggccacaatgctgacctgtccttcctgcagtggatccgggaggtgacaggctacgtgctggtggccatgaatgagttcagcaccctgcccctgcccaacctgcgggtggtgcggggcacccaggtgtatgatggcaagtttgccatctttgtgatgctgaactacaacaccaacagcagccacgccctgcggcagctgcggctgacccagctgacagagatcctgtctggaggagtgtacatcgagaagaatgacaagctgtgccacatggacaccatcgactggagggacatcgtgcgggacagagatgctgagatcgtggtgaaggacaatggccgcagctgccccccctgccacgaggtgtgcaagggccgctgctggggccctggcagcgaggactgccagaccctgaccaagaccatctgtgccccccagtgcaatggccactgcttcggccccaaccccaaccagtgctgccatgatgaatgtgccggcggctgcagcggcccccaggacacagactgctttgcctgccgccacttcaatgattctggggcctgtgtgccccgctgcccccagcccctggtgtacaacaagctgaccttccagctggagcccaacccccacaccaagtaccagtatggaggagtgtgtgtggccagctgcccccacaactttgtggtggaccagaccagctgtgtgcgggcctgccccccagacaagatggaggtggacaagaatggcctgaagatgtgtgagccctgtggcggcctgtgccccaaggcctgtgagggcactggaagtggcagccgcttccagacagtggacagcagcaacattgatggctttgtgaactgcaccaagatcctgggcaacctggacttcctgatcaccggcctgaatggagacccctggcacaagatcccagccctggaccctgagaagctgaatgtgttcagaacagtgcgggagatcaccggctacctgaacatccagagctggccaccccacatgcacaacttctctgtgttcagcaacctgaccaccatcggcggccgcagcctgtacaacagaggcttcagcctgctgatcatgaagaacctgaatgtgaccagcctgggcttccgcagcctgaaggagatctctgctggccgcatctacatcagcgccaaccggcagctgtgctaccaccacagcctgaactggaccaaggtgctgcggggccccacagaggagcggctggacatcaagcacaaccggccccggcgggactgtgtggccgagggcaaggtgtgtgaccccctgtgcagcagcggcggctgctggggccctggccctggccagtgcctgagctgcaggaactacagcagaggaggagtgtgtgtgacccactgcaacttcctgaatggagagccccgggagtttgcccacgaggccgagtgcttcagctgccaccctgagtgccagcccatggagggcacagccacctgcaatggaagtggcagtgacacctgtgcccagtgtgcccacttcagagatggcccccactgtgtgagcagctgcccccacggcgtgctgggcgccaagggccccatctacaagtacccagatgtgcagaatgaatgtcggccctgccacgagaactgcacccagggctgcaagggccctgagctgcaggactgcctgggccagaccctggtgctgattggcaagacccacctgaccatggccctgactgtgattgctggcctggtggtgatcttcatgatgctgggcggcaccttcctgtactggaggggccgccgcatccagaacaagagggccatgaggcgctacctggagcggggggagagcattgagcccctggaccccagcgagaaggccaacaaggtgctggcccgcatcttcaaggagacagagctgaggaagctgaaggtgctgggcagcggcgtgtttggaacagtgcacaagggcgtgtggatccctgagggggagagcatcaagatccctgtgtgcatcaaggtgattgaggacaagagcggccggcagagcttccaggccgtgacagaccacatgctggccatcggcagcctggaccacgcccacatcgtgcggctgctgggcctgtgccccggcagcagcctgcagctggtgacccagtacctgcccctgggcagcctgctggaccacgtgcggcagcacagaggagccctgggcccccagctgctgctgaactggggcgtgcagatcgccaagggcatgtactacctggaggagcacggcatggtgcacaggaacctggccgccagaaatgtgctgctgaagagccccagccaggtgcaggtggccgactttggagtggccgacctgctgcccccagatgacaagcagctgctgtacagcgaggccaagacccccatcaagtggatggccctggagagcatccactttgggaagtacacccaccagagtgatgtgtggagctatggagtgacagtgtgggagctgatgaccttcggggctgagccctatgccggcctgcggctggccgaggtgcctgacctgctggagaagggggagcggctggcccagccccagatctgcaccattgatgtgtacatggtgatggtgaagtgctggatgattgatgagaacatccggcccaccttcaaggagctggccaatgagttcaccaggatggcccgggaccccccacgctacctggtgatcaagcgggagagcggccctggcatcgcccctggccctgagccccacggcctgaccaacaagaagctggaggaggtggagctggagcctgagctggacctggacctggacctggaggccgaggaggacaacctggccaccaccaccctgggcagcgccctgagcctgcctgtgggcaccctgaaccggccccggggcagccagagcctgctgagccccagcagcggctacatgcccatgaaccagggcaacctgggggagagctgccaggagagcgctgtgtctggcagcagcgagcgctgccccaggcctgtgtccctgcaccccatgccccggggctgcctggccagcgagagcagcgagggccacgtgactggaagtgaagctgagctgcaggagaaggtgtccatgtgccgcagccgcagccgcagccgcagcccccggcccaggggggacagcgcctaccacagccagaggcacagcctgctgacccctgtgacccccctgagccccccaggcctggaggaggaggatgtgaatggctacgtgatgccagacacccacctgaagggcacccccagcagccgggagggcaccctgagctctgtgggcctgagctctgtgctgggcacagaggaggaggatgaagatgaggagtatgagtacatgaacagaagaagaagacacagccccccccaccccccccggcccagcagcctggaggagctgggctatgagtacatggatgtgggcagtgacctgagcgccagcctgggcagcacccagagctgccccctgcaccctgtgcccatcatgcccacagctggcaccaccccagatgaagattatgagtacatgaaccggcagagagatggcggcggccctggaggagactatgctgccatgggcgcctgcccagccagcgagcagggctatgaggagatgagggccttccagggccctggccaccaggcccctcatgtgcactacgcccggctgaagaccctgcggagcctggaggccacagacagcgcctttgacaacccagactactggcacagccgcctcttccccaaggccaatgcccagaggacatag

SEQ ID NO: 22430 - DNA, 2100 bp, synthetic construct
  misc_feature 1..2100: note = Description of Artificial Sequence: Synthetic coding sequence
  source 1..2100: mol_type = other DNA
atggccctgactgtgattgctggcctggtggtgatcttcatgatgctgggcggcaccttcctgtactggaggggccgccgcatccagaacaagagggccatgaggcgctacctggagcggggggagagcattgagcccctggaccccagcgagaaggccaacaaggtgctggcccgcatcttcaaggagacagagctgaggaagctgaaggtgctgggcagcggcgtgtttggaacagtgcacaagggcgtgtggatccctgagggggagagcatcaagatccctgtgtgcatcaaggtgattgaggacaagagcggccggcagagcttccaggccgtgacagaccacatgctggccatcggcagcctggaccacgcccacatcgtgcggctgctgggcctgtgccccggcagcagcctgcagctggtgacccagtacctgcccctgggcagcctgctggaccacgtgcggcagcacagaggagccctgggcccccagctgctgctgaactggggcgtgcagatcgccaagggcatgtactacctggaggagcacggcatggtgcacaggaacctggccgccagaaatgtgctgctgaagagccccagccaggtgcaggtggccgactttggagtggccgacctgctgcccccagatgacaagcagctgctgtacagcgaggccaagacccccatcaagtggatggccctggagagcatccactttgggaagtacacccaccagagtgatgtgtggagctatggagtgacagtgtgggagctgatgaccttcggggctgagccctatgccggcctgcggctggccgaggtgcctgacctgctggagaagggggagcggctggcccagccccagatctgcaccattgatgtgtacatggtgatggtgaagtgctggatgattgatgagaacatccggcccaccttcaaggagctggccaatgagttcaccaggatggcccgggaccccccacgctacctggtgatcaagcgggagagcggccctggcatcgcccctggccctgagccccacggcctgaccaacaagaagctggaggaggtggagctggagcctgagctggacctggacctggacctggaggccgaggaggacaacctggccaccaccaccctgggcagcgccctgagcctgcctgtgggcaccctgaaccggccccggggcagccagagcctgctgagccccagcagcggctacatgcccatgaaccagggcaacctgggggagagctgccaggagagcgctgtgtctggcagcagcgagcgctgccccaggcctgtgtccctgcaccccatgccccggggctgcctggccagcgagagcagcgagggccacgtgactggaagtgaagctgagctgcaggagaaggtgtccatgtgccgcagccgcagccgcagccgcagcccccggcccaggggggacagcgcctaccacagccagaggcacagcctgctgacccctgtgacccccctgagccccccaggcctggaggaggaggatgtgaatggctacgtgatgccagacacccacctgaagggcacccccagcagccgggagggcaccctgagctctgtgggcctgagctctgtgctgggcacagaggaggaggatgaagatgaggagtatgagtacatgaacagaagaagaagacacagccccccccaccccccccggcccagcagcctggaggagctgggctatgagtacatggatgtgggcagtgacctgagcgccagcctgggcagcacccagagctgccccctgcaccctgtgcccatcatgcccacagctggcaccaccccagatgaagattatgagtacatgaaccggcagagagatggcggcggccctggaggagactatgctgccatgggcgcctgcccagccagcgagcagggctatgaggagatgagggccttccagggccctggccaccaggcccctcatgtgcactacgcccggctgaagaccctgcggagcctggaggccacagacagcgcctttgacaacccagactactggcacagccgcctcttccccaaggccaatgcccagaggacatag

SEQ ID NO: 22431 - DNA, 381 bp, synthetic construct
  misc_feature 1..381: note = Description of Artificial Sequence: Synthetic coding sequence
  source 1..381: mol_type = other DNA
atgagggccaatgatgccctgcaggtgctgggcctgctcttcagcctggcccggggcagcgaggtgggcaacagccaggccgtgtgccccggcaccctgaatggcctgtctgtgactggagatgctgagaaccagtaccagaccctgtacaagctgtatgagcgctgtgaggtggtgatgggcaacctggagatcgtgctgaccggccacaatgctgacctgtccttcctgcagtggatccgggaggtgacaggctacgtgctggtggccatgaatgagttcagcaccctgcccctgcccaacctgcgggtggtgcggggcacccaggtgtatgatggcaagtttgccatctttgtgatgctgaactacaacaccaactag

SEQ ID NO: 22432 - DNA, 2766 bp, synthetic construct
  misc_feature 1..2766: note = Description of Artificial Sequence: Synthetic coding sequence
  source 1..2766: mol_type = other DNA
atgagggccaatgatgccctgcaggtgctgggcctgctcttcagcctggcccggggcagcgaggtgggcaacagccaggccgtgtgccccggcaccctgaatggcctgtctgtgactggagatgctgagaaccagtaccagaccctgtacaagctgtatgagcgctgtgaggtggtgatgggcaacctggagatcgtgctgaccggccacaatgctgacctgtccttcctgcagtggatccgggaggtgacaggctacgtgctggtggccatgaatgagttcagcaccctgcccctgcccaacctgcgggtggtgcggggcacccaggtgtatgatggcaagtttgccatctttgtgatgctgaactacaacaccaacagcagccacgccctgcggcagctgcggctgacccagctgacagagatcctgagcggcggcgtgtacatcgagaagaatgacaagctgtgccacatggacaccatcgactggagggacatcgtgcgggacagagatgctgagatcgtggtgaaggacaatggccgcagctgccccccctgccacgaggtgtgcaagggccgctgctggggccctggcagcgaggactgccagaccctgaccaagaccatctgtgccccccagtgcaatggccactgcttcggccccaaccccaaccagtgctgccatgatgaatgtgccggcggctgcagcggcccccaggacacagactgctttgcctgccgccacttcaatgacagcggggcctgtgtgccccgctgcccccagcccctggtgtacaacaagctgaccttccagctggagcccaacccccacaccaagtaccagtatggaggagtgtgtgtggccagctgcccccacaactttgtggtggaccagaccagctgtgtgcgggcctgccccccagacaagatggaggtggacaagaatggcctgaagatgtgtgagccctgtggcggcctgtgccccaaggcctgtgagggcaccggcagcggcagccgcttccagacagtggacagcagcaacattgatggctttgtgaactgcaccaagatcctgggcaacctggacttcctgatcaccggcctgaatggagacccctggcacaagatcccagccctggaccctgagaagctgaatgtgttcagaacagtgcgggagatcaccggctacctgaacatccagagctggccaccccacatgcacaacttcagcgtcttcagcaacctgaccaccatcggcggccgcagcctgtacaacagaggcttcagcctgctgatcatgaagaacctgaatgtgaccagcctgggcttccgcagcctgaaggagatctctgctggccgcatctacatcagcgccaaccggcagctgtgctaccaccacagcctgaactggaccaaggtgctgcggggccccacagaggagcggctggacatcaagcacaaccggccccggcgggactgtgtggccgagggcaaggtgtgtgaccccctgtgcagcagcggcggctgctggggccctggccctggccagtgcctgagctgcaggaactacagccggggcggcgtgtgtgtgacccactgcaacttcctgaatggagagccccgggagtttgcccatgaagctgagtgcttcagctgccaccctgagtgccagcccatggagggcacagccacctgcaatggcagcggcagtgacacctgtgcccagtgtgcccacttcagagatggcccccactgtgtgagcagctgcccccatggagtgctgggcgccaagggccccatctacaagtacccagatgtgcagaatgaatgtcggccctgccacgagaactgcacccagggctgcaagggccctgagctgcaggactgcctgggccagaccctggtgctgattggcaagacccacctgaccatggccctgactgtgattgctggcctggtggtgatcttcatgatgctgggcggcaccttcctgtactggagaggaagacgcatccagaacaagagggccatgaggcgctacctggagcggggggagagcattgagcccctggaccccagcgagaaggccaacaaggtgctggcccgcatcttcaaggagacagagctgaggaagctgaaggtgctgggcagcggcgtgtttggcaccgtgcacaagggcgtgtggatccctgagggggagagcatcaagatccctgtgtgcatcaaggtgattgaggacaagagcggccggcagagcttccaggccgtgacagaccacatgctggccatcggcagcctggaccacgcccacatcgtgcggctgctgggcctgtgccccggcagcagcctgcagctggtgacccagtacctgcccctgggcagcctgctggaccacgtgcggcagcacagaggagccctgggcccccagctgctgctgaactggggcgtgcagatcgccaagggcatgtactacctggaggagcacggcatggtgcacaggaacctggccgccagaaatgtgctgctgaagagccccagccaggtgcaggtggccgactttggagtggccgacctgctgcccccagatgacaagcagctgctgtacagcgaggccaagacccccatcaagtggatggccctggagagcatccactttgggaagtacacccaccagagtgatgtgtggagctatggccagtgcatctggatgcccagcctgcccagcctggcccctgtgagcaacctgccctttgagacccccagctag

SEQ ID NO: 22433 - DNA, 10191 bp, synthetic construct
  misc_feature 1..10191: note = Description of Artificial Sequence: Synthetic coding sequence
  source 1..10191: mol_type = other DNA
atgttcatcaacatcaagagcatcctgtggatgtgcagcaccctcatcgtgacccacgccctgcacaaggtgaaggtgggcaagagcccccctgtgcggggcagcctgagcggcaaggtgtccctgccctgccacttcagcaccatgcccaccctgcccccatcctacaacaccagcgagttcctgcgcatcaagtggagcaagattgaggtggacaagaatggcaaggacctgaaggagaccaccgtgctggtggcccagaatggaaacatcaagattggccaggactacaagggccgggtgtctgtgcccacccaccctgaggccgtgggagatgccagcctgactgtggtgaagctgctggccagtgatgctggcctgtaccgctgtgatgtgatgtatggaattgaggacacccaggacacagtgtccctgactgtggatggagtggtgttccactaccgggccgccaccagccgctacaccctgaactttgaagctgcccagaaggcctgcctggatgtgggcgctgtgattgccaccccagagcagctgtttgctgcctatgaagatggctttgagcagtgtgatgctggctggctggccgaccagacagtgcgctaccccatccgggccccccgggtgggctgctacggggacaagatgggcaaggccggcgtgaggacctacggcttccgcagcccccaggagacctatgatgtgtactgctacgtggaccacctggatggagatgtgttccacctgactgtgcccagcaagttcacctttgaggaggccgccaaggaatgtgagaaccaggatgcccggctggccaccgtgggggagctgcaggccgcctggagaaatggatttgaccagtgtgactatggctggctgagtgatgcctctgtgcgccaccctgtgacagtggcccgggcccagtgtggcggcggcctgctgggcgtgaggaccctgtacagatttgagaaccagacaggcttccccccaccagacagcagatttgatgcctactgcttcaagcccaaggaggccaccaccatcgacctgagcatcctggccgagacagccagccccagcctgagcaaggagccccagatggtgtctgacaggaccacccccatcatccccctggtggatgagctgcctgtgatccccacagagttcccccctgtgggcaacatcgtgtcctttgagcagaaggccaccgtgcagccccaggccatcacagacagcctggccaccaagctgcccacccccaccggcagcaccaagaagccctgggacatggatgactacagccccagcgccagcggccccctgggcaagctggacatcagcgagatcaaggaggaggtgctgcagagcaccaccggggtgagccactacgccacagacagctgggatggagtggtggaggacaagcagacccaggagagcgtgacccagatcgagcagatcgaggtgggccccctggtgacctccatggagatcctgaagcacatccccagcaaggagttccctgtgacagagacccccctggtgacagccaggatgatcctggagagcaagacagagaagaagatggtgtccacagtgtctgagctggtgaccaccggccactacggcttcaccctgggggaggaggatgatgaggacaggaccctgactgtgggcagtgatgagagcaccctcatctttgaccagatccctgaggtgatcaccgtgtccaagaccagcgaggacaccatccacacccacctggaggacctggagagcgtgtctgccagcaccaccgtgagccccctcatcatgccagacaacaacggcagctccatggatgactgggaggagcggcagaccagcggccgcatcacagaggagttcctgggcaagtacctgagcaccacccccttccccagccagcacaggacagaaattgagctgttcccctacagcggggacaagatcctggtggagggcatcagcaccgtcatctaccccagcctgcagacagagatgacccacagaagagagaggacagagaccctcatccctgagatgaggacagacacctacacagatgagatccaggaggagatcaccaagagccccttcatgggcaagacagaggaggaggtgttcagcggcatgaagctgagcaccagcctgtctgagcccatccacgtgacagagagctctgtggagatgaccaagagctttgacttccccaccctcatcaccaagctgtctgctgagcccacagaggtgcgggacatggaggaggacttcaccgccaccccaggcaccaccaagtatgatgagaacatcaccaccgtgctgctggcccacggcaccctgtctgtggaggccgccaccgtgtccaagtggagctgggatgaggacaacaccaccagcaagcccctggagagcacagagcccagcgccagcagcaagctgcccccagccctgctgaccaccgtgggcatgaatggcaaggacaaggacatccccagcttcacagaagatggagcagatgagttcaccctcatcccagacagcacccagaagcagctggaggaggtgacagatgaagatattgctgcccacggcaagttcaccatccgcttccagcccaccaccagcactggaattgctgagaagagcaccctgcgggacagcaccacagaggagaaggtgccccccatcaccagcacagagggccaggtgtatgccaccatggagggcagcgccctgggggaggtggaggatgtggacctgagcaagcctgtgtccacagtgccccagtttgcccacaccagcgaggtggagggcctggcctttgtgtcctacagcagcacccaggagcccaccacctacgtggacagcagccacaccatccccctgagcgtcatccccaagacagactggggcgtgctggtgcccagcgtgcccagtgaagatgaggtgctgggggagcccagccaggacatcctggtgattgaccagacccggctggaggccaccatcagccctgagaccatgaggaccaccaagatcacagagggcaccacccaggaggagttcccctggaaggagcagacagctgagaagcctgtgcctgccctgagcagcacagcctggacccccaaggaggccgtgacccccctggatgagcaggagggagatggcagcgcctacacagtgtctgaagatgagctgctgaccggcagcgagcgggtgcctgtgctggagaccacccctgtgggcaagattgaccacagcgtgtcctacccacctggagctgtgacagagcacaaggtgaagacagatgaggtggtgaccctgaccccccgcatcggccccaaggtgtccctgagccctggccctgagcagaagtatgaaacagagggcagcagcaccaccggcttcaccagcagcctgagccccttcagcacccacatcacccagctgatggaggagaccaccacagagaagaccagcctggaggacatcgacctgggcagcggcctgtttgagaagcccaaggccacagagctgattgagttcagcaccatcaaggtgacagtgcccagcgacatcaccacagccttcagctctgtggaccggctgcacaccaccagcgccttcaagcccagcagcgccatcaccaagaagccacccctgattgaccgggagcccggggaggagaccaccagtgacatggtgatcattggagagagcaccagccacgtgccccccaccaccctggaggacatcgtggccaaggagacagaaacagacatcgaccgggagtacttcaccaccagcagccccccagccacccagcccacccggcccccaacagtggaggacaaggaggccttcggcccccaggccctgagcaccccccagcccccagccagcaccaagttccacccagacatcaacgtgtacatcatcgaggtgcgggagaacaagacaggccgcatgtctgacctgtctgtgattggccaccccattgattctgagagcaaagaagatgagccctgcagcgaggagacagatcctgtgcatgacctgatggccgagatcctgcctgagttcccagacatcattgaaattgacctgtaccacagcgaggagaatgaggaggaggaggaggagtgtgccaatgccacagatgtgaccaccaccccatctgtgcagtacatcaacgggaagcacctggtgaccaccgtgcccaaggaccctgaggccgctgaggcccggcggggccagtttgagagcgtggcccccagccagaacttcagtgacagcagcgagagtgacacccaccccttcgtcatcgccaagacagagctgagcacagctgtgcagcccaatgaaagcacagagaccacagagagcctggaggtgacctggaagccagagacctacccagagaccagcgagcacttcagcggcggggagccagatgtgttccccaccgtgcccttccacgaggagtttgagagcggcacagccaagaagggagctgagagcgtgacagagcgggacacagaggtgggccaccaggcccacgagcacacagagcctgtgtccctcttccctgaggagagcagcggggagatcgccatcgaccaggagagccagaagatcgcctttgcccgggccacagaggtgaccttcggggaggaggtggagaagagcacctctgtgacctacacccccaccatcgtgcccagcagcgccagcgcctacgtgtctgaggaggaggccgtgaccctcatcggcaacccctggccagatgacctgctgagcaccaaggagagctgggtggaggccaccccccggcaggtggtggagctgagcggcagcagcagcatccccatcacagagggcagcggggaggccgaggaggatgaggacaccatgttcaccatggtgacagacctgagccagaggaacaccacagacaccctcatcaccctggacaccagccgcatcatcacagagagcttctttgaggtgcctgccaccaccatctaccctgtgtctgagcagcccagcgccaaggtggtgcccaccaagtttgtgtctgaaacagacaccagcgagtggatcagcagcaccaccgtggaggagaagaagaggaaggaggaggagggcaccaccggcacagccagcacctttgaggtgtacagcagcacccagaggagtgaccagctgatcctgccctttgagctggagagccccaacgtggccaccagcagtgacagcggcaccaggaagagcttcatgagcctgaccacccccacccagagcgagcgggagatgacagacagcacccctgtgttcacagagaccaacaccctggagaacctgggcgcccagaccacagagcacagcagcatccaccagcccggggtgcaggagggcctgaccaccctgcccaggagccctgccagcgtcttcatggagcagggcagcggggaggccgctgctgaccctgagaccaccaccgtgtcctccttcagcctgaatgtggagtatgccatccaggccgagaaggaggtggccggcaccctgagcccccacgtggagaccaccttcagcacagagcccaccggcctggtgctgagcacagtgatggacagagtggtggccgagaacatcacccagaccagccgggagatcgtcatcagcgagcggctgggggagcccaactatggagctgagatccggggcttcagcacaggcttccccctggaggaggacttcagcggggacttccgggagtacagcacagtgagccaccccatcgccaaggaggagaccgtgatgatggagggcagcggagatgctgccttccgggacacccagaccagccccagcacagtgcccacctctgtgcacatcagccacatcagtgacagcgagggccccagcagcaccatggtgtccaccagcgccttcccctgggaggagttcaccagcagcgctgagggcagcggggagcagctggtgacagtgagcagctctgtggtgcctgtgctgcccagcgctgtgcagaagttcagcggcacagccagcagcatcattgatgagggcctgggggaggtgggcaccgtgaatgaaattgaccggcgcagcaccatcctgcccacagctgaggtggagggcaccaaggcccctgtggagaaggaggaggtgaaggtgtctggaacagtgtccaccaacttcccccagaccatcgagcccgccaagctgtggagccggcaggaggtgaaccctgtgcggcaggagattgagagcgagaccaccagcgaggagcagatccaggaggagaagagctttgagagcccccagaacagccctgccacagagcagaccatctttgacagccagaccttcacagaaacagagctgaagaccacagactacagcgtgctgaccaccaagaagacctacagtgatgacaaggagatgaaggaggaggacaccagcctggtgaacatgagcaccccagaccctgatgccaacggcctggagagctacaccaccctgcctgaggccacagagaagagccacttcttcctggccacagccctggtgacagagagcatcccagctgagcacgtggtgacagacagccccatcaagaaggaggagagcaccaagcacttccccaagggcatgaggcccaccatccaggagagtgacacagagctgctcttcagcggcctgggcagcggggaggaggtgctgcccaccctgcccacagagagcgtgaacttcacagaggtggagcagatcaacaacaccctgtacccccacaccagccaggtggagagcaccagcagtgacaagattgaggacttcaacaggatggagaatgtggccaaggaggtgggccccctggtgtcccagacagacatctttgagggcagcggctctgtgaccagcaccaccctgattgagatcctgagtgacacaggagctgagggccccaccgtggcccccctgcccttcagcacagacatcggccacccccagaaccagacagtgcgctgggccgaggagatccagaccagccggccccagaccatcacagagcaggacagcaacaagaacagcagcacagctgagatcaatgagaccaccaccagcagcacagacttcctggcccgggcctacggctttgagatggccaaggagtttgtgaccagcgcccccaagcccagcgacctgtactatgagcccagcggggagggcagcggggaggtggacatcgtggacagcttccacaccagcgccaccacccaggccacccggcaggagagcagcaccacctttgtgtctgatggcagcctggagaagcaccctgaggtgcccagcgccaaggctgtgacagcagatggcttccccaccgtgtctgtgatgctgcccctgcacagcgagcagaacaagagcagcccagaccccaccagcaccctgagcaacacagtgtcctatgaaagaagcacagatggcagcttccaggaccgcttccgggagtttgaggacagcaccctgaagcccaacaggaagaagcccacagagaacatcatcatcgacctggacaaggaggacaaggacctgatcctgaccatcacagagagcaccatcctggagatcctgcctgagctgaccagtgacaagaacaccatcatcgacatcgaccacaccaagcctgtgtatgaggacatcctgggcatgcagacagacatcgacacagaggtgcccagcgagccccatgacagcaatgatgagagcaatgatgacagcacccaggtgcaggagatctatgaagctgctgtgaacctgagcctgacagaggagacctttgagggcagcgcagatgtgctggccagctacacccaggccacccatgatgagagcatgacctatgaggacaggagccagctggaccacatgggcttccacttcaccaccggcatcccagcccccagcacagaaacagagctggatgtgctgctgcccacagccaccagcctgcccatccccaggaagagcgccaccgtcatccctgagattgagggcatcaaggccgaggccaaggccctggatgacatgtttgagagcagcaccctgagtgatggccaggccatcgctgaccagagcgagatcatccccaccctgggccagtttgagaggacccaggaggagtatgaggacaagaagcatgctggccccagcttccagcctgagttcagcagtggagctgaggaggccctggtggaccacaccccctacctgagcatcgccaccacccacctgatggaccagagcgtgacagaggtgcctgatgtgatggagggcagcaaccccccctactacacagacaccaccctggccgtgtccacctttgccaagctgagcagccagacccccagcagccccctgaccatctacagcggcagcgaggccagcggccacacagagatcccccagcccagcgccctgcccggcattgatgtgggcagctctgtgatgagcccccaggacagcttcaaggagatccacgtgaacatcgaggccaccttcaagcccagcagcgaggagtacctgcacatcacagagccccccagcctgagcccagacaccaagctggagcccagtgaagatgatggcaagccagagctgctggaggagatggaggccagccccacagagctgattgctgtggagggcacagagatcctgcaggacttccagaacaagacagatggccaggtgtctggagaggccatcaagatgttccccaccatcaagaccccagaggccggcaccgtcatcaccacagcagatgaaattgagctggagggcgccacccagtggccccacagcaccagcgccagcgccacctacggcgtggaggccggcgtggtgccctggctgagcccccagaccagcgagcggcccaccctgagcagcagccctgagatcaaccctgagacccaggccgccctgatccggggccaggacagcaccatcgccgccagcgagcagcaggtggccgcccgcatcctggacagcaatgaccaggccaccgtgaaccctgtggagttcaacacagaggtggccaccccacccttcagcctgctggagaccagcaatgaaacagacttcctgattggcatcaatgaggagagcgtggagggcacagccatctacctgcccggccctgaccgctgcaagatgaacccctgcctgaatggaggcacctgctaccccacagagaccagctatgtgtgcacctgtgtgcccggctacagcggggaccagtgtgagctggactttgatgagtgccacagcaacccctgcagaaatggagccacctgtgtggatggcttcaacaccttccgctgcctgtgcctgcccagctatgtgggcgccctgtgtgagcaggacacagagacctgtgactatggctggcacaagttccagggccagtgctacaagtactttgcccacaggaggacctgggatgctgctgagcgggagtgccgcctgcagggcgcccacctgaccagcatcctgagccatgaggagcagatgtttgtgaacagagtgggccatgactaccagtggattggcctgaatgacaagatgtttgaacatgacttccgctggacagatggcagcaccctgcagtatgagaactggaggcccaaccagcctgacagcttcttctctgctggggaggactgtgtggtgatcatctggcatgaaaatggccagtggaatgatgtgccctgcaactaccacctgacctacacctgcaagaagggcaccgtggcctgtggccagccccctgtggtggagaatgccaagaccttcggcaagatgaagcccaggtatgagatcaacagcctcatccgctaccactgcaaggatggcttcatccagaggcacctgcccaccatccgctgcctgggcaatggccgctgggccatccccaagatcacctgcatgaaccccagcgcctaccagaggacctacagcatgaagtacttcaagaacagcagcagcgccaaggacaacagcatcaacaccagcaagcatgaccaccgctggagccgccgctggcaggagagcagaagatag

SEQ ID NO: 22434 - DNA, 4929 bp, synthetic construct
  misc_feature 1..4929: note = Description of Artificial Sequence: Synthetic coding sequence
  source 1..4929: mol_type = other DNA
atgttcatcaacatcaagagcatcctgtggatgtgcagcaccctcatcgtgacccacgccctgcacaaggtgaaggtgggcaagagcccccctgtgcggggcagcctgagcggcaaggtgtccctgccctgccacttcagcaccatgcccaccctgcccccatcctacaacaccagcgagttcctgcgcatcaagtggagcaagattgaggtggacaagaatggcaaggacctgaaggagaccaccgtgctggtggcccagaatggaaacatcaagattggccaggactacaagggccgggtgtctgtgcccacccaccctgaggccgtgggagatgccagcctgactgtggtgaagctgctggccagtgatgctggcctgtaccgctgtgatgtgatgtatggaattgaggacacccaggacacagtgtccctgactgtggatggagtggtgttccactaccgggccgccaccagccgctacaccctgaactttgaagctgcccagaaggcctgcctggatgtgggcgctgtgattgccaccccagagcagctgtttgctgcctatgaagatggctttgagcagtgtgatgctggctggctggccgaccagacagtgcgctaccccatccgggccccccgggtgggctgctacggggacaagatgggcaaggccggcgtgaggacctacggcttccgcagcccccaggagacctatgatgtgtactgctacgtggaccacctggatggagatgtgttccacctgactgtgcccagcaagttcacctttgaggaggccgccaaggaatgtgagaaccaggatgcccggctggccaccgtgggggagctgcaggccgcctggagaaatggatttgaccagtgtgactatggctggctgagtgatgcctctgtgcgccaccctgtgacagtggcccgggcccagtgtggcggcggcctgctgggcgtgaggaccctgtacagatttgagaaccagacaggcttccccccaccagacagcagatttgatgcctactgcttcaagcccaaggaggccaccaccatcgacctgagcatcctggccgagacagccagccccagcctgagcaaggagccccagatggtgtctgacaggaccacccccatcatccccctggtggatgagctgcctgtgatccccacagagttcccccctgtgggcaacatcgtgtcctttgagcagaaggccaccgtgcagccccaggccatcacagacagcctggccaccaagctgcccacccccaccggcagcaccaagaagccctgggacatggatgactacagccccagcgccagcggccccctgggcaagctggacatcagcgagatcaaggaggaggtgctgcagagcaccaccggggtgagccactacgccacagacagctgggatggagtggtggaggacaagcagacccaggagagcgtgacccagatcgagcagatcgaggtgggccccctggtgacctccatggagatcctgaagcacatccccagcaaggagttccctgtgacagagacccccctggtgacagccaggatgatcctggagagcaagacagagaagaagatggtgtccacagtgtctgagctggtgaccaccggccactacggcttcaccctgggggaggaggatgatgaggacaggaccctgactgtgggcagtgatgagagcaccctcatctttgaccagatccctgaggtgatcaccgtgtccaagaccagcgaggacaccatccacacccacctggaggacctggagagcgtgtctgccagcaccaccgtgagccccctcatcatgccagacaacaacggcagctccatggatgactgggaggagcggcagaccagcggccgcatcacagaggagttcctgggcaagtacctgagcaccacccccttccccagccagcacaggacagaaattgagctgttcccctacagcggggacaagatcctggtggagggcatcagcaccgtcatctaccccagcctgcagacagagatgacccacagaagagagaggacagagaccctcatccctgagatgaggacagacacctacacagatgagatccaggaggagatcaccaagagccccttcatgggcaagacagaggaggaggtgttcagcggcatgaagctgagcaccagcctgtctgagcccatccacgtgacagagagctctgtggagatgaccaagagctttgacttccccaccctcatcaccaagctgtctgctgagcccacagaggtgcgggacatggaggaggacttcaccgccaccccaggcaccaccaagtatgatgagaacatcaccaccgtgctgctggcccacggcaccctgtctgtggaggccgccaccgtgtccaagtggagctgggatgaggacaacaccaccagcaagcccctggagagcacagagcccagcgccagcagcaagctgcccccagccctgctgaccaccgtgggcatgaatggcaaggacaaggacatccccagcttcacagaagatggagcagatgagttcaccctcatcccagacagcacccagaagcagctggaggaggtgacagatgaagatattgctgcccacggcaagttcaccatccgcttccagcccaccaccagcactggaattgctgagaagagcaccctgcgggacagcaccacagaggagaaggtgccccccatcaccagcacagagggccaggtgtatgccaccatggagggcagcgccctgggggaggtggaggatgtggacctgagcaagcctgtgtccacagtgccccagtttgcccacaccagcgaggtggagggcctggcctttgtgtcctacagcagcacccaggagcccaccacctacgtggacagcagccacaccatccccctgagcgtcatccccaagacagactggggcgtgctggtgcccagcgtgcccagtgaagatgaggtgctgggggagcccagccaggacatcctggtgattgaccagacccggctggaggccaccatcagccctgagaccatgaggaccaccaagatcacagagggcaccacccaggaggagttcccctggaaggagcagacagctgagaagcctgtgcctgccctgagcagcacagcctggacccccaaggaggccgtgacccccctggatgagcaggagggagatggcagcgcctacacagtgtctgaagatgagctgctgaccggcagcgagcgggtgcctgtgctggagaccacccctgtgggcaagattgaccacagcgtgtcctacccacctggagctgtgacagagcacaaggtgaagacagatgaggtggtgaccctgaccccccgcatcggccccaaggtgtccctgagccctggccctgagcagaagtatgaaacagagggcagcagcaccaccggcttcaccagcagcctgagccccttcagcacccacatcacccagctgatggaggagaccaccacagagaagaccagcctggaggacatcgacctgggcagcggcctgtttgagaagcccaaggccacagagctgattgagttcagcaccatcaaggtgacagtgcccagcgacatcaccacagccttcagctctgtggaccggctgcacaccaccagcgccttcaagcccagcagcgccatcaccaagaagccacccctgattgaccgggagcccggggaggagaccaccagtgacatggtgatcattggagagagcaccagccacgtgccccccaccaccctggaggacatcgtggccaaggagacagaaacagacatcgaccgggagtacttcaccaccagcagccccccagccacccagcccacccggcccccaacagtggaggacaaggaggccttcggcccccaggccctgagcaccccccagcccccagccagcaccaagttccacccagacatcaacgtgtacatcatcgaggtgcgggagaacaagacaggccctgaccgctgcaagatgaacccctgcctgaatggaggcacctgctaccccacagagaccagctatgtgtgcacctgtgtgcccggctacagcggggaccagtgtgagctggactttgatgagtgccacagcaacccctgcagaaatggagccacctgtgtggatggcttcaacaccttccgctgcctgtgcctgcccagctatgtgggcgccctgtgtgagcaggacacagagacctgtgactatggctggcacaagttccagggccagtgctacaagtactttgcccacaggaggacctgggatgctgctgagcgggagtgccgcctgcagggcgcccacctgaccagcatcctgagccatgaggagcagatgtttgtgaacagagtgggccatgactaccagtggattggcctgaatgacaagatgtttgaacatgacttccgctggacagatggcagcaccctgcagtatgagaactggaggcccaaccagcctgacagcttcttctctgctggggaggactgtgtggtgatcatctggcatgaaaatggccagtggaatgatgtgccctgcaactaccacctgacctacacctgcaagaagggcaccgtggcctgtggccagccccctgtggtggagaatgccaagaccttcggcaagatgaagcccaggtatgagatcaacagcctcatccgctaccactgcaaggatggcttcatccagaggcacctgcccaccatccgctgcctgggcaatggccgctgggccatccccaagatcacctgcatgaaccccagcgcctaccagaggacctacagcatgaagtacttcaagaacagcagcagcgccaaggacaacagcatcaacaccagcaagcatgaccaccgctggagccgccgctggcaggagagcagaagatag

SEQ ID NO: 22435 - DNA, 7230 bp, synthetic construct
  misc_feature 1..7230: note = Description of Artificial Sequence: Synthetic coding sequence
  source 1..7230: mol_type = other DNA
atgttcatcaacatcaagagcatcctgtggatgtgcagcaccctcatcgtgacccacgccctgcacaaggtgaaggtgggcaagagcccccctgtgcggggcagcctgagcggcaaggtgtccctgccctgccacttcagcaccatgcccaccctgcccccatcctacaacaccagcgagttcctgcgcatcaagtggagcaagattgaggtggacaagaatggcaaggacctgaaggagaccaccgtgctggtggcccagaatggaaacatcaagattggccaggactacaagggccgggtgtctgtgcccacccaccctgaggccgtgggagatgccagcctgactgtggtgaagctgctggccagtgatgctggcctgtaccgctgtgatgtgatgtatggaattgaggacacccaggacacagtgtccctgactgtggatggagtggtgttccactaccgggccgccaccagccgctacaccctgaactttgaagctgcccagaaggcctgcctggatgtgggcgctgtgattgccaccccagagcagctgtttgctgcctatgaagatggctttgagcagtgtgatgctggctggctggccgaccagacagtgcgctaccccatccgggccccccgggtgggctgctacggggacaagatgggcaaggccggcgtgaggacctacggcttccgcagcccccaggagacctatgatgtgtactgctacgtggaccacctggatggagatgtgttccacctgactgtgcccagcaagttcacctttgaggaggccgccaaggaatgtgagaaccaggatgcccggctggccaccgtgggggagctgcaggccgcctggagaaatggatttgaccagtgtgactatggctggctgagtgatgcctctgtgcgccaccctgtgacagtggcccgggcccagtgtggcggcggcctgctgggcgtgaggaccctgtacagatttgagaaccagacaggcttccccccaccagacagcagatttgatgcctactgcttcaagaggaggatgtctgacctgagcgtcatcggccaccccatcgacagcgagagcaaggaggatgagccctgcagcgaggagacagatcctgtgcatgacctgatggccgagatcctgcctgagttcccagacatcatcgagattgacctgtaccacagtgaagaaaatgaggaggaggaggaggagtgtgccaatgccacagatgtgaccaccacccccagcgtgcagtacatcaatggcaagcacctggtgaccaccgtgcccaaggaccctgaggccgctgaggcccggcggggccagtttgaatctgtggcccccagccagaacttcagtgacagcagcgagagtgacacccacccctttgtgattgccaagacagagctgagcacagctgtgcagcccaatgaaagcacagagaccacagagagcctggaggtgacctggaagccagagacctacccagagaccagcgagcacttctctggaggagagccagatgtgttccccaccgtgcccttccacgaggagtttgaaagtggcacagccaagaagggagctgagagcgtgacagagcgggacacagaggtgggccaccaggcccacgagcacacagagcctgtgtccctcttccctgaggagagcagtggagagatcgccatcgaccaggagagccagaagatcgcctttgcccgggccacagaggtgacctttggagaggaggtggagaagagcacctctgtgacctacacccccaccatcgtgcccagcagcgccagcgcctacgtgtctgaggaggaggccgtgaccctgattggcaacccctggccagatgacctgctgagcaccaaggagagctgggtggaggccaccccccggcaggtggtggagctgagcggcagcagcagcatccccatcacagagggcagcggggaggccgaggaggatgaggacaccatgttcaccatggtgacagacctgagccagaggaacaccacagacaccctcatcaccctggacaccagccgcatcatcacagagagcttctttgaggtgcctgccaccaccatctaccctgtgtctgagcagcccagcgccaaggtggtgcccaccaagtttgtgtctgaaacagacaccagcgagtggatcagcagcaccaccgtggaggagaagaagaggaaggaggaggagggcaccactggaacagccagcacctttgaggtgtacagcagcacccagaggagtgaccagctgatcctgccctttgagctggagagccccaacgtggccaccagcagtgacagcggcaccaggaagagcttcatgagcctgaccacccccacccagagcgagcgggagatgacagacagcacccctgtgttcacagagaccaacaccctggagaacctgggcgcccagaccacagagcacagcagcatccaccagcccggggtgcaggagggcctgaccaccctgcccaggagccctgcctctgtgttcatggagcagggcagcggggaggccgctgctgaccctgagaccaccaccgtgagcagcttcagcctgaatgtggagtatgccatccaggccgagaaggaggtggccggcaccctgagcccccacgtggagaccaccttcagcacagagcccaccggcctggtgctgagcacagtgatggacagagtggtggccgagaacatcacccagaccagccgggagatcgtcatcagcgagcggctgggggagcccaactacggggctgagatccggggcttcagcacaggcttccccctggaggaggacttcagcggggacttccgggagtacagcacagtgagccaccccatcgccaaggaggagaccgtgatgatggagggcagcggagatgctgccttccgggacacccagaccagccccagcacagtgcccacctctgtgcacatcagccacatcagtgacagcgagggccccagcagcaccatggtgtccaccagcgccttcccctgggaggagttcaccagcagcgctgagggcagcggggagcagctggtgacagtgagcagctctgtggtgcctgtgctgcccagcgctgtgcagaagttctctggaacagccagcagcatcattgatgagggcctgggggaggtgggcaccgtgaatgaaattgacagaagaagcaccatcctgcccacagctgaggtggagggcaccaaggcccctgtggagaaggaggaggtgaaggtgtctggcaccgtgtccaccaacttcccccagaccattgaaccagccaagctgtggagccggcaggaggtgaaccctgtgcggcaggagattgaaagtgagaccaccagcgaggagcagatccaggaggagaagagctttgagagcccccagaacagccctgccacagagcagaccatctttgacagccagaccttcacagaaacagagctgaagaccacagactacagcgtgctgaccaccaagaagacctacagtgatgacaaggagatgaaggaggaggacaccagcctggtgaacatgagcaccccagaccctgatgccaacggcctggagagctacaccaccctgcctgaggccacagagaagagccacttcttcctggccacagccctggtgacagagagcatcccagctgagcacgtggtgacagacagccccatcaagaaggaggagagcaccaagcacttccccaagggcatgaggcccaccatccaggagagtgacacagagctgctcttcagcggcctgggcagcggggaggaggtgctgcccaccctgcccacagaatctgtgaacttcacagaggtggagcagatcaacaacaccctgtacccccacaccagccaggtggagagcaccagcagtgacaagattgaggacttcaacaggatggagaatgtggccaaggaggtgggccccctggtgtcccagacagacatctttgagggcagcggctctgtgaccagcaccaccctcatcgagatcctgagtgacaccggggctgagggccccaccgtggcccccctgcccttcagcacagacatcggccacccccagaaccagacagtgcgctgggccgaggagatccagaccagccggccccagaccatcacagagcaggacagcaacaagaacagcagcacagctgagatcaatgagaccaccaccagcagcacagacttcctggcccgggcctacggctttgagatggccaaggagtttgtgaccagcgcccccaagcccagcgacctgtactatgagcccagcggggagggcagcggggaggtggacatcgtggacagcttccacaccagcgccaccacccaggccacccggcaggagagcagcaccacctttgtgtctgatggcagcctggagaagcaccctgaggtgcccagcgccaaggctgtgacagcagatggcttccccaccgtgtctgtgatgctgcccctgcacagcgagcagaacaagagcagcccagaccccaccagcaccctgagcaacacagtgtcctatgaaagaagcacagatggcagcttccaggaccgcttccgggagtttgaggacagcaccctgaagcccaacaggaagaagcccacagagaacatcatcatcgacctggacaaggaggacaaggacctgatcctgaccatcacagagagcaccatcctggagatcctgcctgagctgaccagtgacaagaacaccatcattgatattgaccacaccaagcctgtgtatgaggacatcctgggcatgcagacagacatcgacacagaggtgcccagcgagccccatgacagcaatgatgagagcaatgatgacagcacccaggtgcaggagatctatgaggccgctgtgaacctgagcctgacagaggagacctttgagggcagcgcagatgtgctggccagctacacccaggccacccatgatgagagcatgacctatgaagatagaagccagctggaccacatgggcttccacttcaccaccggcatcccagcccccagcacagaaacagagctggatgtgctgctgcccacagccaccagcctgcccatccccaggaagagcgccaccgtcatccctgagattgagggcatcaaggccgaggccaaggccctggatgacatgtttgagagcagcaccctgagtgatggccaggccatcgctgaccagagcgagatcatccccaccctgggccagtttgagaggacccaggaggagtatgaggacaagaagcacgccggccccagcttccagcctgagttcagcagcggggctgaggaggccctggtggaccacaccccctacctgagcatcgccaccacccacctgatggaccagagcgtgacagaggtgcctgatgtgatggagggcagcaaccccccctactacacagacaccaccctggccgtgtccacctttgccaagctgagcagccagacccccagcagccccctgaccatctacagcggcagcgaggccagcggccacacagagatcccccagcccagcgccctgcccggcattgatgtgggcagctctgtgatgagcccccaggacagcttcaaggagatccacgtgaacatcgaggccaccttcaagcccagcagcgaggagtacctgcacatcacagagccccccagcctgagcccagacaccaagctggagcccagtgaagatgatggcaagccagagctgctggaggagatggaggccagccccacagagctgattgctgtggagggcacagagatcctgcaggacttccagaacaagacagatggccaggtgtctggagaggccatcaagatgttccccaccatcaagaccccagaggccggcaccgtcatcaccacagcagatgaaattgagctggagggcgccacccagtggccccacagcaccagcgccagcgccacctatggagtggaggccggcgtggtgccctggctgagcccccagaccagcgagcggcccaccctgagcagcagccctgagatcaaccctgagacccaggccgccctgatccggggccaggacagcaccatcgccgccagcgagcagcaggtggccgcccgcatcctggacagcaatgaccaggccaccgtgaaccctgtggagttcaacacagaggtggccaccccacccttcagcctgctggagaccagcaatgaaacagacttcctgattggcatcaatgaggagagcgtggagggcacagccatctacctgcccggccctgaccgctgcaagatgaacccctgcctgaatggaggcacctgctaccccacagagaccagctatgtgtgcacctgtgtgcccggctacagcggggaccagtgtgagctggactttgatgagtgccacagcaacccctgcagaaatggagccacctgtgtggatggcttcaacaccttccgctgcctgtgcctgcccagctatgtgggcgccctgtgtgagcaggacacagagacctgtgactatggctggcacaagttccagggccagtgctacaagtactttgcccacaggaggacctgggatgctgctgagagagaatgtcggctgcagggcgcccacctgaccagcatcctgagccatgaggagcagatgtttgtgaacagagtgggccatgactaccagtggattggcctgaatgacaagatgtttgaacatgacttccgctggacagatggcagcaccctgcagtatgagaactggaggcccaaccagcctgacagcttcttctctgctggggaggactgtgtggtgatcatctggcatgaaaatggccagtggaatgatgtgccctgcaactaccacctgacctacacctgcaagaagggcaccgtggcctgtggccagccccctgtggtggagaatgccaagaccttcggcaagatgaagcccaggtatgagatcaacagcctcatccgctaccactgcaaggatggcttcatccagaggcacctgcccaccatccgctgcctgggcaatggccgctgggccatccccaagatcacctgcatgaaccccagcgcctaccagaggacctacagcatgaagtacttcaagaacagcagcagcgccaaggacaacagcatcaacaccagcaagcatgaccaccgctggagccgccgctggcaggagagcagaagatag

SEQ ID NO: 22436 - DNA, 4785 bp, synthetic construct
  misc_feature 1..4785: note = Description of Artificial Sequence: Synthetic coding sequence
  source 1..4785: mol_type = other DNA
atgcccaccctgcccccatcctacaacaccagcgagttcctgcgcatcaagtggagcaagattgaggtggacaagaatggcaaggacctgaaggagaccaccgtgctggtggcccagaatggaaacatcaagattggccaggactacaagggccgggtgtctgtgcccacccaccctgaggccgtgggagatgccagcctgactgtggtgaagctgctggccagtgatgctggcctgtaccgctgtgatgtgatgtatggaattgaggacacccaggacacagtgtccctgactgtggatggagtggtgttccactaccgggccgccaccagccgctacaccctgaactttgaagctgcccagaaggcctgcctggatgtgggcgctgtgattgccaccccagagcagctgtttgctgcctatgaagatggctttgagcagtgtgatgctggctggctggccgaccagacagtgcgctaccccatccgggccccccgggtgggctgctacggggacaagatgggcaaggccggcgtgaggacctacggcttccgcagcccccaggagacctatgatgtgtactgctacgtggaccacctggatggagatgtgttccacctgactgtgcccagcaagttcacctttgaggaggccgccaaggaatgtgagaaccaggatgcccggctggccaccgtgggggagctgcaggccgcctggagaaatggatttgaccagtgtgactatggctggctgagtgatgcctctgtgcgccaccctgtgacagtggcccgggcccagtgtggcggcggcctgctgggcgtgaggaccctgtacagatttgagaaccagacaggcttccccccaccagacagcagatttgatgcctactgcttcaagcccaaggaggccaccaccatcgacctgagcatcctggccgagacagccagccccagcctgagcaaggagccccagatggtgtctgacaggaccacccccatcatccccctggtggatgagctgcctgtgatccccacagagttcccccctgtgggcaacatcgtgtcctttgagcagaaggccaccgtgcagccccaggccatcacagacagcctggccaccaagctgcccacccccaccggcagcaccaagaagccctgggacatggatgactacagccccagcgccagcggccccctgggcaagctggacatcagcgagatcaaggaggaggtgctgcagagcaccaccggggtgagccactacgccacagacagctgggatggagtggtggaggacaagcagacccaggagagcgtgacccagatcgagcagatcgaggtgggccccctggtgacctccatggagatcctgaagcacatccccagcaaggagttccctgtgacagagacccccctggtgacagccaggatgatcctggagagcaagacagagaagaagatggtgtccacagtgtctgagctggtgaccaccggccactacggcttcaccctgggggaggaggatgatgaggacaggaccctgactgtgggcagtgatgagagcaccctcatctttgaccagatccctgaggtgatcaccgtgtccaagaccagcgaggacaccatccacacccacctggaggacctggagagcgtgtctgccagcaccaccgtgagccccctcatcatgccagacaacaacggcagctccatggatgactgggaggagcggcagaccagcggccgcatcacagaggagttcctgggcaagtacctgagcaccacccccttccccagccagcacaggacagaaattgagctgttcccctacagcggggacaagatcctggtggagggcatcagcaccgtcatctaccccagcctgcagacagagatgacccacagaagagagaggacagagaccctcatccctgagatgaggacagacacctacacagatgagatccaggaggagatcaccaagagccccttcatgggcaagacagaggaggaggtgttcagcggcatgaagctgagcaccagcctgtctgagcccatccacgtgacagagagctctgtggagatgaccaagagctttgacttccccaccctcatcaccaagctgtctgctgagcccacagaggtgcgggacatggaggaggacttcaccgccaccccaggcaccaccaagtatgatgagaacatcaccaccgtgctgctggcccacggcaccctgtctgtggaggccgccaccgtgtccaagtggagctgggatgaggacaacaccaccagcaagcccctggagagcacagagcccagcgccagcagcaagctgcccccagccctgctgaccaccgtgggcatgaatggcaaggacaaggacatccccagcttcacagaagatggagcagatgagttcaccctcatcccagacagcacccagaagcagctggaggaggtgacagatgaagatattgctgcccacggcaagttcaccatccgcttccagcccaccaccagcactggaattgctgagaagagcaccctgcgggacagcaccacagaggagaaggtgccccccatcaccagcacagagggccaggtgtatgccaccatggagggcagcgccctgggggaggtggaggatgtggacctgagcaagcctgtgtccacagtgccccagtttgcccacaccagcgaggtggagggcctggcctttgtgtcctacagcagcacccaggagcccaccacctacgtggacagcagccacaccatccccctgagcgtcatccccaagacagactggggcgtgctggtgcccagcgtgcccagtgaagatgaggtgctgggggagcccagccaggacatcctggtgattgaccagacccggctggaggccaccatcagccctgagaccatgaggaccaccaagatcacagagggcaccacccaggaggagttcccctggaaggagcagacagctgagaagcctgtgcctgccctgagcagcacagcctggacccccaaggaggccgtgacccccctggatgagcaggagggagatggcagcgcctacacagtgtctgaagatgagctgctgaccggcagcgagcgggtgcctgtgctggagaccacccctgtgggcaagattgaccacagcgtgtcctacccacctggagctgtgacagagcacaaggtgaagacagatgaggtggtgaccctgaccccccgcatcggccccaaggtgtccctgagccctggccctgagcagaagtatgaaacagagggcagcagcaccaccggcttcaccagcagcctgagccccttcagcacccacatcacccagctgatggaggagaccaccacagagaagaccagcctggaggacatcgacctgggcagcggcctgtttgagaagcccaaggccacagagctgattgagttcagcaccatcaaggtgacagtgcccagcgacatcaccacagccttcagctctgtggaccggctgcacaccaccagcgccttcaagcccagcagcgccatcaccaagaagccacccctgattgaccgggagcccggggaggagaccaccagtgacatggtgatcattggagagagcaccagccacgtgccccccaccaccctggaggacatcgtggccaaggagacagaaacagacatcgaccgggagtacttcaccaccagcagccccccagccacccagcccacccggcccccaacagtggaggacaaggaggccttcggcccccaggccctgagcaccccccagcccccagccagcaccaagttccacccagacatcaacgtgtacatcatcgaggtgcgggagaacaagacaggccctgaccgctgcaagatgaacccctgcctgaatggaggcacctgctaccccacagagaccagctatgtgtgcacctgtgtgcccggctacagcggggaccagtgtgagctggactttgatgagtgccacagcaacccctgcagaaatggagccacctgtgtggatggcttcaacaccttccgctgcctgtgcctgcccagctatgtgggcgccctgtgtgagcaggacacagagacctgtgactatggctggcacaagttccagggccagtgctacaagtactttgcccacaggaggacctgggatgctgctgagcgggagtgccgcctgcagggcgcccacctgaccagcatcctgagccatgaggagcagatgtttgtgaacagagtgggccatgactaccagtggattggcctgaatgacaagatgtttgaacatgacttccgctggacagatggcagcaccctgcagtatgagaactggaggcccaaccagcctgacagcttcttctctgctggggaggactgtgtggtgatcatctggcatgaaaatggccagtggaatgatgtgccctgcaactaccacctgacctacacctgcaagaagggcaccgtggcctgtggccagccccctgtggtggagaatgccaagaccttcggcaagatgaagcccaggtatgagatcaacagcctcatccgctaccactgcaaggatggcttcatccagaggcacctgcccaccatccgctgcctgggcaatggccgctgggccatccccaagatcacctgcatgaaccccagcgcctaccagaggacctacagcatgaagtacttcaagaacagcagcagcgccaaggacaacagcatcaacaccagcaagcatgaccaccgctggagccgccgctggcaggagagcagaagatag

SEQ ID NO: 22437 - DNA, 1968 bp, synthetic construct
  misc_feature 1..1968: note = Description of Artificial Sequence: Synthetic coding sequence
  source 1..1968: mol_type = other DNA
atgttcatcaacatcaagagcatcctgtggatgtgcagcaccctcatcgtgacccacgccctgcacaaggtgaaggtgggcaagagcccccctgtgcggggcagcctgagcggcaaggtgtccctgccctgccacttcagcaccatgcccaccctgcccccatcctacaacaccagcgagttcctgcgcatcaagtggagcaagattgaggtggacaagaatggcaaggacctgaaggagaccaccgtgctggtggcccagaatggaaacatcaagattggccaggactacaagggccgggtgtctgtgcccacccaccctgaggccgtgggagatgccagcctgactgtggtgaagctgctggccagtgatgctggcctgtaccgctgtgatgtgatgtatggaattgaggacacccaggacacagtgtccctgactgtggatggagtggtgttccactaccgggccgccaccagccgctacaccctgaactttgaagctgcccagaaggcctgcctggatgtgggcgctgtgattgccaccccagagcagctgtttgctgcctatgaagatggctttgagcagtgtgatgctggctggctggccgaccagacagtgcgctaccccatccgggccccccgggtgggctgctacggggacaagatgggcaaggccggcgtgaggacctacggcttccgcagcccccaggagacctatgatgtgtactgctacgtggaccacctggatggagatgtgttccacctgactgtgcccagcaagttcacctttgaggaggccgccaaggaatgtgagaaccaggatgcccggctggccaccgtgggggagctgcaggccgcctggagaaatggatttgaccagtgtgactatggctggctgagtgatgcctctgtgcgccaccctgtgacagtggcccgggcccagtgtggcggcggcctgctgggcgtgaggaccctgtacagatttgagaaccagacaggcttccccccaccagacagcagatttgatgcctactgcttcaagaggccagaccgctgcaagatgaacccctgcctgaatggaggcacctgctaccccacagagaccagctatgtgtgcacctgtgtgcccggctacagcggggaccagtgtgagctggactttgatgagtgccacagcaacccctgcagaaatggagccacctgtgtggatggcttcaacaccttccgctgcctgtgcctgcccagctatgtgggcgccctgtgtgagcaggacacagagacctgtgactatggctggcacaagttccagggccagtgctacaagtactttgcccacaggaggacctgggatgctgctgagagagaatgtcggctgcagggcgcccacctgaccagcatcctgagccatgaggagcagatgtttgtgaacagagtgggccatgactaccagtggattggcctgaatgacaagatgtttgaacatgacttccgctggacagatggcagcaccctgcagtatgagaactggaggcccaaccagcctgacagcttcttctctgctggggaggactgtgtggtgatcatctggcatgaaaatggccagtggaatgatgtgccctgcaactaccacctgacctacacctgcaagaagggcaccgtggcctgtggccagccccctgtggtggagaatgccaagaccttcggcaagatgaagcccaggtatgagatcaacagcctcatccgctaccactgcaaggatggcttcatccagaggcacctgcccaccatccgctgcctgggcaatggccgctgggccatccccaagatcacctgcatgaaccccagcgcctaccagaggacctacagcatgaagtacttcaagaacagcagcagcgccaaggacaacagcatcaacaccagcaagcatgaccaccgctggagccgccgctggcaggagagcagaagatag

SEQ ID NO: 22438 - DNA, 1440 bp, synthetic construct
  misc_feature 1..1440: note = Description of Artificial Sequence: Synthetic coding sequence
  source 1..1440: mol_type = other DNA
atggccagcaccatcaaggaggccctgtctgtggtgtctgaggaccagagcctgtttgaatgtgcctacggcaccccccacctggccaagacagagatgacagccagcagcagcagtgactatggccagaccagcaagatgagcccccgggtgccccagcaggactggctgagccagcccccagcccgggtgaccatcaagatggagtgcaaccccagccaggtgaatggcagcaggaacagcccagatgagtgcagcgtggccaagggcggcaagatggtgggcagcccagacacagtgggcatgaactacggcagctacatggaggagaagcacatgcccccacccaacatgaccaccaatgaaagaagagtcatcgtgcctgctgaccccaccctgtggagcacagaccacgtgcggcagtggctggagtgggccgtgaaggagtatggcctgcctgatgtgaacatcctgctcttccagaacattgatggcaaggagctgtgcaagatgaccaaggatgacttccagaggctgacccccagctacaatgctgacatcctgctgagccacctgcactacctgcgggagacccccctgccccacctgaccagtgatgatgtggacaaggccctgcagaacagcccccggctgatgcacgccaggaacacaggaggagctgccttcatcttccccaacacctctgtgtacccagaggccacccagaggatcaccaccaggccagacctgccctatgagcccccccggcgcagcgcctggacaggccacggccaccccaccccccagagcaaggccgcccagcccagccccagcacagtgcccaagacagaggaccagaggccccagctggacccctaccagatcctgggccccaccagcagccggctggccaaccctggcagcggccagatccagctgtggcagttcctgctggagctgctgagtgacagcagcaacagcagctgcatcacctgggagggcaccaacggggagttcaagatgacagatcctgatgaggtggcccggcgctggggcgagaggaagagcaagcccaacatgaactatgacaagctgagccgggccctgcgctactactatgacaagaacatcatgaccaaggtgcacggcaagagatatgcctacaagtttgacttccatggaattgcccaggccctgcagccccaccccccagagagcagcctgtacaagtaccccagcgacctgccctacatgggcagctaccacgcccacccccagaagatgaactttgtggccccccaccccccagccctgcctgtgaccagcagcagcttctttgctgcccccaacccctactggaacagccccactggaggcatctaccccaacacccggctgcccaccagccacatgcccagccacctgggcacctactactag

SEQ ID NO: 22439 - DNA, 1092 bp, synthetic construct
  misc_feature 1..1092: note = Description of Artificial Sequence: Synthetic coding sequence
  source 1..1092: mol_type = other DNA
atggtgggcagcccagacacagtgggcatgaactacggcagctacatggaggagaagcacatgcccccacccaacatgaccaccaatgaaagaagagtcatcgtgcctgctgaccccaccctgtggagcacagaccacgtgcggcagtggctggagtgggccgtgaaggagtatggcctgcctgatgtgaacatcctgctcttccagaacattgatggcaaggagctgtgcaagatgaccaaggatgacttccagaggctgacccccagctacaatgctgacatcctgctgagccacctgcactacctgcgggagacccccctgccccacctgaccagtgatgatgtggacaaggccctgcagaacagcccccggctgatgcacgccaggaacacagacctgccctatgagcccccccggcgcagcgcctggacaggccacggccaccccaccccccagagcaaggccgcccagcccagccccagcacagtgcccaagacagaggaccagaggccccagctggacccctaccagatcctgggccccaccagcagccggctggccaaccctggcagcggccagatccagctgtggcagttcctgctggagctgctgagtgacagcagcaacagcagctgcatcacctgggagggcaccaacggggagttcaagatgacagatcctgatgaggtggcccggcgctggggcgagaggaagagcaagcccaacatgaactatgacaagctgagccgggccctgcgctactactatgacaagaacatcatgaccaaggtgcacggcaagagatatgcctacaagtttgacttccatggaattgcccaggccctgcagccccaccccccagagagcagcctgtacaagtaccccagcgacctgccctacatgggcagctaccacgcccacccccagaagatgaactttgtggccccccaccccccagccctgcctgtgaccagcagcagcttctttgctgcccccaacccctactggaacagccccactggaggcatctaccccaacacccggctgcccaccagccacatgcccagccacctgggcacctactactag

SEQ ID NO: 22440 - DNA, 1389 bp, synthetic construct
  misc_feature 1..1389: note = Description of Artificial Sequence: Synthetic coding sequence
  source 1..1389: mol_type = other DNA
atgatccagacagtgcctgaccctgctgcccacatcaaggaggccctgtctgtggtgtctgaggaccagagcctgtttgaatgtgcctacggcaccccccacctggccaagacagagatgacagccagcagcagcagtgactatggccagaccagcaagatgagcccccgggtgccccagcaggactggctgagccagcccccagcccgggtgaccatcaagatggagtgcaaccccagccaggtgaatggcagcaggaacagcccagatgaatgttctgtggccaagggcggcaagatggtgggcagcccagacacagtgggcatgaactacggcagctacatggaggagaagcacatgcccccacccaacatgaccaccaatgaaagaagagtgattgtgcctgctgaccccaccctgtggagcacagaccacgtgcggcagtggctggagtgggccgtgaaggagtatggcctgcctgatgtgaacatcctgctcttccagaacattgatggcaaggagctgtgcaagatgaccaaggatgacttccagaggctgacccccagctacaatgctgacatcctgctgagccacctgcactacctgcgggagacccccctgccccacctgaccagtgatgatgtggacaaggccctgcagaacagcccccggctgatgcacgccaggaacacagacctgccctatgagcccccaagaagaagtgcctggacaggccacggccaccccaccccccagagcaaggccgcccagcccagccccagcacagtgcccaagacagaggaccagaggccccagctggacccctaccagatcctgggccccaccagcagccggctggccaaccctggcagcggccagatccagctgtggcagttcctgctggagctgctgagtgacagcagcaacagcagctgcatcacctgggagggcaccaatggagagttcaagatgacagatcctgatgaggtggcccggcgctggggcgagaggaagagcaagcccaacatgaactatgacaagctgagccgggccctgcgctactactatgacaagaacatcatgaccaaggtgcacggcaagagatatgcctacaagtttgacttccacggcatcgcccaggccctgcagccccaccccccagagagcagcctgtacaagtaccccagcgacctgccctacatgggcagctaccacgcccacccccagaagatgaactttgtggccccccaccccccagccctgcctgtgaccagcagcagcttctttgctgcccccaacccctactggaacagccccaccggcggcatctaccccaacacccggctgcccaccagccacatgcccagccacctgggcacctactactag

SEQ ID NO: 22441 - DNA, 1461 bp, synthetic construct
  misc_feature 1..1461: note = Description of Artificial Sequence: Synthetic coding sequence
  source 1..1461: mol_type = other DNA
atgatccagacagtgcctgaccctgctgcccacatcaaggaggccctgtctgtggtgtctgaggaccagagcctgtttgaatgtgcctacggcaccccccacctggccaagacagagatgacagccagcagcagcagtgactatggccagaccagcaagatgagcccccgggtgccccagcaggactggctgagccagcccccagcccgggtgaccatcaagatggagtgcaaccccagccaggtgaatggcagcaggaacagcccagatgaatgttctgtggccaagggcggcaagatggtgggcagcccagacacagtgggcatgaactacggcagctacatggaggagaagcacatgcccccacccaacatgaccaccaatgaaagaagagtgattgtgcctgctgaccccaccctgtggagcacagaccacgtgcggcagtggctggagtgggccgtgaaggagtatggcctgcctgatgtgaacatcctgctcttccagaacattgatggcaaggagctgtgcaagatgaccaaggatgacttccagaggctgacccccagctacaatgctgacatcctgctgagccacctgcactacctgcgggagacccccctgccccacctgaccagtgatgatgtggacaaggccctgcagaacagcccccggctgatgcacgccagaaatactggaggagctgccttcatcttccccaacacctctgtgtacccagaggccacccagaggatcaccaccaggccagacctgccctatgagcccccaagaagaagtgcctggacaggccacggccaccccaccccccagagcaaggccgcccagcccagccccagcacagtgcccaagacagaggaccagaggccccagctggacccctaccagatcctgggccccaccagcagccggctggccaaccctggcagcggccagatccagctgtggcagttcctgctggagctgctgagtgacagcagcaacagcagctgcatcacctgggagggcaccaatggagagttcaagatgacagatcctgatgaggtggcccggcgctggggcgagaggaagagcaagcccaacatgaactatgacaagctgagccgggccctgcgctactactatgacaagaacatcatgaccaaggtgcacggcaagagatatgcctacaagtttgacttccacggcatcgcccaggccctgcagccccaccccccagagagcagcctgtacaagtaccccagcgacctgccctacatgggcagctaccacgcccacccccagaagatgaactttgtggccccccaccccccagccctgcctgtgaccagcagcagcttctttgctgcccccaacccctactggaacagccccaccggcggcatctaccccaacacccggctgcccaccagccacatgcccagccacctgggcacctactactag

SEQ ID NO: 22442 - DNA, 1461 bp, synthetic construct; identical to SEQ ID NO: 22441
  misc_feature 1..1461: note = Description of Artificial Sequence: Synthetic coding sequence
  source 1..1461: mol_type = other DNA

SEQ ID NO: 22443 - DNA, 516 bp, synthetic construct
  misc_feature 1..516: note = Description of Artificial Sequence: Synthetic coding sequence
  source 1..516: mol_type = other DNA
atggccagcaccatcaaggaggccctgtctgtggtgtctgaggaccagagcctgtttgaatgtgcctacggcaccccccacctggccaagacagagatgacagccagcagcagcagtgactatggccagaccagcaagatgagcccccgggtgccccagcaggactggctgagccagcccccagcccgggtgaccatcaagatggagtgcaaccccagccaggtgaatggcagcaggaacagcccagatgagtgcagcgtggccaagggcggcaagatggtgggcagcccagacacagtgggcatgaactacggcagctacatggaggagaagcacatgcccccacccaacatgaccaccaatgaaagaagagtcatcgtgcctgctgacctgccctatgagcccccaagaagaagtgcctggacaggccacggccaccccaccccccagagcaagggcaccgtgctggcccccatgaccctgtccttcatgagccaggccgtggatgactgctag

SEQ ID NO: 22444 - DNA, 1389 bp, synthetic construct; identical to SEQ ID NO: 22440
  misc_feature 1..1389: note = Description of Artificial Sequence: Synthetic coding sequence
  source 1..1389: mol_type = other DNA

SEQ ID NO: 22445 - DNA, 1164 bp, synthetic construct
  misc_feature 1..1164: note = Description of Artificial Sequence: Synthetic coding sequence
  source 1..1164: mol_type = other DNA
atggtgggcagcccagacacagtgggcatgaactacggcagctacatggaggagaagcacatgcccccacccaacatgaccaccaatgaaagaagagtcatcgtgcctgctgaccccaccctgtggagcacagaccacgtgcggcagtggctggagtgggccgtgaaggagtatggcctgcctgatgtgaacatcctgctcttccagaacattgatggcaaggagctgtgcaagatgaccaaggatgacttccagaggctgacccccagctacaatgctgacatcctgctgagccacctgcactacctgcgggagacccccctgccccacctgaccagtgatgatgtggacaaggccctgcagaacagcccccggctgatgcacgccaggaacacaggaggagctgccttcatcttccccaacacctctgtgtacccagaggccacccagaggatcaccaccaggccagacctgccctatgagcccccccggcgcagcgcctggacaggccacggccaccccaccccccagagcaaggccgcccagcccagccccagcacagtgcccaagacagaggaccagaggccccagctggacccctaccagatcctgggccccaccagcagccggctggccaaccctggcagcggccagatccagctgtggcagttcctgctggagctgctgagtgacagcagcaacagcagctgcatcacctgggagggcaccaacggggagttcaagatgacagatcctgatgaggtggcccggcgctggggcgagaggaagagcaagcccaacatgaactatgacaagctgagccgggccctgcgctactactatgacaagaacatcatgaccaaggtgcacggcaagagatatgcctacaagtttgacttccatggaattgcccaggccctgcagccccaccccccagagagcagcctgtacaagtaccccagcgacctgccctacatgggcagctaccacgcccacccccagaagatgaactttgtggccccccaccccccagccctgcctgtgaccagcagcagcttctttgctgcccccaacccctactggaacagccccactggaggcatctaccccaacacccggctgcccaccagccacatgcccagccacctgggcacctactactag

SEQ ID NO: 22446 - DNA, 1410 bp, synthetic construct
  misc_feature 1..1410: note = Description of Artificial Sequence: Synthetic coding sequence
  source 1..1410: mol_type = other DNA
atgaatgactttggcatcaagaacatggaccaggtggcccctgtggccaacagctaccggggcaccctgaagaggcagcctgcctttgacacctttgatggcagcctgtttgctgtgttccccagcctgaatgaggagcagaccctgcaggaggtgcccaccggcctggacagcatcagccatgattctgccaactgtgagctgcccctgctgaccccctgcagcaaggctgtgatgagccaggccctgaaggccaccttcagcggcttcaagaaggagcagaggcggctgggcatccccaagaacccctggctgtggagcgagcagcaggtgtgccagtggctgctgtgggccaccaatgagttcagcctggtgaatgtgaacctgcagcgcttcggcatgaatggccagatgctgtgcaacctgggcaaggagcgcttcctggagctggccccagactttgtgggggacatcctgtgggagcacctggagcagatgatcaaggagaaccaggagaagacagaggaccagtatgaggagaacagccacctgacctctgtgccccactggatcaacagcaacaccctgggcttcggcacagagcaggccccctacggcatgcagacccagaactaccccaagggcggcctgctggacagcatgtgcccagccagcacccccagcgtgctgagcagcgagcaggagttccagatgttccccaagagccggctgagctctgtgtctgtgacctactgcagcgtgtcccaggacttccctggcagcaacctgaacctgctgaccaacaacagcggcacccccaaggaccatgacagcccagaaaatggagctgacagctttgagagcagtgacagcctgctgcagagctggaacagccagagcagcctgctggatgtgcagagggtgcccagctttgagagctttgaagatgactgcagccagagcctgtgcctgaacaagcccaccatgtccttcaaggactacatccaggagaggagtgaccctgtggagcagggcaagcctgtgatcccagctgctgtgctggccggcttcaccggcagcggccccatccagctgtggcagttcctgctggagctgctgagtgacaagagctgccagagcttcatctcctggacaggagatggctgggagttcaagctggccgaccctgatgaggtggcccggcgctggggcaagaggaagaacaagcccaagatgaactatgagaagctgagccggggcctgcgctactactatgacaagaacatcatccacaagaccagcggcaagcgctacgtgtacagatttgtgtgtgacctgcagaacctgctgggcttcaccccagaggagctgcacgccatcctgggcgtgcagcctgacacagaggactag

SEQ ID NO: 22447 - DNA, 1410 bp, synthetic construct; identical to SEQ ID NO: 22446
  misc_feature 1..1410: note = Description of Artificial Sequence: Synthetic coding sequence
  source 1..1410: mol_type = other DNA

SEQ ID NO: 22448 - DNA, 507 bp, synthetic construct
  misc_feature 1..507: note = Description of Artificial Sequence: Synthetic coding sequence
  source 1..507: mol_type = other DNA
atgaatgactttggcatcaagaacatggaccaggtggcccctgtggccaacagctaccggggcaccctgaagaggcagcctgcctttgacacctttgatggcagcctgtttgctgtgttccccagcctgaatgaggagcagaccctgcaggaggtgcccaccggcctggacagcatcagccatgattctgccaactgtgagctgcccctgctgaccccctgcagcaaggctgtgatgagccaggccctgaaggccaccttcagcggcttcaagaaggagcagaggcggctgggcatccccaagaacccctggctgtggagcgagcagcaggtgtgccagtggctgctgtgggccaccaatgagttcagcctggtgaatgtgaacctgcagcgcttcggcatgaatggccagatgctgtgcaacctgggcaaggagcgcttcctggagctggccccagactttgtgggggacatcctgtgggagcacctggagcagatgatcaagtag

SEQ ID NO: 22449 - DNA, 813 bp, synthetic construct
  misc_feature 1..813: note = Description of Artificial Sequence: Synthetic coding sequence
  source 1..813: mol_type = other DNA
atgaatgactttggcatcaagaacatggaccaggtggcccctgtggccaacagctaccggggcaccctgaagaggcagcctgcctttgacacctttgatggcagcctgtttgctgtgttccccagcctgaatgaggagcagaccctgcaggaggtgcccaccggcctggacagcatcagccatgattctgccaactgtgagctgcccctgctgaccccctgcagcaaggctgtgatgagccaggccctgaaggccaccttcagcggcttcaagaaggagcagaggcggctgggcatccccaagaacccctggctgtggagcgagcagcaggtgtgccagtggctgctgtgggccaccaatgagttcagcctggtgaatgtgaacctgcagcgcttcggcatgaatggccagatgctgtgcaacctgggcaaggagcgcttcctggagctggccccagactttgtgggggacatcctgtgggagcacctggagcagatgatcaaggagaaccaggagaagacagaggaccagtatgaggagaacagccacctgacctctgtgccccactggatcaacagcaacaccctgggcttcggcacagagcaggccccctacggcatgcagacccagaactaccccaagggcggcctgctggacagcatgtgcccagccagcacccccagcgtgctgagcagcgagcaggagttccagatgttccccaagagccggctgagctctgtgtctgtgacctactgcagcgtgtcccaggacttccctggcagcaacctgaacctgctgaccaacaacagctag

SEQ ID NO: 22450 - DNA, 570 bp, synthetic construct
  misc_feature 1..570: note = Description of Artificial Sequence: Synthetic coding sequence
  source 1..570: mol_type = other DNA
atgacagagtacaagctggtggtggtgggcgctgggggcgtgggcaagagcgccctgaccatccagctgatccagaaccactttgtggatgaatatgaccccaccattgaagattcctacaggaagcaggtggtgattgatggagagacctgcctgctggacatcctggacacagctggccaggaggagtacagcgccatgagggaccagtacatgaggactggagagggcttcctgtgtgtgtttgccatcaacaacaccaagagctttgaggacatccaccagtaccgggagcagatcaagagggtgaaggacagtgatgatgtgcccatggtgctggtgggcaacaagtgtgacctggccgccaggacagtggagagccggcaggcccaggacctggcccggagctatggcatcccctacatcgagaccagcgccaagacccggcagggcgtggaggatgccttctacaccctggtgcgggagatccggcagcacaagctgaggaagctgaaccccccagatgaaagtggccctggctgcatgagctgcaagtgtgtgctgtcctag

SEQ ID NO: 22451 - DNA, 513 bp, synthetic construct
  misc_feature 1..513: note = Description of Artificial Sequence: Synthetic coding sequence
  source 1..513: mol_type = other DNA
atgacagagtacaagctggtggtggtgggcgctgggggcgtgggcaagagcgccctgaccatccagctgatccagaaccactttgtggatgaatatgaccccaccattgaagattcctacaggaagcaggtggtgattgatggagagacctgcctgctggacatcctggacacagctggccaggaggagtacagcgccatgagggaccagtacatgaggactggagagggcttcctgtgtgtgtttgccatcaacaacaccaagagctttgaggacatccaccagtaccgggagcagatcaagagggtgaaggacagtgatgatgtgcccatggtgctggtgggcaacaagtgtgacctggccgccaggacagtggagagccggcaggcccaggacctggcccggagctatggcatcccctacatcgagaccagcgccaagacccggcagggcagccgcagcggcagcagcagcagcagcggcaccctgtgggaccccccaggccccatgtag

SEQ ID NO: 22452 - DNA, 570 bp, synthetic construct; identical to SEQ ID NO: 22450
  misc_feature 1..570: note = Description of Artificial Sequence: Synthetic coding sequence
  source 1..570: mol_type = other DNA

SEQ ID NO: 22453 - DNA, 513 bp, synthetic construct; identical to SEQ ID NO: 22451
  misc_feature 1..513: note = Description of Artificial Sequence: Synthetic coding sequence
  source 1..513: mol_type = other DNA

SEQ ID NO: 22454 - DNA, 570 bp, synthetic construct; identical to SEQ ID NO: 22450
  misc_feature 1..570: note = Description of Artificial Sequence: Synthetic coding sequence
  source 1..570: mol_type = other DNA

SEQ ID NO: 22455 - DNA, 513 bp, synthetic construct; identical to SEQ ID NO: 22451
  misc_feature 1..513: note = Description of Artificial Sequence: Synthetic coding sequence
  source 1..513: mol_type = other DNA

SEQ ID NO: 22456 - DNA, 609 bp, synthetic construct
  misc_feature 1..609: note = Description of Artificial Sequence: Synthetic coding sequence
  source 1..609: mol_type = other DNA
atgctgcccccaggcacagccaccctgctgaccctgctgctggccgccggcagcctgggccagaagccccagaggcccaggaggcctgccagccccatcagcaccatccagcccaaggccaactttgatgcccagcagtttgctggcacctggctgctggtggccgtgggcagcgcctgccgcttcctgcaggagcagggccacagagctgaggccaccaccctgcacgtggccccccagggcacagccatggctgtgtccaccttcaggaagctggatggcatctgctggcaggtgcggcagctgtatggagacaccggggtgctgggccgcttcctgctgcaggccagagatgcccggggagctgtgcacgtggtggtggccgagacagactaccagagctttgctgtgctgtacctggagagagctggccagctgtctgtgaagctgtatgcccggagcctgcctgtgtctgacagcgtgctgagcggctttgagcagagggtgcaggaggcccacctgacagaggaccagatcttctacttccccaagtatggcttctgtgaggccgctgaccagttccacgtgctggatgaggtgagaagatag

SEQ ID NO: 22457 - DNA, 522 bp, synthetic construct
  misc_feature 1..522: note = Description of Artificial Sequence: Synthetic coding sequence
  source 1..522: mol_type = other DNA
ggcttcctggtgcccctgtggctgatgaggaactgcttccggctgcaggaggagatgctgcagcgggaggaggccgagaacaccctgcagagcttccggcaggatgtggacaatgccagcctggcccggctggacctggagaggaaggtggagagcctgcaggaggagatcgccttcctgaagaagctgcacgaggaggagatccaggagctgcaggcccagatccaggagcagcacgtgcagattgatgtggatgtgtccaagccagacctgacagctgccctgagagatgtgcggcagcagtatgagagcgtggccgccaagaacctgcaggaggccgaggagtggtacaagagcaagtttgctgacctgtctgaggccgccaacagaaataatgatgccctgcggcaggccaagcaggagagcacagagtaccgccggcaggtgcagagcctgacctgtgaggtggatgccctgaagggcaccgtgtccaccaacccagctgtgaaggagggcaagtag

SEQ ID NO: 22458 - DNA, 687 bp, synthetic construct
  misc_feature 1..687: note = Description of Artificial Sequence: Synthetic coding sequence
  source 1..687: mol_type = other DNA
atgaggaactgcttccggctgcaggaggagatgctgcagcgggaggaggccgagaacaccctgcagagcttccggcaggatgtggacaatgccagcctggcccggctggacctggagaggaaggtggagagcctgcaggaggagatcgccttcctgaagaagctgcacgaggaggagatccaggagctgcaggcccagatccaggagcagcacgtgcagattgatgtggatgtgtccaagccagacctgacagctgccctgagagatgtgcggcagcagtatgagagcgtggccgccaagaacctgcaggaggccgaggagtggtacaagagcaagtttgctgacctgtctgaggccgccaacagaaataatgatgccctgcggcaggccaagcaggagagcacagagtaccgccggcaggtgcagagcctgacctgtgaggtggatgccctgaagggcaccaatgaaagcctggagcggcagatgagggagatggaggagaactttgctgtggaggccgccaactaccaggacaccatcggccgcctgcaggatgagatccagaacatgaaggaggagatggcccggcacctgcgggagtaccaggacctgctgaatgtgaagatggccctggacattgaaattgccacctacaggaagctgctggagggggaggagagcaggtag

SEQ ID NO: 22459 - DNA, 1296 bp, synthetic construct
  misc_feature 1..1296: note = Description of Artificial Sequence: Synthetic coding sequence
  source 1..1296: mol_type = other DNA
atgagcaccaggtctgtgagcagcagcagctacagaaggatgtttggaggccctggaacagccagccggcccagcagcagccgctcctatgtgaccaccagcaccaggacctacagcctgggcagcgccctgcggcccagcaccagccgcagcctgtatgccagcagccctggaggagtgtatgccaccaggagcagcgctgtgcggctgcggagctctgtgcctggggtgcggctgctgcaggacagcgtggacttcagcctggctgatgccatcaacacagagttcaagaacaccaggaccaatgagaaggtggagctgcaggagctgaatgacagatttgccaactacatcgacaaggtgcgcttcctggagcagcagaacaagatcctgctggccgagctggagcagctgaagggccagggcaagagccggctgggggacctgtatgaggaggagatgagggagctgcggcggcaggtggaccagctgaccaatgacaaggcccgggtggaggtggagcgggacaacctggccgaggacatcatgaggctgcgggagaagctgcaggaggagatgctgcagcgggaggaggccgagaacaccctgcagagcttccggcaggatgtggacaatgccagcctggcccggctggacctggagaggaaggtggagagcctgcaggaggagatcgccttcctgaagaagctgcacgaggaggagatccaggagctgcaggcccagatccaggagcagcacgtgcagattgatgtggatgtgtccaagccagacctgacagctgccctgagagatgtgcggcagcagtatgagagcgtggccgccaagaacctgcaggaggccgaggagtggtacaagagcaagtttgctgacctgtctgaggccgccaacagaaataatgatgccctgcggcaggccaagcaggagagcacagagtaccgccggcaggtgcagagcctgacctgtgaggtggatgccctgaagggcaccaatgaaagcctggagcggcagatgagggagatggaggagaactttgctgtggaggccgccaactaccaggacaccatcggccgcctgcaggatgagatccagaacatgaaggaggagatggcccggcacctgcgggagtaccaggacctgctgaatgtgaagatggccctggacattgaaattgccacctacaggaagctgctggagggggaggagagccgcatcagcctgcccctgcccaacttcagcagcctgaacctgcggggcaagcacttcatcagcctgtag

SEQ ID NO: 22460 - DNA, 1401 bp, synthetic construct
  misc_feature 1..1401: note = Description of Artificial Sequence: Synthetic coding sequence
  source 1..1401: mol_type = other DNA
atgagcaccaggtctgtgagcagcagcagctacagaaggatgtttggaggccctggaacagccagccggcccagcagcagccgctcctatgtgaccaccagcaccaggacctacagcctgggcagcgccctgcggcccagcaccagccgcagcctgtatgccagcagccctggaggagtgtatgccaccaggagcagcgctgtgcggctgcggagctctgtgcctggggtgcggctgctgcaggacagcgtggacttcagcctggctgatgccatcaacacagagttcaagaacaccaggaccaatgagaaggtggagctgcaggagctgaatgacagatttgccaactacatcgacaaggtgcgcttcctggagcagcagaacaagatcctgctggccgagctggagcagctgaagggccagggcaagagccggctgggggacctgtatgaggaggagatgagggagctgcggcggcaggtggaccagctgaccaatgacaaggcccgggtggaggtggagcgggacaacctggccgaggacatcatgaggctgcgggagaagctgcaggaggagatgctgcagcgggaggaggccgagaacaccctgcagagcttccggcaggatgtggacaatgccagcctggcccggctggacctggagaggaaggtggagagcctgcaggaggagatcgccttcctgaagaagctgcacgaggaggagatccaggagctgcaggcccagatccaggagcagcacgtgcagattgatgtggatgtgtccaagccagacctgacagctgccctgagagatgtgcggcagcagtatgagagcgtggccgccaagaacctgcaggaggccgaggagtggtacaagagcaagtttgctgacctgtctgaggccgccaacagaaataatgatgccctgcggcaggccaagcaggagagcacagagtaccgccggcaggtgcagagcctgacctgtgaggtggatgccctgaagggcaccaatgaaagcctggagcggcagatgagggagatggaggagaactttgctgtggaggccgccaactaccaggacaccatcggccgcctgcaggatgagatccagaacatgaaggaggagatggcccggcacctgcgggagtaccaggacctgctgaatgtgaagatggccctggacattgaaattgccacctacaggaagctgctggagggggaggagagccgcatcagcctgcccctgcccaacttcagcagcctgaacctgcgggagaccaacctggacagcctgcccctggtggacacccacagcaagaggaccctgctgatcaagacagtggagaccagagatggccaggtgatcaatgagaccagccagcaccatgatgacctggagtag

SEQ ID NO: 22461 - DNA, 1224 bp, synthetic construct
  misc_feature 1..1224: note = Description of Artificial Sequence: Synthetic coding sequence
  source 1..1224: mol_type = other DNA
atgtttggaggccctggaacagccagccggcccagcagcagccgctcctatgtgaccaccagcaccaggacctacagcctgggcagcgccctgcggcccagcaccagccgcagcctgtatgccagcagccctgggggcgtgtatgccaccaggagcagcgctgtgcggctgcggagctctgtgcctggggtgcggctgctgcaggacagcgtggacttcagcctggctgatgccatcaacacagagttcaagaacaccaggaccaatgagaaggtggagctgcaggagctgaatgacagatttgccaactacatcgacaaggtgcgcttcctggagcagcagaacaagatcctgctggccgagctggagcagctgaagggccagggcaagagccggctgggggacctgtatgaggaggagatgagggagctgcggcggcaggtggaccagctgaccaatgacaaggcccgggtggaggtggagcgggacaacctggccgaggacatcatgaggctgcgggagaagctgcaggaggagatgctgcagcgggaggaggccgagaacaccctgcagagcttccggcaggatgtggacaatgccagcctggcccggctggacctggagaggaaggtggagagcctgcaggaggagatcgccttcctgaagaagctgcacgaggaggagatccaggagctgcaggcccagatccaggagcagcacgtgcagattgatgtggatgtgtccaagccagacctgacagctgccctgagagatgtgcggcagcagtatgaatctgtggccgccaagaacctgcaggaggccgaggagtggtacaagagcaagtttgctgacctgtctgaggccgccaacagaaataatgatgccctgcggcaggccaagcaggagagcacagagtaccgccggcaggtgcagagcctgacctgtgaggtggatgccctgaagggcaccaatgaaagcctggagcggcagatgagggagatggaggagaactttgctgtggaggccgccaactaccaggacaccatcggccgcctgcaggatgagatccagaacatgaaggaggagatggcccggcacctgcgggagtaccaggacctgctgaatgtgaagatggccctggacatcgagatcgccacctacaggaagctgctggagggggaggagagccgcatcctgtgcctcttccagaccttccccccatag

SEQ ID NO: 22462 - DNA, 2256 bp, synthetic construct
  misc_feature 1..2256: note = Description of Artificial Sequence: Synthetic coding sequence
  source 1..2256: mol_type = other DNA
atggaggacctgagcagcccagacagcaccctgctgcagggcggccacaacctgctgagcagcgccagcttccaggaggccgtgaccttcaaggatgtgattgtggacttcacccaggaggagtggaagcagctggaccccggccagagggacctcttcagagatgtgaccctggagaactacacccacctggtgtccatcggcctgcaggtgtccaagccagatgtgatcagccagctggagcagggcacagagccctggatcatggagcccagcatccctgtgggcacctgtgccgactgggagacccggctggagaacagcgtgtctgcccctgagccagacatcagcgaggaggagctgagccctgaggtgattgtggagaagcacaagagagatgacagctggagcagcaacctgctggagagctgggagtatgagggcagcctggagcggcagcaggccaaccagcagaccctgcccaaggagatcaaggtgacagagaagaccatccccagctgggagaagggccctgtgaacaatgaatttgggaagtctgtgaatgtgagcagcaacctggtgacccaggagcccagccctgaggagaccagcaccaagaggagcatcaagcagaacagcaaccctgtgaagaaggagaagagctgcaagtgcaatgaatgtgggaaggccttctcctactgcagcgccctgatccgccaccagaggacccacactggagagaagccctacaagtgcaatgaatgtgagaaggccttcagccgctcagaaaatctcatcaaccaccagaggatccacactggagacaagccctacaagtgtgaccagtgtgggaagggcttcatcgagggccccagcctgacccagcaccagaggatccacactggagagaagccctacaagtgtgatgaatgtgggaaggccttcagccagaggacccacctggtgcagcaccagaggatccacactggagagaagccctacacctgcaatgaatgtgggaaggccttcagccagaggggccacttcatggagcaccagaagatccacactggagagaagcccttcaagtgtgatgaatgtgacaagaccttcaccaggagcacccacctgacccagcaccagaagatccacactggagagaagacctacaagtgcaatgaatgtgggaaggccttcaacggccccagcaccttcatccgccaccacatgatccacactggagagaagccctatgaatgtaatgaatgtgggaaggccttcagccagcacagcaacctgacccagcaccagaagacccacactggagagaagccctatgactgtgccgagtgtgggaagagcttctcctactggagcagcctggcccagcacctgaagatccacactggagagaagccctacaagtgcaatgaatgtgggaaggccttctcctactgcagcagcctgacccagcaccggcgcatccacacccgggagaagccctttgaatgttctgaatgtgggaaggccttctcctacctgagcaacctgaaccagcaccagaagacccacacccaggagaaggcctatgagtgcaaggaatgtgggaaggccttcatccgcagcagcagcctggccaagcatgagcgcatccacactggagagaagccctaccagtgccatgaatgtgggaagaccttctcctatggcagcagcctcatccagcacaggaagatccacactggagagcggccctacaagtgcaatgaatgtggccgggccttcaaccagaacatccacctgacccagcacaagaggatccacactggagccaagccctatgaatgtgccgagtgtgggaaggccttccgccactgcagcagcctggcccagcaccagaagacccacacagaggagaagccctaccagtgcaacaagtgtgagaagaccttcagccagagcagccacctgacccagcaccagaggatccacactggagagaagccctacaagtgcaatgaatgtgacaaggccttcagccgcagcacccacctgacagagcaccagaacacccacactggagagaagccctacaactgcaatgaatgtaggaagaccttcagccagagcacctacctgatccagcaccagaggatccacagcggggagaagcccttcggctgcaatgactgtgggaagagcttccgctacagaagtgccctgaacaagcaccagaggctgcaccctggcatctag

SEQ ID NO: 22463 - DNA, 3201 bp, synthetic construct
  misc_feature 1..3201: note = Description of Artificial Sequence: Synthetic coding sequence
  source 1..3201: mol_type = other DNA
atgcctgtgttccacaccaggaccatcgagagcatcctggagcctgtggcccagcagatcagccacctggtgatcatgcatgaggagggggaggtggatggcaaggccatcccagacctgacagcccctgtggccgctgtgcaggccgctgtgagcaacctggtgcgggtgggcaaggagaccgtgcagaccacagaggaccagatcctgaagagggacatgcccccagccttcatcaaggtggagaatgcctgcaccaagctggtgcaggccgcccagatgctgcagagcgacccctacagcgtgcctgcccgggactacctgattgatggcagccggggcatcctgagcggcaccagtgacctgctgctgacctttgatgaagctgaggtgaggaagatcatccgggtgtgcaagggcatcctggagtacctgactgtggccgaggtggtggagaccatggaggacctggtgacctacaccaagaacctgggccctggcatgaccaagatggccaagatgattgatgagcggcagcaggagctgacccaccaggagcaccgggtgatgctggtgaacagcatgaacacagtgaaggagctgctgcctgtgctgatcagcgccatgaagatctttgtgaccaccaagaacagcaagaaccagggcatcgaggaggccctgaagaacagaaacttcaccgtggagaagatgtctgctgagatcaatgagatcatccgggtgctgcagctgacctcctgggatgaagatgcctgggccagcaaggacacagaggccatgaagagggccctggccagcattgacagcaagctgaaccaggccaagggctggctgcgggaccccagcgccagccctggagatgctggggagcaggccatccggcagatcctggatgaggccggcaaggtgggggagctgtgtgccggcaaggagcggcgggagatcctgggcacctgcaagatgctgggccagatgacagaccaggtggccgacctgcgggcccggggccagggcagcagccctgtggccatgcagaaggcccagcaggtgtcccagggcctggatgtgctgacagccaaggtggagaatgctgccaggaagctggaggccatgaccaacagcaagcagagcatcgccaagaagattgatgctgcccagaactggctggccgaccccaatggaggccctgagggggaggagcagatccggggggccctggccgaggccaggaagattgctgagctgtgtgatgaccccaaggagagagatgacatcctgcggagcctgggggagatcagcgccctgaccagcaagctggccgacctgcggcggcagggcaaaggagacagccctgaggcccgggccctggccaagcaggtggccacagccctgcagaacctgcagaccaagaccaacagagctgtggccaacagcaggcctgccaaggctgctgtgcacctggagggcaagattgagcaggcccagcgctggattgacaaccccaccgtggatgacagaggagtgggccaggccgccatccggggcctggtggccgagggccaccggctggccaacgtgatgatgggcccctaccggcaggacctgctggccaagtgtgacagagtggaccagctgacagcccagctggccgacctggccgcccggggggagggggagagcccccaggcccgggccctggccagccagctgcaggacagcctgaaggacctgaaggccaggatgcaggaggccatgacccaggaggtgtctgatgtgttcagtgacaccaccacccccatcaagctgctggccgtggccgccacagcccccccagatgcccccaaccgggaggaggtgtttgatgagcgggccgccaactttgagaaccacagcggcaagctgggcgccacagctgagaaggctgctgctgtgggcacagccaacaagagcacagtggagggcatccaggcctctgtgaagacagcccgggagctgaccccccaggtggtgtctgctgcccgcatcctgctgaggaaccctggcaaccaggccgcctatgagcactttgagaccatgaagaaccagtggattgacaacgtggagaagatgacaggcctggtggatgaggccatcgacaccaagagcctgctggatgccagcgaggaggccatcaagaaggacctggacaagtgcaaggtggccatggccaacatccagccccagatgctggtggccggggccaccagcatcgcccggcgggccaaccgcatcctgctggtggccaagcgggaggtggagaacagcgaggaccccaagttccgggaggccgtgaaggccgccagtgatgagctgagcaagaccatcagccccatggtgatggatgccaaggctgtggccggcaacatcagtgaccccggcctgcagaagagcttcctggacagcggctaccgcatcctgggcgctgtggccaaggtgcgggaggccttccagccccaggagccagacttccccccacctcctccagacctggagcagctgcggctgacagatgagctggccccacccaagccacccctgcctgagggggaggtgcccccacccaggcctcctcctcctgaggagaaggatgaggagttccctgagcagaaggccggggaggtgatcaaccagcccatgatgatggccgcccggcagctgcatgatgaggccaggaagtggagcagcaaaggaaatgacatcatcgccgccgccaagaggatggccctgctgatggccgagatgagccggctggtgcggggcggcagcggcaccaagagggccctgatccagtgtgccaaggacatcgccaaggccagtgatgaggtgacccggctggccaaggaggtggccaagcagtgcacagacaagaggatccgcaccaacctgctgcaggtgtgtgagcgcatccccaccatcagcacccagctgaagatcctgagcacagtgaaggccaccatgctgggccgcaccaacatcagtgatgaggagagcgagcaggccacagagatgctggtgcacaatgcccagaacctgatgcagagcgtgaaggagaccgtgcgggaggccgaggccgccagcatcaagatcagaacagatgctggcttcaccctgcgctgggtgaggaagaccccctggtaccagtag

SEQ ID NO: 22464 - DNA, 2784 bp, synthetic construct
  misc_feature 1..2784: note = Description of Artificial Sequence: Synthetic coding sequence
  source 1..2784: mol_type = other DNA
atgctgcagagcgacccctacagcgtgcctgcccgggactacctgattgatggcagccggggcatcctgagcggcaccagtgacctgctgctgacctttgatgaggccgaggtgaggaagatcatccgggtgtgcaagggcatcctggagtacctgactgtggccgaggtggtggagaccatggaggacctggtgacctacaccaagaacctgggccctggcatgaccaagatggccaagatgattgatgagcggcagcaggagctgacccaccaggagcaccgggtgatgctggtgaacagcatgaacacagtgaaggagctgctgcctgtgctgatcagcgccatgaagatctttgtgaccaccaagaacagcaagaaccagggcatcgaggaggccctgaagaacagaaacttcaccgtggagaagatgtctgctgagatcaatgagatcatccgggtgctgcagctgacctcctgggatgaagatgcctgggccagcaaggacacagaggccatgaagagggccctggccagcattgacagcaagctgaaccaggccaagggctggctgcgggaccccagcgccagccctggagatgctggggagcaggccatccggcagatcctggatgaagctgggaaggtgggggagctgtgtgccggcaaggagcggcgggagatcctgggcacctgcaagatgctgggccagatgacagaccaggtggccgacctgcgggcccggggccagggcagcagccctgtggccatgcagaaggcccagcaggtgtcccagggcctggatgtgctgacagccaaggtggagaatgctgccaggaagctggaggccatgaccaacagcaagcagagcatcgccaagaagattgatgctgcccagaactggctggccgaccccaacggcggccctgagggggaggagcagatccggggggccctggccgaggccaggaagattgctgagctgtgtgatgaccccaaggagagagatgacatcctgcggagcctgggggagatcagcgccctgaccagcaagctggccgacctgcggcggcagggcaagggggacagccctgaggcccgggccctggccaagcaggtggccacagccctgcagaacctgcagaccaagaccaacagagctgtggccaacagcaggcctgccaaggctgctgtgcacctggagggcaagattgagcaggcccagcgctggattgacaaccccaccgtggatgaccggggcgtgggccaggccgccatccggggcctggtggccgagggccaccggctggccaacgtgatgatgggcccctaccggcaggacctgctggccaagtgtgacagagtggaccagctgacagcccagctggccgacctggccgcccggggggagggggagagcccccaggcccgggccctggccagccagctgcaggacagcctgaaggacctgaaggccaggatgcaggaggccatgacccaggaggtgtctgatgtgttcagtgacaccaccacccccatcaagctgctggccgtggccgccacagcccccccagatgcccccaaccgggaggaggtgtttgatgaaagagctgccaactttgagaaccacagcggcaagctgggcgccacagctgagaaggctgctgctgtgggcacagccaacaagagcacagtggagggcatccaggcctctgtgaagacagcccgggagctgaccccccaggtggtgtctgctgcccgcatcctgctgagaaatcctggcaaccaggccgcctatgagcactttgagaccatgaagaaccagtggattgacaacgtggagaagatgacaggcctggtggatgaggccatcgacaccaagagcctgctggatgccagcgaggaggccatcaagaaggacctggacaagtgcaaggtggccatggccaacatccagccccagatgctggtggccggggccaccagcatcgcccggcgggccaaccgcatcctgctggtggccaagcgggaggtggagaacagcgaggaccccaagttccgggaggccgtgaaggccgccagtgatgagctgagcaagaccatcagccccatggtgatggatgccaaggctgtggccggcaacatcagtgaccccggcctgcagaagagcttcctggacagcggctaccgcatcctgggcgctgtggccaaggtgcgggaggccttccagccccaggagccagacttccccccacctcctccagacctggagcagctgcggctgacagatgagctggccccacccaagccacccctgcctgagggggaggtgcccccaccccggcccccacctcctgaggagaaggatgaggagttccctgagcagaaggccggggaggtgatcaaccagcccatgatgatggccgcccggcagctgcatgatgaggccaggaagtggagcagcaagccaggcatcccagctgctgaggtgggcatcggcgtggtggccgaggctgatgctgctgatgctgctggcttccctgtgcccccagacatggaggatgattatgagcctgagctgctgctgatgcccagcaaccagcctgtgaaccagcccatcctggccgccgcccagagcctgcaccgggaggccaccaagtggagcagcaaaggaaatgacatcatcgctgctgccaagaggatggccctgctgatggccgagatgagccggctggtgcggggcggctctgtgcccaggaccagcccccggccccagatgaggtag

SEQ ID NO: 22465 - DNA, 984 bp, synthetic construct
  misc_feature 1..984: note = Description of Artificial Sequence: Synthetic coding sequence
  source 1..984: mol_type = other DNA
atgcctgtgttccacaccaggaccatcgagagcatcctggagcctgtggcccagcagatcagccacctggtgatcatgcatgaggagggggaggtggatggcaaggccatcccagacctgacagcccctgtggccgctgtgcaggccgctgtgagcaacctggtgcgggtgggcaaggagaccgtgcagaccacagaggaccagatcctgaagagggacatgcccccagccttcatcaaggtggagaatgcctgcaccaagctggtgcaggccgcccagatgctgcagagcgacccctacagcgtgcctgcccgggactacctgattgatggcagccggggcatcctgagcggcaccagtgacctgctgctgacctttgatgaagctgaggtgcccccaccccggcccccacctcctgaggagaaggatgaggagttccctgagcagaaggccggggaggtgatcaaccagcccatgatgatggccgcccggcagctgcatgatgaggccaggaagtggagcagcaaaggaaatgacatcatcgctgctgccaagaggatggccctgctgatggccgagatgagccggctggtgcggggcggcagcggcaccaagagggccctgatccagtgtgccaaggacatcgccaaggccagtgatgaggtgacccggctggccaaggaggtggccaagcagtgcacagacaagaggatccgcaccaacctgctgcaggtgtgtgagcgcatccccaccatcagcacccagctgaagatcctgagcacagtgaaggccaccatgctgggccgcaccaacatcagtgatgaggagagcgagcaggccacagagatgctggtgcacaatgcccagaacctgatgcagagcgtgaaggagaccgtgcgggaggccgaggccgccagcatcaagatcagaacagatgctggcttcaccctgcgctgggtgaggaagaccccctggtaccagtag

SEQ ID NO: 22466 - DNA, 2421 bp, synthetic construct
  misc_feature 1..2421: note = Description of Artificial Sequence: Synthetic coding sequence
  source 1..2421: mol_type = other DNA
ggccagatgacagaccaggtggccgacctgcgggcccggggccagggcagcagccctgtggccatgcagaaggcccagcaggtgtcccagggcctggatgtgctgacagccaaggtggagaatgctgccaggaagctggaggccatgaccaacagcaagcagagcatcgccaagaagattgatgctgcccagaactggctggccgaccccaatggaggccctgagggggaggagcagatccggggggccctggccgaggccaggaagattgctgagctgtgtgatgaccccaaggagagagatgacatcctgcggagcctgggggagatcagcgccctgaccagcaagctggccgacctgcggcggcagggcaaaggagacagccctgaggcccgggccctggccaagcaggtggccacagccctgcagaacctgcagaccaagaccaacagagctgtggccaacagcaggcctgccaaggctgctgtgcacctggagggcaagattgagcaggcccagcgctggattgacaaccccaccgtggatgacagaggagtgggccaggccgccatccggggcctggtggccgagggccaccggctggccaacgtgatgatgggcccctaccggcaggacctgctggccaagtgtgacagagtggaccagctgacagcccagctggccgacctggccgcccggggggagggggagagcccccaggcccgggccctggccagccagctgcaggacagcctgaaggacctgaaggccaggatgcaggaggccatgacccaggaggtgtctgatgtgttcagtgacaccaccacccccatcaagctgctggccgtggccgccacagcccccccagatgcccccaaccgggaggaggtgtttgatgagcgggccgccaactttgagaaccacagcggcaagctgggcgccacagctgagaaggctgctgctgtgggcacagccaacaagagcacagtggagggcatccaggcctctgtgaagacagcccgggagctgaccccccaggtggtgtctgctgcccgcatcctgctgaggaaccctggcaaccaggccgcctatgagcactttgagaccatgaagaaccagtggattgacaacgtggagaagatgacaggcctggtggatgaggccatcgacaccaagagcctgctggatgccagcgaggaggccatcaagaaggacctggacaagtgcaaggtggccatggccaacatccagccccagatgctggtggccggggccaccagcatcgcccggcgggccaaccgcatcctgctggtggccaagcgggaggtggagaacagcgaggaccccaagttccgggaggccgtgaaggccgccagtgatgagctgagcaagaccatcagccccatggtgatggatgccaaggctgtggccggcaacatcagtgaccccggcctgcagaagagcttcctggacagcggctaccgcatcctgggcgctgtggccaaggtgcgggaggccttccagccccaggagccagacttccccccacctcctccagacctggagcagctgcggctgacagatgagctggccccacccaagccacccctgcctgagggggaggtgcccccacccaggcctcctcctcctgaggagaaggatgaggagttccctgagcagaaggccggggaggtgatcaaccagcccatgatgatggccgcccggcagctgcatgatgaggccaggaagtggagcagcaagccaggcatcccagctgctgaggtgggcattggagtggtggccgaggctgatgctgctgatgctgctggcttccctgtgcccccagacatggaggatgattatgagcctgagctgctgctgatgcccagcaaccagcctgtgaaccagcccatcctggccgccgcccagagcctgcaccgggaggccaccaagtggagcagcaaaggaaatgacatcatcgccgccgccaagaggatggccctgctgatggccgagatgagccggctggtgcggggcggcagcggcaccaagagggccctgatccagtgtgccaaggacatcgccaaggccagtgatgaggtgacccggctggccaaggaggtggccaagcagtgcacagacaagaggatccgcaccaacctgctgcaggtgtgtgagcgcatccccaccatcagcacccagctgaagatcctgagcacagtgaaggccaccatgctgggccgcaccaacatcagtgatgaggagagcgagcaggccacagagatgctggtgcacaatgcccagaacctgatgcagagcgtgaaggagaccgtgcgggaggccgaggccgccagcatcaagatcagaacagatgctggcttcaccctgcgctgggtgaggaagaccccctggtaccagtag

SEQ ID NO: 22467 - DNA, 3021 bp, synthetic construct
  misc_feature 1..3021: note = Description of Artificial Sequence: Synthetic coding sequence
  source 1..3021: mol_type = other DNA
atgcccccagccttcatcaaggtggagaatgcctgcaccaagctggtgcaggccgcccagatgctgcagagcgacccctacagcgtgcctgcccgggactacctgattgatggcagccggggcatcctgagcggcaccagtgacctgctgctgacctttgatgaggccgaggtgaggaagatcatccgggtgtgcaagggcatcctggagtacctgactgtggccgaggtggtggagaccatggaggacctggtgacctacaccaagaacctgggccctggcatgaccaagatggccaagatgattgatgagcggcagcaggagctgacccaccaggagcaccgggtgatgctggtgaacagcatgaacacagtgaaggagctgctgcctgtgctgatcagcgccatgaagatctttgtgaccaccaagaacagcaagaaccagggcatcgaggaggccctgaagaacagaaacttcaccgtggagaagatgtctgctgagatcaatgagatcatccgggtgctgcagctgacctcctgggatgaagatgcctgggccagcaaggacacagaggccatgaagagggccctggccagcattgacagcaagctgaaccaggccaagggctggctgcgggaccccagcgccagccctggagatgctggggagcaggccatccggcagatcctggatgaagctgggaaggtgggggagctgtgtgccggcaaggagcggcgggagatcctgggcacctgcaagatgctgggccagatgacagaccaggtggccgacctgcgggcccggggccagggcagcagccctgtggccatgcagaaggcccagcaggtgtcccagggcctggatgtgctgacagccaaggtggagaatgctgccaggaagctggaggccatgaccaacagcaagcagagcatcgccaagaagattgatgctgcccagaactggctggccgaccccaacggcggccctgagggggaggagcagatccggggggccctggccgaggccaggaagattgctgagctgtgtgatgaccccaaggagagagatgacatcctgcggagcctgggggagatcagcgccctgaccagcaagctggccgacctgcggcggcagggcaagggggacagccctgaggcccgggccctggccaagcaggtggccacagccctgcagaacctgcagaccaagaccaacagagctgtggccaacagcaggcctgccaaggctgctgtgcacctggagggcaagattgagcaggcccagcgctggattgacaaccccaccgtggatgaccggggcgtgggccaggccgccatccggggcctggtggccgagggccaccggctggccaacgtgatgatgggcccctaccggcaggacctgctggccaagtgtgacagagtggaccagctgacagcccagctggccgacctggccgcccggggggagggggagagcccccaggcccgggccctggccagccagctgcaggacagcctgaaggacctgaaggccaggatgcaggaggccatgacccaggaggtgtctgatgtgttcagtgacaccaccacccccatcaagctgctggccgtggccgccacagcccccccagatgcccccaaccgggaggaggtgtttgatgaaagagctgccaactttgagaaccacagcggcaagctgggcgccacagctgagaaggctgctgctgtgggcacagccaacaagagcacagtggagggcatccaggcctctgtgaagacagcccgggagctgaccccccaggtggtgtctgctgcccgcatcctgctgagaaatcctggcaaccaggccgcctatgagcactttgagaccatgaagaaccagtggattgacaacgtggagaagatgacaggcctggtggatgaggccatcgacaccaagagcctgctggatgccagcgaggaggccatcaagaaggacctggacaagtgcaaggtggccatggccaacatccagccccagatgctggtggccggggccaccagcatcgcccggcgggccaaccgcatcctgctggtggccaagcgggaggtggagaacagcgaggaccccaagttccgggaggccgtgaaggccgccagtgatgagctgagcaagaccatcagccccatggtgatggatgccaaggctgtggccggcaacatcagtgaccccggcctgcagaagagcttcctggacagcggctaccgcatcctgggcgctgtggccaaggtgcgggaggccttccagccccaggagccagacttccccccacctcctccagacctggagcagctgcggctgacagatgagctggccccacccaagccacccctgcctgagggggaggtgcccccaccccggcccccacctcctgaggagaaggatgaggagttccctgagcagaaggccggggaggtgatcaaccagcccatgatgatggccgcccggcagctgcatgatgaggccaggaagtggagcagcaaaggaaatgacatcatcgctgctgccaagaggatggccctgctgatggccgagatgagccggctggtgcggggcggcagcggcaccaagagggccctgatccagtgtgccaaggacatcgccaaggccagtgatgaggtgacccggctggccaaggaggtggccaagcagtgcacagacaagaggatccgcaccaacctgctgcaggtgtgtgagcgcatccccaccatcagcacccagctgaagatcctgagcacagtgaaggccaccatgctgggccgcaccaacatcagtgatgaggagagcgagcaggccacagagatgctggtgcacaatgcccagaacctgatgcagagcgtgaaggagaccgtgcgggagctgaagctgctgcagagcaagtttgagcagatgctggacctgcactgtgccggcctggagcggctgcccggcaccagccgccacctggccgagcccggctggcacaggaacctgtactag

SEQ ID NO: 22468 - DNA, 570 bp, synthetic construct
  misc_feature 1..570: note = Description of Artificial Sequence: Synthetic coding sequence
  source 1..570: mol_type = other DNA
atgacagagtacaagctggtggtggtgggcgctgggggcgtgggcaagagcgccctgaccatccagctgatccagaaccactttgtggatgaatatgaccccaccattgaagattcctacaggaagcaggtggtgattgatggagagacctgcctgctggacatcctggacacagctggccaggaggagtacagcgccatgagggaccagtacatgaggactggagagggcttcctgtgtgtgtttgccatcaacaacaccaagagctttgaggacatccaccactaccgggagcagatcaagagggtgaaggacagtgaagatgtgcccatggtgctggtgggcaacaagtgtgacctgcccagcaggacagtggacaccaagcaggcccaggacctggcccggagctatggcatccccttcatcgagaccagcgccaagacccggcagagggtggaggatgccttctacaccctggtgcgggagatccggcagtaccgcctgaagaagatcagcaaggaggagaagaccccaggctgtgtgaagatcaagaagtgcatcatcatgtag

SEQ ID NO: 22469 - DNA, 567 bp, synthetic construct
  misc_feature 1..567: note = Description of Artificial Sequence: Synthetic coding sequence
  source 1..567: mol_type = other DNA
atgacagagtacaagctggtggtggtgggcgctgggggcgtgggcaagagcgccctgaccatccagctgatccagaaccactttgtggatgaatatgaccccaccattgaagattcctacaggaagcaggtggtgattgatggagagacctgcctgctggacatcctggacacagctggccaggaggagtacagcgccatgagggaccagtacatgaggactggagagggcttcctgtgtgtgtttgccatcaacaacaccaagagctttgaggacatccaccactaccgggagcagatcaagagggtgaaggacagtgaagatgtgcccatggtgctggtgggcaacaagtgtgacctgcccagcaggacagtggacaccaagcaggcccaggacctggcccggagctatggcatccccttcatcgagaccagcgccaagacccggcagggcgtggatgatgccttctacaccctggtgcgggagatcaggaagcacaaggagaagatgagcaaggatggcaagaagaagaagaagaagagcaagaccaagtgtgtgatcatgtag

SEQ ID NO: 22470 - DNA, 228 bp, synthetic construct
  misc_feature 1..228: note = Description of Artificial Sequence: Synthetic coding sequence
  source 1..228: mol_type = other DNA
atgacagagtacaagctggtggtggtgggcgctgggggcgtgggcaagagcgccctgaccatccagctgatccagaaccactttgtggatgaatatgaccccaccatcgagggcgtggatgatgccttctacaccctggtgcgggagatcaggaagcacaaggagaagatgagcaaggatggcaagaagaagaagaagaagagcaagaccaagtgtgtgatcatgtag

SEQ ID NO: 22471 - DNA, 2931 bp, synthetic construct
  misc_feature 1..2931: note = Description of Artificial Sequence: Synthetic coding sequence
  source 1..2931: mol_type = other DNA
atgagaggagcccggggggcctgggacttcctgtgtgtgctgctgctgctgctgcgggtgcagacaggcagcagccagcccagcgtgtccccaggagagcccagcccccccagcatccaccctgggaagagtgacctgattgtgcgggtgggagatgagatccggctgctgtgcacagatcctggctttgtgaagtggacctttgagatcctggatgagaccaatgaaaacaagcagaatgagtggatcacagagaaggccgaggccaccaacacaggcaagtacacctgcaccaacaagcacggcctgagcaacagcatctacgtgtttgtgcgggaccctgccaagctgttcctggtggacaggagcctgtatggcaaggaggacaatgacaccctggtgcgctgccccctgacagatcctgaggtgaccaactacagcctgaagggctgccagggcaagcccctgcccaaggacctgcgcttcatcccagaccccaaggccggcatcatgatcaagtctgtgaagagggcctaccaccggctgtgcctgcactgcagcgtggaccaggagggcaagtctgtgctgtctgagaagttcatcctgaaggtgcggcctgccttcaaggctgtgcctgtggtgtctgtgtccaaggccagctacctgctgcgggagggggaggagttcaccgtgacctgcaccatcaaggatgtgagcagctctgtgtacagcacctggaagcgggagaacagccagaccaagctgcaggagaagtacaacagctggcaccacggggacttcaactatgagcggcaggccaccctgaccatcagcagcgcccgggtgaatgattctggagtcttcatgtgctacgccaacaacaccttcggcagcgccaacgtgaccaccaccctggaggtggtggacaagggcttcatcaacatcttccccatgatcaacaccaccgtgtttgtgaatgatggagaaaatgtggacctgattgtggagtatgaggccttccccaagccagagcaccagcagtggatctacatgaacagaaccttcacagacaagtgggaggactaccccaagtcagaaaatgaaagcaacatccgctacgtgtctgagctgcacctgacccggctgaagggcacagaaggaggcacctacaccttcctggtgagcaacagtgatgtgaatgctgccatcgccttcaacgtgtatgtgaacaccaagccagagatcctgacctatgaccggctggtgaatggcatgctgcagtgtgtggccgccggcttccctgagcccaccatcgactggtacttctgccccggcacagagcagcgctgcagcgcctctgtgctgcctgtggatgtgcagaccctgaacagcagcggccccccatttgggaagctggtggtgcagagcagcattgacagcagcgccttcaagcacaacggcaccgtggagtgcaaggcctacaatgatgtgggcaagaccagcgcctacttcaactttgccttcaagggcaacaacaaggagcagatccacccccacaccctcttcacccccctgctgattggatttgtgattgtggccggcatgatgtgcatcatcgtgatgatcctgacctacaagtacctgcagaagcccatgtatgaggtgcagtggaaggtggtggaggagatcaatggaaacaactacgtgtacatcgaccccacccagctgccctatgaccacaagtgggagttccccaggaaccggctgagctttgggaagaccctgggcgctggggccttcggcaaggtggtggaggccacagcctacggcctcatcaagagtgatgctgccatgacagtggccgtgaagatgctgaagcccagcgcccacctgacagagcgggaggccctgatgtctgagctgaaggtgctgagctacctgggcaaccacatgaacatcgtgaacctgctgggcgcctgcaccatcggcggccccaccctggtgatcacagagtactgctgctatggagacctgctgaacttcctgcggaggaagagggacagcttcatctgcagcaagcaggaggaccacgccgaggccgccctgtacaagaacctgctgcacagcaaggagagcagctgcagcgacagcaccaatgagtacatggacatgaagccaggagtgtcctatgtggtgcccaccaaggctgacaagagaagatctgtgcgcatcggcagctacatcgagagagatgtgaccccagccatcatggaggatgatgagctggccctggacctggaggacctgctgtccttctcctaccaggtggccaagggcatggccttcctggccagcaagaactgcatccaccgggacctggccgccaggaacatcctgctgacccacggccgcatcaccaagatctgtgactttggcctggcccgggacatcaagaatgacagcaactacgtggtgaagggaaatgcccggctgcctgtgaagtggatggcccctgagagcatcttcaactgtgtgtacacctttgaaagtgatgtgtggagctatggcatcttcctgtgggagctgttcagcctgggcagcagcccctacccaggcatgcctgtggacagcaagttctacaagatgatcaaggagggcttcaggatgctgagccctgagcacgccccagctgagatgtatgacatcatgaagacctgctgggatgctgaccccctgaagaggcccaccttcaagcagatcgtgcagctgattgagaagcagatcagcgagagcaccaaccacatctacagcaacctggccaactgcagccccaaccggcagaagcctgtggtggaccacagcgtgcgcatcaacagcgtgggcagcacagccagcagcagccagcccctgctggtgcatgatgatgtgtag

SEQ ID NO: 22472 - DNA, 2919 bp, synthetic construct
  misc_feature 1..2919: note = Description of Artificial Sequence: Synthetic coding sequence
  source 1..2919: mol_type = other DNA
atgagaggagcccggggggcctgggacttcctgtgtgtgctgctgctgctgctgcgggtgcagacaggcagcagccagcccagcgtgtccccaggagagcccagcccccccagcatccaccctgggaagagtgacctgattgtgcgggtgggagatgagatccggctgctgtgcacagatcctggctttgtgaagtggacctttgagatcctggatgagaccaatgaaaacaagcagaatgagtggatcacagagaaggccgaggccaccaacacaggcaagtacacctgcaccaacaagcacggcctgagcaacagcatctacgtgtttgtgcgggaccctgccaagctgttcctggtggacaggagcctgtatggcaaggaggacaatgacaccctggtgcgctgccccctgacagatcctgaggtgaccaactacagcctgaagggctgccagggcaagcccctgcccaaggacctgcgcttcatcccagaccccaaggccggcatcatgatcaagtctgtgaagagggcctaccaccggctgtgcctgcactgcagcgtggaccaggagggcaagtctgtgctgtctgagaagttcatcctgaaggtgcggcctgccttcaaggctgtgcctgtggtgtctgtgtccaaggccagctacctgctgcgggagggggaggagttcaccgtgacctgcaccatcaaggatgtgagcagctctgtgtacagcacctggaagcgggagaacagccagaccaagctgcaggagaagtacaacagctggcaccacggggacttcaactatgagcggcaggccaccctgaccatcagcagcgcccgggtgaatgattctggagtcttcatgtgctacgccaacaacaccttcggcagcgccaacgtgaccaccaccctggaggtggtggacaagggcttcatcaacatcttccccatgatcaacaccaccgtgtttgtgaatgatggagaaaatgtggacctgattgtggagtatgaggccttccccaagccagagcaccagcagtggatctacatgaacagaaccttcacagacaagtgggaggactaccccaagtcagaaaatgaaagcaacatccgctacgtgtctgagctgcacctgacccggctgaagggcacagaaggaggcacctacaccttcctggtgagcaacagtgatgtgaatgctgccatcgccttcaacgtgtatgtgaacaccaagccagagatcctgacctatgaccggctggtgaatggcatgctgcagtgtgtggccgccggcttccctgagcccaccatcgactggtacttctgccccggcacagagcagcgctgcagcgcctctgtgctgcctgtggatgtgcagaccctgaacagcagcggccccccatttgggaagctggtggtgcagagcagcattgacagcagcgccttcaagcacaacggcaccgtggagtgcaaggcctacaatgatgtgggcaagaccagcgcctacttcaactttgccttcaaggagcagatccacccccacaccctcttcacccccctgctgattggatttgtgattgtggccggcatgatgtgcatcatcgtgatgatcctgacctacaagtacctgcagaagcccatgtatgaggtgcagtggaaggtggtggaggagatcaatggaaacaactacgtgtacatcgaccccacccagctgccctatgaccacaagtgggagttccccaggaaccggctgagctttgggaagaccctgggcgctggggccttcggcaaggtggtggaggccacagcctacggcctcatcaagagtgatgctgccatgacagtggccgtgaagatgctgaagcccagcgcccacctgacagagcgggaggccctgatgtctgagctgaaggtgctgagctacctgggcaaccacatgaacatcgtgaacctgctgggcgcctgcaccatcggcggccccaccctggtgatcacagagtactgctgctatggagacctgctgaacttcctgcggaggaagagggacagcttcatctgcagcaagcaggaggaccacgccgaggccgccctgtacaagaacctgctgcacagcaaggagagcagctgcagcgacagcaccaatgagtacatggacatgaagccaggagtgtcctatgtggtgcccaccaaggctgacaagagaagatctgtgcgcatcggcagctacatcgagagagatgtgaccccagccatcatggaggatgatgagctggccctggacctggaggacctgctgtccttctcctaccaggtggccaagggcatggccttcctggccagcaagaactgcatccaccgggacctggccgccaggaacatcctgctgacccacggccgcatcaccaagatctgtgactttggcctggcccgggacatcaagaatgacagcaactacgtggtgaagggaaatgcccggctgcctgtgaagtggatggcccctgagagcatcttcaactgtgtgtacacctttgaaagtgatgtgtggagctatggcatcttcctgtgggagctgttcagcctgggcagcagcccctacccaggcatgcctgtggacagcaagttctacaagatgatcaaggagggcttcaggatgctgagccctgagcacgccccagctgagatgtatgacatcatgaagacctgctgggatgctgaccccctgaagaggcccaccttcaagcagatcgtgcagctgattgagaagcagatcagcgagagcaccaaccacatctacagcaacctggccaactgcagccccaaccggcagaagcctgtggtggaccacagcgtgcgcatcaacagcgtgggcagcacagccagcagcagccagcccctgctggtgcatgatgatgtgtag

SEQ ID NO: 22473 - DNA, 1242 bp, synthetic construct
  misc_feature 1..1242: note = Description of Artificial Sequence: Synthetic coding sequence
  source 1..1242: mol_type = other DNA
atgagaggagcccggggggcctgggacttcctgtgtgtgctgctgctgctgctgcgggtgcagacaggcagcagccagcccagcgtgtccccaggagagcccagcccccccagcatccaccctgggaagagtgacctgattgtgcgggtgggagatgagatccggctgctgtgcacagatcctggctttgtgaagtggacctttgagatcctggatgagaccaatgaaaacaagcagaatgagtggatcacagagaaggccgaggccaccaacacaggcaagtacacctgcaccaacaagcacggcctgagcaacagcatctacgtgtttgtgcgggaccctgccaagctgttcctggtggacaggagcctgtatggcaaggaggacaatgacaccctggtgcgctgccccctgacagatcctgaggtgaccaactacagcctgaagggctgccagggcaagcccctgcccaaggacctgcgcttcatcccagaccccaaggccggcatcatgatcaagtctgtgaagagggcctaccaccggctgtgcctgcactgcagcgtggaccaggagggcaagtctgtgctgtctgagaagttcatcctgaaggtgcggcctgccttcaaggctgtgcctgtggtgtctgtgtccaaggccagctacctgctgcgggagggggaggagttcaccgtgacctgcaccatcaaggatgtgagcagctctgtgtacagcacctggaagcgggagaacagccagaccaagctgcaggagaagtacaacagctggcaccacggggacttcaactatgagcggcaggccaccctgaccatcagcagcgcccgggtgaatgattctggagtcttcatgtgctacgccaacaacaccttcggcagcgccaacgtgaccaccaccctggaggtggtggacaagggcttcatcaacatcttccccatgatcaacaccaccgtgtttgtgaatgatggagaaaatgtggacctgattgtggagtatgaggccttccccaagccagagcaccagcagtggatctacatgaacagaaccttcacagacaagtgggaggactaccccaagtcagaaaatgaaagcaacatccgctacgtgtctgagctgcacctgacccggctgaagggcacagaaggaggcacctacaccttcctggtgagcaacagtgatgtgaatgctgccatcgccttcaacgtgtatgtgaacagcaagctgtag

SEQ ID NO: 22474 - DNA, 1212 bp, synthetic construct
  misc_feature 1..1212: note = Description of Artificial Sequence: Synthetic coding sequence
  source 1..1212: mol_type = other DNA
atggccagcgagctggccatgagcaacagcgacctgcccaccagccccctggccatggagtatgtgaatgactttgacctgatgaagtttgaggtgaagaaggagcctgtggagacagaccgcatcatcagccagtgtggccgcctgattgctgggggcagcctgagcagcacccccatgagcaccccctgcagctctgtgccccccagccccagcttcagcgcccccagccctggcagcggcagcgagcagaaggcccacctggaggactactactggatgacaggctacccccagcagctgaaccctgaggccctgggcttctccccagaagatgctgtggaggccctgatcagcaacagccaccagctgcagggcggctttgatggctacgcccggggggcccagcagctggccgctgctgctggggccggggccggggccagcctgggcggcagcggggaggagatgggccctgctgctgctgtggtgtctgctgtgattgctgctgctgctgcccagagcggggccggcccccactaccaccaccaccaccaccacgccgccggccaccaccaccaccccacagctggggcccctggagctgctggcagcgctgctgccagcgctgggggcgccggcggggccggcggcggcggccctgccagcgctgggggcggcggcggcggcggcggcggcggcggcggcggcggggccgccggggccggcggggccctgcacccccaccacgccgccggcggcctgcactttgatgaccgcttcagtgatgagcagctggtgaccatgtctgtgcgggagctgaaccggcagctgcggggcgtgtccaaggaggaggtgatccggctgaagcagaagaggaggaccctgaagaacagaggctacgcccagagctgccgcttcaagagggtgcagcagagacatgtgctggagagcgagaagaaccagctgctgcagcaggtggaccacctgaagcaggagatcagccggctggtgcgggagagagatgcctacaaggagaagtatgagaagctggtgagcagcggcttccgggagaatggcagcagcagtgacaaccccagcagccctgagttcttcatcacagagcccaccaggaagctggagcccagcgtgggctacgccaccttctggaagccccagcaccgggtgctgacctctgtgttcaccaagtag

SEQ ID NO: 22475 - DNA, 1122 bp, synthetic construct
  misc_feature 1..1122: note = Description of Artificial Sequence: Synthetic coding sequence
  source 1..1122: mol_type = other DNA
atggccagcgagctggccatgagcaacagcgacctgcccaccagccccctggccatggagtatgtgaatgactttgacctgatgaagtttgaggtgaagaaggagcctgtggagacagaccgcatcatcagccagtgtggccgcctgattgctgggggcagcctgagcagcacccccatgagcaccccctgcagctctgtgccccccagccccagcttcagcgcccccagccctggcagcggcagcgagcagaaggcccacctggaggactactactggatgacaggctacccccagcagctgaaccctgaggccctgggcttctccccagaagatgctgtggaggccctgatcagcaacagccaccagctgcagggcggctttgatggctacgcccggggggcccagcagctggccgctgctgctggggccggggccggggccagcctgggcggcagcggggaggagatgggccctgctgctgctgtggtgtctgctgtgattgctgctgctgctgcccagagcggggccggcccccactaccaccaccaccaccaccacgccgccggccaccaccaccaccccacagctggggcccctggagctgctggcagcgctgctgccagcgctgggggcgccggcggggccggcggcggcggccctgccagcgctgggggcggcggcggcggcggcggcggcggcggcggcggcggggccgccggggccggcggggccctgcacccccaccacgccgccggcggcctgcactttgatgaccgcttcagtgatgagcagctggtgaccatgtctgtgcgggagctgaaccggcagctgcggggcgtgtccaaggaggaggtgatccggctgaagcagaagaggaggaccctgaagaacagaggctacgcccagagctgccgcttcaagagggtgcagcagagacatgtgctggagagcgagaagaaccagctgctgcagcaggtggaccacctgaagcaggagatcagccggctggtgcgggagagagatgcctacaaggagaagtatgagaagctggtgagcagcggcttccgggagaatggcagcagcagtgacaaccccagcagccctgagttcttcatgtag

SEQ ID NO: 22476 - DNA, 1062 bp, synthetic construct
  misc_feature 1..1062: note = Description of Artificial Sequence: Synthetic coding sequence
  source 1..1062: mol_type = other DNA
atggctgctgagctggccatgggcgctgagctgcccagcagccccctggccatcgagtatgtgaatgactttgacctgatgaagtttgaggtgaagaaggagcccccagaggccgagcgcttctgccaccggctgcccccaggcagcctgagcagcacccccctgagcaccccctgcagctctgtgcccagcagccccagcttctgtgcccccagccctggcactggaggcggcggcggggccggcggcggcggcggcagcagccaggccggcggggcccctggcccccccagcggcggccctggagctgtgggcggcaccagcggcaagccagccctggaggacctgtactggatgagcggctaccagcaccacctgaaccctgaggccctgaacctgaccccagaagatgctgtggaggccctgattggcagcggccaccacggggcccaccacggggcccaccaccctgctgctgctgctgcctatgaggccttccggggccctggctttgctgggggcggcggcgcagatgacatgggcgccggccaccaccacggggcccaccacgccgcccaccaccaccacgccgcccaccaccaccaccaccaccaccaccaccacggcggggccggccatggaggaggagctggccaccacgtgcggctggaggagcgcttcagtgatgaccagctggtgtccatgtctgtgcgggagctgaaccggcagctgcggggcttcagcaaggaggaggtgatccggctgaagcagaagaggaggaccctgaagaacagaggctacgcccagagctgccgcttcaagagggtgcagcagaggcacatcctggagagcgagaagtgccagctgcagagccaggtggagcagctgaagctggaggtgggccgcctggccaaggagcgggacctgtacaaggagaagtatgagaagctggccggccggggcggccctggcagcgctgggggcgccggcttcccccgggagcccagccccccccaggccggccctgggggcgccaagggcacagctgacttcttcctgtag

SEQ ID NO: 22477 - DNA, 972 bp, synthetic construct
  misc_feature 1..972: note = Description of Artificial Sequence: Synthetic coding sequence
  source 1..972: mol_type = other DNA
atggctgctgagctgtccatgggccctgagctgcccaccagccccctggccatggagtatgtgaatgactttgacctgctgaagtttgatgtgaagaaggagcccctgggccgggcagagcggcccggccggccctgcacccggctgcagcctgctggctctgtgagcagcacccccctgagcaccccctgcagctctgtgcccagcagccccagcttcagccccacagagcagaagacccacctggaggacctgtactggatggccagcaactaccagcagatgaaccctgaggccctgaacctgaccccagaagatgctgtggaggccctgattggcagccaccctgtgccccagcccctgcagagctttgacagcttccggggggcccaccaccaccaccaccaccaccacccccacccccaccacgcctacccaggggccggcgtggcccatgatgagctgggcccccacgcccacccccaccaccaccaccaccaccaggccagccccccacccagcagcgctgccagccctgcccagcagctgcccaccagccaccctggccctggcccccacgccacagccagcgccacagctgctggaggaaatggatctgtggaggaccgcttcagtgatgaccagctggtgtccatgtctgtgcgggagctgaacagacacctgcggggcttcaccaaggatgaggtgatccggctgaagcagaagaggaggaccctgaagaacagaggctacgcccagagctgccgctacaagagggtgcagcagaagcaccacctggagaatgagaagacccagctgatccagcaggtggagcagctgaagcaggaggtgtcccggctggcccgggagagagatgcctacaaggtgaagtgtgagaagctggccaacagcggcttccgggaggccggcagcaccagtgacagccccagcagccctgagttcttcctgtag

SEQ ID NO: 22478 - DNA, 972 bp, synthetic construct; identical to SEQ ID NO: 22477
  misc_feature 1..972: note = Description of Artificial Sequence: Synthetic coding sequence
  source 1..972: mol_type = other DNA

SEQ ID NO: 22479 - DNA, 1233 bp, synthetic construct
  misc_feature 1..1233: note = Description of Artificial Sequence: Synthetic coding sequence
  source 1..1233: mol_type = other DNA
atggccaagaggagccgctcagaagatgaagatgatgacctgcagtatgctgaccatgactatgaggtgccccagcagaagggcctgaagaagctgtggaacagagtgaagtggaccagagatgaagatgacaagctgaagaagctggtggagcagcacggcacagatgactggaccctgattgccagccacctgcagaacagaagtgacttccagtgccagcaccgctggcagaaggtgctgaaccctgagctgatcaagggcccctggaccaaggaggaggaccagagggtgattgagctggtgcagaagtatggcaagaagaggaagatgagggtgggccacagccctggcagcgagctgagagatggcagcctgaatgatggcggcaacatggccctgaagcacacccccctgaagaccctgcccttcagccccagccagttcttcaacacctgccctggaaatgagcagctgaacatcgagaaccccagcttcaccagcacccccatctgtggccagaaggccctgatcaccacccccctgcacaaggagaccacccccaaggaccagaaggaaaatgtgggcttccgcacccccaccatcagaagaagcatcctgggcaccacccccaggacccccacccccttcaagaatgccctggccgcccaggagaagaagtatggccccctgaagatcgtgtcccagcccctggccttcctggaggaggacatccgggaggtgctgaaggaggagactggaacagacctcttcctgaaggaggaggatgagcccgcctacaagagctgcaagcaggagaacacagccagcggcaagaaggtgaggaagagcctggtgctggacaactgggagaaggaggagagcggcacccagctgctgacagaggacatcagtgacatgcagagcgagaaccgcttcaccaccagcctgctgatgatccccctgctggagatccatgacaaccgctgcaacctgatccctgagaagcaggacatcaacagcaccaacaagacctacaccctgaccaagaagaagcccaaccccaacaccagcaaggtggtgaagctggagaagaacctgcagagcaactgtgagtgggagaccgtggtgtatggcaagacagaggaccagctgatcatgacagagcaggcccggcgctacctgagcacctacacagccaccagcagcaccagccgggccctgatcctgtag

SEQ ID NO: 22480 - DNA, 2259 bp, synthetic construct
  misc_feature 1..2259: note = Description of Artificial Sequence: Synthetic coding sequence
  source 1..2259: mol_type = other DNA
atggccaagaggagccgctcagaagatgaagatgatgacctgcagtatgctgaccatgactatgaggtgccccagcagaagggcctgaagaagctgtggaacagagtgaagtggaccagagatgaagatgacaagctgaagaagctggtggagcagcacggcacagatgactggaccctgattgccagccacctgcagaacagaagtgacttccagtgccagcaccgctggcagaaggtgctgaaccctgagctgatcaagggcccctggaccaaggaggaggaccagagggtgattgagctggtgcagaagtatggccccaagcgctggagcctgattgccaagcacctgaagggcagaattggcaagcagtgccgggagcgctggcacaaccacctgaaccctgaggtgaagaagagctcctggacagaggaggaggaccgcatcatctatgaggcccacaagaggctgggcaaccgctgggccgagatcgccaagctgctgcccggccgcacagacaacagcatcaagaaccactggaacagcaccatgaggaggaaggtggagcaggagggctacctgcaggacggcatcaagtctgagaggagcagcagcaagctgcagcacaagccctgtgccgccatggaccacatgcagacccagaaccagttctacatccctgtgcagatccctggctaccagtatgtgtccccagagggcaactgcattgaacatgtgcagcccaccagcgccttcatccagcagcccttcattgatgaggaccctgacaaggagaagaagatcaaggagctggagatgctgctgatgtctgcagaaaatgaggtgcggaggaagaggatccccagccagcccggcagcttcagctcctggagcggcagcttcctgatggatgacaacatgagcaacaccctgaacagcctggatgagcacaccagcgagttctacagcatggatgagaaccagcctgtgtctgcccagcagaacagccccaccaagttcctggccgtggaggccaatgctgtgctgagcagcctgcagaccatccctgagtttgctgagaccctggagctgattgaaagtgaccctgtggcctggagcgatgtgaccagctttgacatcagtgatgctgctgccagccccatcaagagcacccctgtgaagctgatgaggatccagcacaatgaaggagccatggagtgccagttcaacgtgtccctggtgctggagggcaagaagaacacctgcaatggaggcaacagcgaggccgtgcccctgaccagccccaacatcgccaagttcagcaccccaccagccatcctgaggaagaagaggaagatgagggtgggccacagccctggcagcgagctgagagatggcagcctgaatgatggcggcaacatggccctgaagcacacccccctgaagaccctgcccttcagccccagccagttcttcaacacctgccctggaaatgagcagctgaacatcgagaaccccagcttcaccagcacccccatctgtggccagaaggccctgatcaccacccccctgcacaaggagaccacccccaaggaccagaaggaaaatgtgggcttccgcacccccaccatcagaagaagcatcctgggcaccacccccaggacccccacccccttcaagaatgccctggccgcccaggagaagaagtatggccccctgaagatcgtgtcccagcccctggccttcctggaggaggacatccgggaggtgctgaaggaggagactggaacagacctcttcctgaaggaggaggatgagcccgcctacaagagctgcaagcaggagaacacagccagcggcaagaaggtgaggaagagcctggtgctggacaactgggagaaggaggagagcggcacccagctgctgacagaggacatcagtgacatgcagagcgagaaccgcttcaccaccagcctgctgatgatccccctgctggagatccatgacaaccgctgcaacctgatccctgagaagcaggacatcaacagcaccaacaagacctacaccctgaccaagaagaagcccaaccccaacaccagcaaggtggtgaagctggagaagaacctgcagagcaactgtgagtgggagaccgtggtgtatggcaagacagaggaccagctgatcatgacagagcaggcccggcgctacctgagcacctacacagccaccagcagcaccagccgggccctgatcctgtag

SEQ ID NO: 22481 - DNA, 2079 bp, synthetic construct
  misc_feature 1..2079: note = Description of Artificial Sequence: Synthetic coding sequence
  source 1..2079: mol_type = other DNA
atggccaagaggagccgctcagaagatgaagatgatgacctgcagtatgctgaccatgactatgaggtgccccagcagaagggcctgaagaagctgtggaacagagtgaagtggaccagagatgaagatgacaagctgaagaagctggtggagcagcacggcacagatgactggaccctgattgccagccacctgcagaacagaagtgacttccagtgccagcaccgctggcagaaggtgctgaaccctgagctgatcaagggcccctggaccaaggaggaggaccagagggtgattgagctggtgcagaagtatggccccaagcgctggagcctgattgccaagcacctgaagggcagaattggcaagcagtgccgggagcgctggcacaaccacctgaaccctgaggtgaagaagagctcctggacagaggaggaggaccgcatcatctatgaggcccacaagaggctgggcaaccgctgggccgagatcgccaagctgctgcccggccgcacagacaacagcatcaagaaccactggaacagcaccatgaggaggaaggtggagcaggagggctacctgcaggacggcatcaagtctgagaggagcagcagcaagctgcagcacaagccctgtgccgccatggaccacatgcagacccagaaccagttctacatccctgtgcagatccctggctaccagtatgtgtccccagagggcaactgcattgaacatgtgcagcccaccagcgccttcatccagcagcccttcattgatgaggaccctgacaaggagaagaagatcaaggagctggagatgctgctgatgtctgcagaaaatgaggtgcggaggaagaggatccccagccagcccggcagcttcagctcctggagcggcagcttcctgatggatgacaacatgagcaacaccctgaacagcctggatgagcacaccagcgagttctacagcatggatgagaaccagcctgtgtctgcccagcagaacagccccaccaagttcctggccgtggaggccaatgctgtgctgagcagcctgcagaccatccctgagtttgctgagaccctggagctgattgaaagtgaccctgtggcctggagcgatgtgaccagctttgacatcagtgatgctgctgccagccccatcaagagcacccctgtgaagctgatgaggatccagcacaatgaaggagccatggagtgccagttcaacgtgtccctggtgctggagggcaagaagaacacctgcaatggaggcaacagcgaggccgtgcccctgaccagccccaacatcgccaagttcagcaccccaccagccatcctgaggaagaagaggaagatgagggtgggccacagccctggcagcgagctgagagatggcagcctgaatgatggcggcaacatggccctgaagcacacccccctgaagaccctgcccttcagccccagccagttcttcaacacctgccctggaaatgagcagctgaacatcgagaaccccagcttcaccagcacccccatctgtggccagaaggccctgatcaccacccccctgcacaaggagaccacccccaaggaccagaaggaaaatgtgggcttccgcacccccaccatcagaagaagcatcctgggcaccacccccaggacccccacccccttcaagaatgccctggccgcccaggagaagaagtatggccccctgaagatcgtgtcccagcccctggccttcctggaggaggacatccgggaggtgctgaaggaggagactggaacagacctcttcctgaaggaggaggatgagcccgcctacaagagctgcaagcaggagaacacagccagcggcaagaaggtgaggaagagcctggtgctggacaactgggagaaggaggagagcggcacccagctgctgacagaggacatcagtgacatgcagagcaactgtgagtgggagaccgtggtgtatggcaagacagaggaccagctgatcatgacagagcaggcccggcgctacctgagcacctacacagccaccagcagcaccagccgggccctgatcctgtag

SEQ ID NO: 22482 - DNA, 711 bp, synthetic construct
  misc_feature 1..711: note = Description of Artificial Sequence: Synthetic coding sequence
  source 1..711: mol_type = other DNA
atgtgtgtgtgtgccggctgcagagctgcccccagcagaagaggagctggccccctgcaggtggccggcggctggagcgagggcgctgacatggactatgacagctaccagcactacttctatgactatgactgtggggaggacttctaccgcagcacagcccccagcgaggacatctggaagaagtttgagctggtgcccagcccccccaccagccccccctggggcctgggccctggagctggggaccctgcccctggcatcggccccccagagccctggccaggcggctgcacaggagatgaagctgagagccggggccacagcaagggctggggcaggaactatgccagcatcatcagaagagactgcatgtggagcggcttcagcgcccgggagcggctggagagagctgtgtctgaccggctggcccctggggccccccggggcaacccccccaaggccagcgctgccccagactgcacccccagcctggaggccggcaacccagccccagctgccccctgccccctgggggagcccaagacccaggcctgcagcggcagcgagagccccagcgacagcggcaaggacctgcctgagcccagcaagaggggcccccctcatggctggcccaagctgtgcccctgcctgcggagcggcatcggcagcagccaggccctgggccccagcccccccctgtttggatag

SEQ ID NO: 22483 - DNA, 1095 bp, synthetic construct
  misc_feature 1..1095: note = Description of Artificial Sequence: Synthetic coding sequence
  source 1..1095: mol_type = other DNA
atggactatgacagctaccagcactacttctatgactatgactgtggggaggacttctaccgcagcacagcccccagcgaggacatctggaagaagtttgagctggtgcccagcccccccaccagccccccctggggcctgggccctggagctggggaccctgcccctggcatcggccccccagagccctggccaggcggctgcacaggagatgaagctgagagccggggccacagcaagggctggggcaggaactatgccagcatcatcagaagagactgcatgtggagcggcttcagcgcccgggagcggctggagagagctgtgtctgaccggctggcccctggggccccccggggcaacccccccaaggccagcgctgccccagactgcacccccagcctggaggccggcaacccagccccagctgccccctgccccctgggggagcccaagacccaggcctgcagcggcagcgagagccccagcgacagtgaaaatgaggagattgatgtggtgacagtggagaagaggcagagcctgggcatcaggaagcctgtgaccatcaccgtgcgggctgaccccctggacccctgcatgaagcacttccacatcagcatccaccagcagcagcacaactatgctgcccgcttccccccagagagctgcagccaggaggaggccagcgagcggggcccccaggaggaggtgctggagagagatgctgctggggagaaggaggatgaggaggatgaggagatcgtgtccccacctcctgtggagagcgaggccgcccagagctgccaccccaagcctgtgtccagtgacacagaagatgtgaccaagaggaagaaccacaacttcctggagaggaagagaagaaatgacctgcggagccgcttcctggccctgcgggaccaggtgcccaccctggccagctgcagcaaggcccccaaggtggtgatcctgagcaaggccctggagtacctgcaggccctggtgggcgctgagaagaggatggccacagagaagaggcagctgcgctgccggcagcagcagctgcagaagagaattgcctacctgaccggctactag

SEQ ID NO: 22484 - DNA, 1185 bp, synthetic construct
  misc_feature 1..1185: note = Description of Artificial Sequence: Synthetic coding sequence
  source 1..1185: mol_type = other DNA
atgtgtgtgtgtgccggctgcagagctgcccccagcagaagaggagctggccccctgcaggtggccggcggctggagcgagggcgctgacatggactatgacagctaccagcactacttctatgactatgactgtggggaggacttctaccgcagcacagcccccagcgaggacatctggaagaagtttgagctggtgcccagcccccccaccagccccccctggggcctgggccctggagctggggaccctgcccctggcatcggccccccagagccctggccaggcggctgcacaggagatgaagctgagagccggggccacagcaagggctggggcaggaactatgccagcatcatcagaagagactgcatgtggagcggcttcagcgcccgggagcggctggagagagctgtgtctgaccggctggcccctggggccccccggggcaacccccccaaggccagcgctgccccagactgcacccccagcctggaggccggcaacccagccccagctgccccctgccccctgggggagcccaagacccaggcctgcagcggcagcgagagccccagcgacagtgaaaatgaggagattgatgtggtgacagtggagaagaggcagagcctgggcatcaggaagcctgtgaccatcaccgtgcgggctgaccccctggacccctgcatgaagcacttccacatcagcatccaccagcagcagcacaactatgctgcccgcttccccccagagagctgcagccaggaggaggccagcgagcggggcccccaggaggaggtgctggagagagatgctgctggggagaaggaggatgaggaggatgaggagatcgtgtccccacctcctgtggagagcgaggccgcccagagctgccaccccaagcctgtgtccagtgacacagaagatgtgaccaagaggaagaaccacaacttcctggagaggaagagaagaaatgacctgcggagccgcttcctggccctgcgggaccaggtgcccaccctggccagctgcagcaaggcccccaaggtggtgatcctgagcaaggccctggagtacctgcaggccctggtgggcgctgagaagaggatggccacagagaagaggcagctgcgctgccggcagcagcagctgcagaagagaattgcctacctgaccggctactag

SEQ ID NO: 22485 - DNA, 621 bp, synthetic construct
  misc_feature 1..621: note = Description of Artificial Sequence: Synthetic coding sequence
  source 1..621: mol_type = other DNA
atggactatgacagctaccagcactacttctatgactatgactgtggggaggacttctaccgcagcacagcccccagcgaggacatctggaagaagtttgagctggtgcccagcccccccaccagccccccctggggcctgggccctggagctggggaccctgcccctggcatcggccccccagagccctggccaggcggctgcacaggagatgaagctgagagccggggccacagcaagggctggggcaggaactatgccagcatcatcagaagagactgcatgtggagcggcttcagcgcccgggagcggctggagagagctgtgtctgaccggctggcccctggggccccccggggcaacccccccaaggccagcgctgccccagactgcacccccagcctggaggccggcaacccagccccagctgccccctgccccctgggggagcccaagacccaggcctgcagcggcagcgagagccccagcgacagcggcaaggacctgcctgagcccagcaagaggggcccccctcatggctggcccaagctgtgcccctgcctgcggagcggcatcggcagcagccaggccctgggccccagcccccccctgtttggatag

SEQ ID NO: 22486 - DNA, 303 bp, synthetic construct
  misc_feature 1..303: note = Description of Artificial Sequence: Synthetic coding sequence
  source 1..303: mol_type = other DNA
atggactatgacagctaccagcactacttctatgactatgactgtggggaggacttctaccgcagcacagcccccagcgaggacatctggaagaagtttgagctggtgcccagcccccccaccagccccccctggggcctgggccctggagctggggaccctgcccctggcatcggccccccagagccctggccaggcggctgcacaggagatgaagctgagagccggggccacagcaagggctggggcaggaactatgccagcatcatcagaagagactgcatgtggagcggcttctcctag

SEQ ID NO: 22487 - DNA, 642 bp, synthetic construct
  misc_feature 1..642: note = Description of Artificial Sequence: Synthetic coding sequence
  source 1..642: mol_type = other DNA
atgcccaggagagctgagaactgggatgaagctgaggtgggcgctgaggaggccggcgtggaggagtatggcccagaagaagatggaggagaggagagcggggctgaggagagcggccctgaggagagcggccctgaggagctgggcgctgaggaggagatggaggccggccggcccaggcctgtgctgcggtctgtgaacagccgggagcccagccaggtgatcttctgcaacagaagcccccgggtggtgctgcctgtgtggctgaactttgatggagagccccagccctaccccaccctgcccccaggcactggaagacgcatccacagctaccggggccacctgtggctgttcagagatgctggcacccatgatggcctgctggtgaaccagacagagctgtttgtgcccagcctgaatgtggatggccagcccatctttgccaacatcaccctgcctgtgtacaccctgaaggagcgctgcctgcaggtggtgcgcagcctggtgaagccagagaactaccgccgcctggacatcgtgcgcagcctgtatgaggacctggaggaccaccccaacgtgcagaaggacctggagcggctgacccaggagcgcatcgcccaccagaggatgggagactag

SEQ ID NO: 22488 - DNA, 519 bp, synthetic construct
  misc_feature 1..519: note = Description of Artificial Sequence: Synthetic coding sequence
  source 1..519: mol_type = other DNA
atgcccaggagagctgagaactgggatgaagctgaggtgggcgctgaggaggccggcgtggaggagtatggcccagaagaagatggaggagaggagagcggggctgaggagagcggccctgaggagagcggccctgaggagctgggcgctgaggaggagatggaggccggccggcccaggcctgtgctgcggtctgtgaacagccgggagcccagccaggtgatcttctgcaacagaagcccccgggtggtgctgcctgtgtggctgaactttgatggagagccccagccctaccccaccctgcccccaggcactggaagacgcatccacagctacagagtgtacaccctgaaggagcgctgcctgcaggtggtgcgcagcctggtgaagccagagaactacagaaggctggacatcgtgcgcagcctgtatgaggacctggaggaccaccccaacgtgcagaaggacctggagcggctgacccaggagagaattgcccaccagaggatgggagactag

SEQ ID NO: 22489 - DNA, 396 bp, synthetic construct
  misc_feature 1..396: note = Description of Artificial Sequence: Synthetic coding sequence
  source 1..396: mol_type = other DNA
atgcccaggagagctgagaactgggatgaagctgaggtgggcgctgaggaggccggcgtggaggagtatggcccagaagaagattcctaccggggccacctgtggctgttcagagatgctggcacccatgatggcctgctggtgaaccagacagagctgtttgtgcccagcctgaatgtggatggccagcccatctttgccaacatcaccctgcctgtgtacaccctgaaggagcgctgcctgcaggtggtgcgcagcctggtgaagccagagaactaccgccgcctggacatcgtgcgcagcctgtatgaggacctggaggaccaccccaacgtgcagaaggacctggagcggctgacccaggagcgcatcgcccaccagaggatgggagactag

SEQ ID NO: 22490 - DNA, 1281 bp, synthetic construct
  misc_feature 1..1281: note = Description of Artificial Sequence: Synthetic coding sequence
  source 1..1281: mol_type = other DNA
atggtgcacttctgtggcctgctgaccctgcaccgggagcctgtgcccctgaagagcatctctgtgtctgtgaacatctatgaatttgtggccggcgtgtctgccaccctgaactatgaaaatgaggagaaggtgcccctggaggccttctttgtgttccccatggatgaagattctgctgtgtacagctttgaggccctggtggatggcaagaagatcgtggccgagctgcaggacaagatgaaggcccggaccaactatgagaaggccatcagccagggccaccaggccttcctgctggagggggacagcagcagcagagatgtgttcagctgcaatgtgggcaacctgcagcccggcagcaaggctgctgtgaccctgaagtatgtgcaggagctgcccctggaggctgatggagccctgcgctttgtgctgcctgctgtgctgaacccccgctaccagttcagcggcagcagcaaggacagctgcctgaatgtgaagacccccatcgtgcctgtggaggacctgccctacaccctgtccatggtggccaccatcgacagccagcacggcatcgagaaggtgcagagcaactgccccctgagccccacagagtacctgggggaggacaagaccagcgcccaggtgtccctggccgccggccacaagtttgacagagatgtggagctgctgatctactacaatgaggtgcacaccccatctgtggtgctggagatgggcatgcccaacatgaagccaggccacctgatgggagaccccagcgccatggtgtccttctaccccaacatccctgaggaccagcccagcaacacctgtggggagttcatcttcctgatggacagaagtggctccatgcagagccccatgagcagccaggacaccagccagctgcgcatccaggccgccaaggagaccctcatcctgctgctgaagagcctgcccatcggctgctacttcaacatctacggcttcggcagcagctatgaggcctgcttccctgagagcgtgaagtacacccagcagaccatggaggaggccctgggccgggtgaagctgatgcaggccgacctgggcggcacagagatcctggcccccctgcagaacatctaccggggccccagcatccctggccaccccctgcaggtgtttgagcggccctacaccctgactgtgctgctgctgcacctgagccctgagggcaacctgtgtgtgatccggcccaggcacagccgctggaccatcaccgtgtctgtgggctag

SEQ ID NO: 22491 - DNA, 2361 bp, synthetic construct
  misc_feature 1..2361: note = Description of Artificial Sequence: Synthetic coding sequence
  source 1..2361: mol_type = other DNA
atggtgcacttctgtggcctgctgaccctgcaccgggagcctgtgcccctgaagagcatctctgtgtctgtgaacatctatgaatttgtggccggcgtgtctgccaccctgaactatgaaaatgaggagaaggtgcccctggaggccttctttgtgttccccatggatgaagattctgctgtgtacagctttgaggccctggtggatggcaagaagatcgtggccgagctgcaggacaagatgaaggcccggaccaactatgagaaggccatcagccagggccaccaggccttcctgctggagggggacagcagcagcagagatgtgttcagctgcaatgtgggcaacctgcagcccggcagcaaggctgctgtgaccctgaagtatgtgcaggagctgcccctggaggctgatggagccctgcgctttgtgctgcctgctgtgctgaacccccgctaccagttcagcggcagcagcaaggacagctgcctgaatgtgaagacccccatcgtgcctgtggaggacctgccctacaccctgtccatggtggccaccatcgacagccagcacggcatcgagaaggtgcagagcaactgccccctgagccccacagagtacctgggggaggacaagaccagcgcccaggtgtccctggccgccggccacaagtttgacagagatgtggagctgctgatctactacaatgaggtgcacaccccatctgtggtgctggagatgggcatgcccaacatgaagccaggccacctgatgggagaccccagcgccatggtgtccttctaccccaacatccctgaggaccagcccagcaacacctgtggggagttcatcttcctgatggacagaagtggctccatgcagagccccatgagcagccaggacaccagccagctgcgcatccaggccgccaaggagaccctcatcctgctgctgaagagcctgcccatcggctgctacttcaacatctacggcttcggcagcagctatgaggcctgcttccctgagagcgtgaagtacacccagcagaccatggaggaggccctgggccgggtgaagctgatgcaggccgacctgggcggcacagagatcctggcccccctgcagaacatctaccggggccccagcatccctggccaccccctgcagctgtttgtgttcacagatggagaggtgacagacaccttcagcgtcatcaaggaggtgcgcatcaaccggcagaagcaccgctgcttctcctttggaattggagagggcaccagcaccagcctcatcaagggcatcgcccgggccagcggcggcaccagcgagttcatcaccgggaaggacaggatgcagagcaaggccctgcggaccctgaagaggagcctgcagcctgtggtggaggatgtgtccctgtcctggcacctgcccccaggcctgagcgccaagatgctgagccctgagcagaccgtcatcttccggggccagaggctcatctcctatgcccagctgaccggccgcatgcctgctgctgagaccactggagaggtgtgcctgaagtacaccctgcagggcaagacctttgaggacaaggtgaccttccccctgcagcccaagccagatgtgaacctgaccatccaccggctggccgccaagagcctgctgcagaccaaggacatgggcctgcgggagaccccagccagtgacaagaaggatgccctgaacctgagcctggagagcggggtcatcagcagcttcaccgccttcatcgccatcaacaaggagctgaacaagcctgtgcagggccccctggcccacagagatgtgccccggcccatcctgctgggcgccagcgcccccctgaagatcaagtgccagagcggcttcaggaaggccctgcacagcgacaggcctccttctgccagccagcccagaggagagctgatgtgctacaaggccaagaccttccagatggatgactacagcctgtgtggcctcatcagccacaaggaccagcacagccctggctttggagagaaccacctggtgcagctgatctaccaccagaatgccaacggctcctgggacctgaatgaagacctggccaagatcctgggcatgagcctggaggagatcatggccgcccagcctgctgagctggtggacagcagcggctgggccaccatcctggccgtcatctggctgcacagcaatggcaaggacctgaagtgtgagtgggagctgctggagaggaaggctgtggcctggatgagggcccacgccggcagcaccatgcccagcgtggtgaaggccgccatcaccttcctgaagagctctgtggaccctgccatctttgccttctag

SEQ ID NO: 22492 - DNA, 1248 bp, synthetic construct
  misc_feature 1..1248: note = Description of Artificial Sequence: Synthetic coding sequence
  source 1..1248: mol_type = other DNA
atggtgcacttctgtggcctgctgaccctgcaccgggagcctgtgcccctgaagagcatctctgtgtctgtgaacatctatgaatttgtggccggcgtgtctgccaccctgaactatgaaaatgaggagaaggtgcccctggaggccttctttgtgttccccatggatgaagattctgctgtgtacagctttgaggccctggtggatggcaagaagatcgtggccgagctgcaggacaagatgaaggcccggaccaactatgagaaggccatcagccagggccaccaggccttcctgctggagggggacagcagcagcagagatgtgttcagctgcaatgtgggcaacctgcagcccggcagcaaggctgctgtgaccctgaagtatgtgcaggagctgcccctggaggctgatggagccctgcgctttgtgctgcctgctgtgctgaacccccgctaccagttcagcggcagcagcaaggacagctgcctgaatgtgaagacccccatcgtgcctgtggaggacctgccctacaccctgtccatggtggccaccatcgacagccagcacggcatcgagaaggtgcagagcaactgccccctgagccccacagagtacctgggggaggacaagaccagcgcccaggtgtccctggccgccggccacaagtttgacagagatgtggagctgctgatctactacaatgaggtgcacaccccatctgtggtgctggagatgggcatgcccaacatgaagccaggccacctgatgggagaccccagcgccatggtgtccttctaccccaacatccctgaggaccagcccagcaacacctgtggggagttcatcttcctgatggacagaagtggctccatgcagagccccatgagcagccaggacaccagccagctgcgcatccaggccgccaaggagaccctcatcctgctgctgaagagcctgcccatcggctgctacttcaacatctacggcttcggcagcagctatgaggcctgcttccctgagagcgtgaagtacacccagcagaccatggaggaggccctgggccgggtgaagctgatgcaggccgacctgggcggcacagagatcctggcccccctgcagaacatctaccggggccccagcatccctggccaccccctgcagctgtttgtgttcacagatggagaggtgacagacaccttcagcgtcatcaaggaggtgcgcatcaaccggcagaagcacaggtag

SEQ ID NO: 22493 - DNA, 2361 bp, synthetic construct; identical to SEQ ID NO: 22491
  misc_feature 1..2361: note = Description of Artificial Sequence: Synthetic coding sequence
  source 1..2361: mol_type = other DNA

SEQ ID NO: 22494 - DNA, 1248 bp, synthetic construct; identical to SEQ ID NO: 22492
  misc_feature 1..1248: note = Description of Artificial Sequence: Synthetic coding sequence
  source 1..1248: mol_type = other DNA

SEQ ID NO: 22495 - DNA, 2301 bp, synthetic construct
  misc_feature 1..2301: note = Description of Artificial Sequence: Synthetic coding sequence
  source 1..2301: mol_type = other DNA
atggccgccctgagcggcggcggcggcggcggcgctgagcccggccaggccctcttcaacggggacatggagcctgaggccggggccggggccggggccgccgccagcagcgctgctgaccctgccatccctgaggaggtgtggaacatcaagcagatgatcaagctgacccaggagcacatcgaggccctgctggacaagtttggaggagagcacaacccccccagcatctacctggaggcctatgaggagtacaccagcaagctggatgccctgcagcagcgggagcagcagctgctggagagcctgggcaatggaacagacttctctgtgagcagcagcgcctccatggacacagtgaccagcagcagcagcagcagcctgtctgtgctgcccagcagcctgagcgtcttccagaaccccacagatgtggcccggagcaaccccaagagcccccagaagcccatcgtgcgggtcttcctgcccaacaagcagaggacagtggtgcctgcccgctgtggggtgacagtgcgggacagcctgaagaaggccctgatgatgaggggcctcatccctgagtgctgtgctgtgtaccgcatccaggatggagagaagaagcccatcggctgggacacagacatctcctggctgaccggggaggagctgcacgtggaggtgctggagaatgtgcccctgaccacccacaactttgtgaggaagaccttcttcaccctggccttctgtgacttctgcaggaagctgctcttccagggcttccgctgccagacctgtggctacaagttccaccagcgctgcagcacagaggtgcccctgatgtgtgtgaactatgaccagctggacctgctgtttgtgtccaagttctttgagcaccaccccatcccccaggaggaggccagcctggccgagacagccctgaccagcggcagcagccccagcgccccagccagtgacagcatcggcccccagatcctgaccagccccagccccagcaagagcatccccatcccccagcccttccggccagcagatgaggaccacaggaaccagtttggccagagggacaggagcagcagcgcccccaacgtgcacatcaacaccatcgagcctgtgaacattgatgacctgatccgggaccagggcttcagaggagatggcggcagcaccaccggcctgagcgccaccccaccagccagcctgcccggcagcctgaccaacgtgaaggccctgcagaagagccctggcccccagcgggagaggaagagcagcagcagcagtgaagatagaaacaggatgaagaccctgggcagaagagacagcagtgatgactgggagatcccagatggccagatcaccgtgggccagagaattggcagcggcagctttggcaccgtgtacaagggcaagtggcatggagatgtggccgtgaagatgctgaatgtgacagcccccaccccccagcagctgcaggccttcaagaatgaggtgggcgtgctgaggaagaccaggcatgtgaacatcctgctcttcatgggctacagcaccaagccccagctggccatcgtgacccagtggtgtgagggcagcagcctgtaccaccacctgcacatcatcgagaccaagtttgagatgatcaagctgattgacatcgcccggcagacagcccagggcatggactacctgcacgccaagagcatcatccaccgggacctgaagagcaacaacatcttcctgcacgaggacctgactgtgaagatcggggactttggcctggccaccgtgaagagccgctggagcggcagccaccagtttgagcagctgagcggcagcatcctgtggatggcccctgaggtgatccgcatgcaggacaagaacccctacagcttccagagtgatgtgtatgccttcggcatcgtgctgtatgagctgatgacaggccagctgccctacagcaacatcaacaacagagaccagatcatcttcatggtgggccggggctacctgagcccagacctgagcaaggtgcgcagcaactgccccaaggccatgaagaggctgatggctgaatgtctgaagaagaagagagatgagcggcccctcttcccccagatcctggccagcattgagctgctggcccggagcctgcccaagatccacaggtctgccagcgagcccagcctgaacagagctggcttccagacagaggacttcagcctgtatgcctgtgccagccccaagacccccatccaggccggcggctacggggccttccctgtgcactag

SEQ ID NO: 22496 - DNA, 1947 bp, synthetic construct
  misc_feature 1..1947: note = Description of Artificial Sequence: Synthetic coding sequence
  source 1..1947: mol_type = other DNA
atggagcacatccagggcgcctggaagaccatcagcaatggatttggcttcaaggatgctgtgtttgatggcagcagctgcatcagccccaccatcgtgcagcagtttggctaccagaggcgggccagtgatgatggcaagctgacagaccccagcaagaccagcaacaccatccgggtcttcctgcccaacaagcagaggacagtggtgaatgtgagaaatggcatgagcctgcatgactgcctgatgaaggccctgaaggtgcggggcctgcagcctgagtgctgtgctgtgttccggctgctgcacgagcacaagggcaagaaggcccggctggactggaacacagatgctgccagcctcatcggggaggagctgcaggtggacttcctggaccacgtgcccctgaccacccacaactttgccaggaagaccttcctgaagctggccttctgtgacatctgccagaagttcctgctgaatggcttccgctgccagacctgtggctacaagttccacgagcactgcagcaccaaggtgcccaccatgtgtgtggactggagcaacatccggcagctgctgctcttccccaacagcaccatcggggacagcggcgtgcctgccctgcccagcctgaccatgaggaggatgagggagagcgtgtccaggatgcctgtgagcagccagcaccgctacagcaccccccacgccttcaccttcaacaccagcagccccagcagcgagggcagcctgagccagaggcagaggagcaccagcacccccaacgtgcacatggtgtccaccaccctgcctgtggacagcaggatgattgaagatgccatccgcagccacagcgagagcgccagccccagcgccctgagcagcagccccaacaacctgagccccaccggctggagccagcccaagacccctgtgcctgcccagcgggagcgggcccctgtgtctggcacccaggagaagaacaagatccggccccggggccagagggacagcagctactactgggagattgaggccagcgaggtgatgctgagcaccagaattggcagcggcagctttggcaccgtgtacaagggcaagtggcatggagatgtggccgtgaagatcctgaaggtggtggaccccaccccagagcagttccaggccttcagaaatgaggtggccgtgctgaggaagaccaggcatgtgaacatcctgctcttcatgggctacatgaccaaggacaacctggccatcgtgacccagtggtgtgagggcagcagcctgtacaagcacctgcacgtgcaggagaccaagttccagatgttccagctgattgacatcgcccggcagacagcccagggcatggactacctgcacgccaagaacatcatccaccgggacatgaagagcaacaacatcttcctgcacgagggcctgactgtgaagatcggggactttggcctggccaccgtgaagagccgctggagcggcagccagcaggtggagcagcccaccggctctgtgctgtggatggcccctgaggtgatccgcatgcaggacaacaaccccttctccttccagagtgatgtgtacagctatggcatcgtgctgtatgagctgatgactggagagctgccctacagccacatcaacaacagagaccagatcatcttcatggtgggccggggctacgccagcccagacctgagcaagctgtacaagaactgccccaaggccatgaagaggctggtggccgactgtgtgaagaaggtgaaggaggagcggcccctcttcccccagatcctgagcagcattgagctgctgcagcacagcctgcccaagatcaacagaagtgccagcgagcccagcctgcaccgggccgcccacacagaggacatcaatgcctgcaccctgaccaccagcccccggctgcccgtcttctag

SEQ ID NO: 22497 - DNA, 2007 bp, synthetic construct
  misc_feature 1..2007: note = Description of Artificial Sequence: Synthetic coding sequence
  source 1..2007: mol_type = other DNA
atggagcacatccagggcgcctggaagaccatcagcaatggatttggcttcaaggatgctgtgtttgatggcagcagctgcatcagccccaccatcgtgcagcagtttggctaccagaggcgggccagtgatgatggcaagctgacagaccccagcaagaccagcaacaccatccgggtcttcctgcccaacaagcagaggacagtggtgaatgtgagaaatggcatgagcctgcatgactgcctgatgaaggccctgaaggtgcggggcctgcagcctgagtgctgtgctgtgttccggctgctgcacgagcacaagggcaagaaggcccggctggactggaacacagatgctgccagcctcatcggggaggagctgcaggtggacttcctggaccacgtgcccctgaccacccacaactttgccaggaagaccttcctgaagctggccttctgtgacatctgccagaagttcctgctgaatggcttccgctgccagacctgtggctacaagttccacgagcactgcagcaccaaggtgcccaccatgtgtgtggactggagcaacatccggcagctgctgctcttccccaacagcaccatcggggacagcggcgtgcctgccctgcccagcctgaccatgaggaggatgagggagagcgtgtccaggatgcctgtgagcagccagcaccgctacagcaccccccacgccttcaccttcaacaccagcagccccagcagcgagggcagcctgagccagaggcagaggagcaccagcacccccaacgtgcacatggtgtccaccaccctgcctgtggacagcaggatgattgagaacaacaacctgagcgccagcccccgggcctggagccgccgcttctgcctgcggggcagagatgccatccgcagccacagcgagagcgccagccccagcgccctgagcagcagccccaacaacctgagccccaccggctggagccagcccaagacccctgtgcctgcccagcgggagcgggcccctgtgtctggcacccaggagaagaacaagatccggccccggggccagagggacagcagctactactgggagattgaggccagcgaggtgatgctgagcaccagaattggcagcggcagctttggcaccgtgtacaagggcaagtggcatggagatgtggccgtgaagatcctgaaggtggtggaccccaccccagagcagttccaggccttcagaaatgaggtggccgtgctgaggaagaccaggcatgtgaacatcctgctcttcatgggctacatgaccaaggacaacctggccatcgtgacccagtggtgtgagggcagcagcctgtacaagcacctgcacgtgcaggagaccaagttccagatgttccagctgattgacatcgcccggcagacagcccagggcatggactacctgcacgccaagaacatcatccaccgggacatgaagagcaacaacatcttcctgcacgagggcctgactgtgaagatcggggactttggcctggccaccgtgaagagccgctggagcggcagccagcaggtggagcagcccaccggctctgtgctgtggatggcccctgaggtgatccgcatgcaggacaacaaccccttctccttccagagtgatgtgtacagctatggcatcgtgctgtatgagctgatgactggagagctgccctacagccacatcaacaacagagaccagatcatcttcatggtgggccggggctacgccagcccagacctgagcaagctgtacaagaactgccccaaggccatgaagaggctggtggccgactgtgtgaagaaggtgaaggaggagcggcccctcttcccccagatcctgagcagcattgagctgctgcagcacagcctgcccaagatcaacagaagtgccagcgagcccagcctgcaccgggccgcccacacagaggacatcaatgcctgcaccctgaccaccagcccccggctgcccgtcttctag

SEQ ID NO: 22498 - DNA, 1302 bp, synthetic construct
  misc_feature 1..1302: note = Description of Artificial Sequence: Synthetic coding sequence
  source 1..1302: mol_type = other DNA
atgtgtgtggactggagcaacatccggcagctgttcagccagcaccgctacagcacccctcatgccttcaccttcaacaccagcagccccagcagcgagggcagcctgagccagaggcagaggagcaccagcaccccaaatgtgcacatggtgtccaccaccctgcctgtggacagcaggatgattgaagatgccatccgcagccacagcgagagcgccagccccagcgccctgagcagcagccccaacaacctgagccccaccggctggagccagcccaagacccctgtgcctgcccagcgggagcgggcccctgtgtctggcacccaggagaagaacaagatccggccccggggccagagggacagcagctactactgggagattgaggccagcgaggtgatgctgagcacccgcatcggcagcggcagctttggaacagtgtacaagggcaagtggcatggagatgtggccgtgaagatcctgaaggtggtggaccccaccccagagcagttccaggccttcagaaatgaggtggccgtgctgaggaagaccaggcatgtgaacatcctgctcttcatgggctacatgaccaaggacaacctggccatcgtgacccagtggtgtgagggcagcagcctgtacaagcacctgcacgtgcaggagaccaagttccagatgttccagctgattgatattgcccggcagacagcccagggcatggactacctgcacgccaagaacatcatccaccgggacatgaagagcaacaacatcttcctgcacgagggcctgactgtgaagattggagactttggcctggccaccgtgaagagccgctggagcggcagccagcaggtggagcagcccactggatctgtgctgtggatggcccctgaggtgatccgcatgcaggacaacaaccccttctccttccagagtgatgtgtacagctatggaattgtgctgtatgagctgatgaccggggagctgccctacagccacatcaacaacagagaccagatcatcttcatggtgggccggggctacgccagcccagacctgagcaagctgtacaagaactgccccaaggccatgaagaggctggtggccgactgtgtgaagaaggtgaaggaggagcggcccctcttcccccagatcctgagcagcattgagctgctgcagcacagcctgcccaagatcaacagaagtgccagcgagcccagcctgcacagagctgcccacacagaggacatcaatgcctgcaccctgaccaccagcccccggctgcctgtgttctag

SEQ ID NO: 22499 - DNA, 1704 bp, synthetic construct
  misc_feature 1..1704: note = Description of Artificial Sequence: Synthetic coding sequence
  source 1..1704: mol_type = other DNA
atgatggccaacagccagatcctgctgcggcaggccaccctgtctgtgttcagctgcaggaccagcaaggagcagtgcaagaaggcccggctggactggaacacagatgctgccagcctgattggagaggagctgcaggtggacttcctggaccacgtgcccctgaccacccacaactttgccaggaagaccttcctgaagctggccttctgtgacatctgccagaagttcctgctgaatggcttccgctgccagacctgtggctacaagttccacgagcactgcagcaccaaggtgcccaccatgtgtgtggactggagcaacatccggcagctgctgctcttccccaacagcaccatcggggacagcggcgtgcctgccctgcccagcctgaccatgaggaggatgagggagagcgtgtccaggatgcctgtgagcagccagcaccgctacagcacccctcatgccttcaccttcaacaccagcagccccagcagcgagggcagcctgagccagaggcagaggagcaccagcaccccaaatgtgcacatggtgtccaccaccctgcctgtggacagcaggatgattgaagatgccatccgcagccacagcgagagcgccagccccagcgccctgagcagcagccccaacaacctgagccccaccggctggagccagcccaagacccctgtgcctgcccagcgggagcgggcccctgtgtctggcacccaggagaagaacaagatccggccccggggccagagggacagcagctactactgggagattgaggccagcgaggtgatgctgagcacccgcatcggcagcggcagctttggaacagtgtacaagggcaagtggcatggagatgtggccgtgaagatcctgaaggtggtggaccccaccccagagcagttccaggccttcagaaatgaggtggccgtgctgaggaagaccaggcatgtgaacatcctgctcttcatgggctacatgaccaaggacaacctggccatcgtgacccagtggtgtgagggcagcagcctgtacaagcacctgcacgtgcaggagaccaagttccagatgttccagctgattgatattgcccggcagacagcccagggcatggactacctgcacgccaagaacatcatccaccgggacatgaagagcaacaacatcttcctgcacgagggcctgactgtgaagattggagactttggcctggccaccgtgaagagccgctggagcggcagccagcaggtggagcagcccactggatctgtgctgtggatggcccctgaggtgatccgcatgcaggacaacaaccccttctccttccagagtgatgtgtacagctatggaattgtgctgtatgagctgatgaccggggagctgccctacagccacatcaacaacagagaccagatcatcttcatggtgggccggggctacgccagcccagacctgagcaagctgtacaagaactgccccaaggccatgaagaggctggtggccgactgtgtgaagaaggtgaaggaggagcggcccctcttcccccagatcctgagcagcattgagctgctgcagcacagcctgcccaagatcaacagaagtgccagcgagcccagcctgcacagagctgcccacacagaggacatcaatgcctgcaccctgaccaccagcccccggctgcctgtgttctag

SEQ ID NO: 22500 - DNA, 1611 bp, synthetic construct
  misc_feature 1..1611: note = Description of Artificial Sequence: Synthetic coding sequence
  source 1..1611: mol_type = other DNA
atgggcagcaacaagagcaagcccaaggatgccagccagaggagaagaagcctggagccagcagaaaatgtgcatggagctgggggcggggccttccctgccagccagacccccagcaagccagccagcgcagatggccaccggggccccagcgctgcctttgccccagctgctgctgagcccaagctgtttggaggcttcaacagcagtgacacagtgaccagcccccagagagctggccccctggccggcggcgtgaccacctttgtggccctgtatgactatgagagcaggacagaaacagacctgtccttcaagaagggggagcggctgcagatcgtgaacaacacagaaggagactggtggctggcccacagcctgagcacaggccagacaggctacatccccagcaactacgtggcccccagcgacagcatccaggccgaggagtggtactttgggaagatcacccggcgggagagcgagcggctgctgctgaatgctgagaacccccggggcaccttcctggtgcgggagagcgagaccaccaagggggcctactgcctgtctgtgtctgactttgacaatgccaagggcctgaatgtgaagcactacaagatcaggaagctggacagcggcggcttctacatcaccagcaggacccagttcaacagcctgcagcagctggtggcctactacagcaagcatgctgatggcctgtgccaccggctgaccaccgtgtgccccaccagcaagccccagacccagggcctggccaaggatgcctgggagatcccccgggagagcctgcggctggaggtgaagctgggccagggctgctttggagaggtgtggatgggcacctggaatggcaccaccagggtggccatcaagaccctgaagccaggcaccatgagccctgaggccttcctgcaggaggcccaggtgatgaagaagctgcggcatgagaagctggtgcagctgtatgctgtggtgtctgaggagcccatctacatcgtgacagagtacatgagcaagggcagcctgctggacttcctgaagggggagaccgggaagtacctgcggctgccccagctggtggacatggccgcccagatcgccagcggcatggcctacgtggagaggatgaactacgtgcaccgggacctgcgggccgccaacatcctggtgggggagaacctggtgtgcaaggtggccgactttggcctggcccggctgattgaagataatgagtacacagcccggcagggcgccaagttccccatcaagtggacagcccctgaggccgccctgtatggccgcttcaccatcaagagtgatgtgtggagctttggcatcctgctgacagagctgaccaccaagggccgggtgccctacccaggcatggtgaaccgggaggtgctggaccaggtggagcggggctacaggatgccctgccccccagaatgtcctgagagcctgcatgacctgatgtgccagtgctggaggaaggagcctgaggagcggcccacctttgagtacctgcaggccttcctggaggactacttcaccagcacagagccccagtaccagcccggggagaacctgtag

SEQ ID NO: 22501 - DNA, 1629 bp, synthetic construct
  misc_feature 1..1629: note = Description of Artificial Sequence: Synthetic coding sequence
  source 1..1629: mol_type = other DNA
atgggcagcaacaagagcaagcccaaggatgccagccagaggagaagaagcctggagccagcagaaaatgtgcatggagctgggggcggggccttccctgccagccagacccccagcaagccagccagcgcagatggccaccggggccccagcgctgcctttgccccagctgctgctgagcccaagctgtttggaggcttcaacagcagtgacacagtgaccagcccccagagagctggccccctggccggcggcgtgaccacctttgtggccctgtatgactatgagagcaggacagaaacagacctgtccttcaagaagggggagcggctgcagatcgtgaacaacaccaggaaggtggatgtgcgggagggggactggtggctggcccacagcctgagcacaggccagacaggctacatccccagcaactacgtggcccccagcgacagcatccaggccgaggagtggtactttgggaagatcacccggcgggagagcgagcggctgctgctgaatgctgagaacccccggggcaccttcctggtgcgggagagcgagaccaccaagggggcctactgcctgtctgtgtctgactttgacaatgccaagggcctgaatgtgaagcactacaagatcaggaagctggacagcggcggcttctacatcaccagcaggacccagttcaacagcctgcagcagctggtggcctactacagcaagcatgctgatggcctgtgccaccggctgaccaccgtgtgccccaccagcaagccccagacccagggcctggccaaggatgcctgggagatcccccgggagagcctgcggctggaggtgaagctgggccagggctgctttggagaggtgtggatgggcacctggaatggcaccaccagggtggccatcaagaccctgaagccaggcaccatgagccctgaggccttcctgcaggaggcccaggtgatgaagaagctgcggcatgagaagctggtgcagctgtatgctgtggtgtctgaggagcccatctacatcgtgacagagtacatgagcaagggcagcctgctggacttcctgaagggggagaccgggaagtacctgcggctgccccagctggtggacatggccgcccagatcgccagcggcatggcctacgtggagaggatgaactacgtgcaccgggacctgcgggccgccaacatcctggtgggggagaacctggtgtgcaaggtggccgactttggcctggcccggctgattgaagataatgagtacacagcccggcagggcgccaagttccccatcaagtggacagcccctgaggccgccctgtatggccgcttcaccatcaagagtgatgtgtggagctttggcatcctgctgacagagctgaccaccaagggccgggtgccctacccaggcatggtgaaccgggaggtgctggaccaggtggagcggggctacaggatgccctgccccccagaatgtcctgagagcctgcatgacctgatgtgccagtgctggaggaaggagcctgaggagcggcccacctttgagtacctgcaggccttcctggaggactacttcaccagcacagagccccagtaccagcccggggagaacctgtag

SEQ ID NO: 22502 - DNA, 1611 bp, synthetic construct; identical to SEQ ID NO: 22500
  misc_feature 1..1611: note = Description of Artificial Sequence: Synthetic coding sequence
  source 1..1611: mol_type = other DNA

SEQ ID NO: 22503 - DNA, 1611 bp, synthetic construct; identical to SEQ ID NO: 22500
  misc_feature 1..1611: note = Description of Artificial Sequence: Synthetic coding sequence
  source 1..1611: mol_type = other DNA

SEQ ID NO: 22504 - DNA, 1611 bp, synthetic construct; identical to SEQ ID NO: 22500
  misc_feature 1..1611: note = Description of Artificial Sequence: Synthetic coding sequence
  source 1..1611: mol_type = other DNA

SEQ ID NO: 22505 - DNA, 423 bp, synthetic construct
  misc_feature 1..423: note = Description of Artificial Sequence: Synthetic coding sequence
  source 1..423: mol_type = other DNA
atgcccctggtgaagaggaacatcgaccccaggcacctgtgccacacagccctgccccggggcatcaagaatgagctggagtgtgtgaccaacatcagcctggccaacatcatccggcagctgagcagcctgagcaaatatgcagaggacatctttggagagctgttcaatgaggcccacagcttctccttccgggtgaacagcctgcaggagcgggtggaccggctgtctgtgtctgtgacccagctggaccccaaggaggaggagctgagcctgcaggacatcaccatgaggaaggccttccgcagcagcaccatccaggaccagcagctgtttgacaggaagaccctgcccatccccctgcaggagacctatgatgtgtgtgagcagcccccacccctgaacatcctgaccccctactag

SEQ ID NO: 22506 - DNA, 1680 bp, synthetic construct
  misc_feature 1..1680: note = Description of Artificial Sequence: Synthetic coding sequence
  source 1..1680: mol_type = other DNA
atgcccctggtgaagaggaacatcgaccccaggcacctgtgccacacagccctgccccggggcatcaagaatgagctggagtgtgtgaccaacatcagcctggccaacatcatccggcagctgagcagcctgagcaaatatgcagaggacatctttggagagctgttcaatgaggcccacagcttctccttccgggtgaacagcctgcaggagcgggtggaccggctgtctgtgtctgtgacccagctggaccccaaggaggaggagctgagcctgcaggacatcaccatgaggaaggccttccgcagcagcaccatccaggaccagcagctgtttgacaggaagaccctgcccatccccctgcaggagacctatgatgtgtgtgagcagcccccacccctgaacatcctgaccccctacagagatgatggcaaggagggcctgaagttctacaccaaccccagctacttctttgacctgtggaaggagaagatgctgcaggacacagaggacaagaggaaggagaagaggaagcagaagcagaagaacctggaccggccccatgagcctgagaaggtgccccgggcccctcatgacagaagaagagagtggcagaagctggcccagggccctgagctggctgaagatgatgccaacctgctgcacaagcacatcgaggtggccaatggacctgccagccactttgagacccggccccagacctacgtggaccacatggatggcagctacagcctgagcgccctgcccttcagccagatgtctgagctgctgaccagggctgaggagcgggtgctggtgcggccccatgagcccccacctcctccacccatgcatggagctggagatgccaagcccatccccacctgcatcagcagcgccaccggcctgattgaaaatcggccccagagccctgccactggaagaacacctgtgtttgtgagccccaccccacctcctcctcctccacccctgcccagcgccctgagcaccagcagcctgcgggcctccatgaccagcaccccacctcctcctgtgcccccacctcctcctcctccagccacagccctgcaggccccagctgtgcccccacctccagcccccctgcagatcgcccctggggtgctgcacccagcccccccacccatcgccccacccctggtgcagcccagcccccctgtggcccgggccgcccctgtgtgtgaaacagtgcctgtgcaccccctgccccagggcgaggtgcagggcctgcccccacctcctcctcctccacccctgcccccacctggcatccggcccagcagccctgtgacagtgacagccctggcccaccccccatctggcctgcaccccacccccagcacagcccctggcccccacgtgcccctgatgccacccagcccccccagccaggtgatcccagccagcgagcccaagaggcaccccagcaccctgcccgtcatcagtgatgcccggtctgtgctgctggaggccatcaggaagggcatccagctgaggaaggtggaggagcagcgggagcaggaggccaagcatgaaagaattgaaaatgatgtggccaccatcctgagcagaagaattgctgtggagtacagcgacagtgaagatgacagcgagtttgatgaggtggactggctggagtag

SEQ ID NO: 22507 - DNA, 423 bp, synthetic construct; identical to SEQ ID NO: 22505
  misc_feature 1..423: note = Description of Artificial Sequence: Synthetic coding sequence
  source 1..423: mol_type = other DNA

SEQ ID NO: 22508 - DNA, 1680 bp, synthetic construct; identical to SEQ ID NO: 22506
  misc_feature 1..1680: note = Description of Artificial Sequence: Synthetic coding sequence
  source 1..1680: mol_type = other DNA

SEQ ID NO: 22509 - DNA, 1680 bp, synthetic construct; identical to SEQ ID NO: 22506
  misc_feature 1..1680: note = Description of Artificial Sequence: Synthetic coding sequence
  source 1..1680: mol_type = other DNA

SEQ ID NO: 22510 - DNA, 1680 bp, synthetic construct; identical to SEQ ID NO: 22506
  misc_feature 1..1680: note = Description of Artificial Sequence: Synthetic coding sequence
  source 1..1680: mol_type = other DNA

SEQ ID NO: 22511 - DNA, 1680 bp, synthetic construct; identical to SEQ ID NO: 22506
  misc_feature 1..1680: note = Description of Artificial Sequence: Synthetic coding sequence
  source 1..1680: mol_type = other DNA

SEQ ID NO: 22512 - DNA, 270 bp, synthetic construct
  misc_feature 1..270: note = Description of Artificial Sequence: Synthetic coding sequence
  source 1..270: mol_type = other DNA
atgcccctggtgaagaggaacatcgaccccaggcacctgtgccacacagccctgccccggggcatcaagaatgagctggagtgtgtgaccaacatcagcctggccaacatcatccggcagctgagcagcctgagcaaatatgcagaggacatctttggagagctgttcaatgaggcccacagcttctccttccgggtgaacagcctgcaggagcgggtggaccggctgtctgtgtctgtgacccagctggaccccaaggaggaggagtag

SEQ ID NO: 22513 - DNA, 543 bp, synthetic construct
  misc_feature 1..543: note = Description of Artificial Sequence: Synthetic coding sequence
  source 1..543: mol_type = other DNA
atgcccctggtgaagaggaacatcgaccccaggcacctgtgccacacagccctgccccggggcatcaagaatgagctggagtgtgtgaccaacatcagcctggccaacatcatccggcagctgagcagcctgagcaaatatgcagaggacatctttggagagctgttcaatgaggcccacagcttctccttccgggtgaacagcctgcaggagcgggtggaccggctgtctgtgtctgtgacccagctggaccccaaggaggaggagctgagcctgcaggacatcaccatgaggaaggccttccgcagcagcaccatccaggaccagcagctgtttgacaggaagaccctgcccatccccctgcaggagacctatgatgtgtgtgagcagcccccacccctgaacatcctgaccccctacagagatgatggcaaggagggcctgaagttctacaccaaccccagctacttctttgacctgtggaaggagaagatgctgcaggacacagaggacaagaggaaggagaagaggaagcagaagtag

SEQ ID NO: 22514 - DNA, 270 bp, synthetic construct; identical to SEQ ID NO: 22512
  misc_feature 1..270: note = Description of Artificial Sequence: Synthetic coding sequence
  source 1..270: mol_type = other DNA

SEQ ID NO: 22515 - DNA, 1497 bp, synthetic construct
  misc_feature 1..1497: note = Description of Artificial Sequence: Synthetic coding sequence
  source 1..1497: mol_type = other DNA
atgcccctggtgaccaggaacatcgagcccaggcacctgtgccggcagaccctgcccagcgtgcgctctgagctggagtgtgtgaccaacatcaccctggccaacgtcatccggcagctgggcagcctgagcaaatatgcagaggacatctttggagagctgttcacccaggccaacacctttgccagccgggtgagcagcctggccgagcgggtggaccggctgcaggtgaaggtgacccagctggaccccaaggaggaggaggtgtccctgcagggcatcaacaccaggaaggccttccgcagcagcaccatccaggaccagaagctgtttgacaggaacagcctgcctgtgcctgtgctggagacctacaacacctgtgacaccccaccacccctgaacaacctgaccccctacagagatgatggcaaggaggccctgaagttctacacagaccccagctacttctttgacctgtggaaggagaagatgctgcaggacaccaaggacatcatgaaggagaagaggaagcacaggaaggagaagaaggacaaccccaacagaggaaatgtgaaccccaggaagatcaagaccaggaaggaggagtgggagaagatgaagatgggccaggagtttgtggagagcaaggagaagctgggcaccagcggctacccacccaccctggtgtaccagaatggcagcatcggctgtgtggagaatgtggatgccagcagctacccacctccaccccagagcgacagcgccagcagccccagccccagcttcagcgaggacaacctgcccccacctcctgctgagttctcctaccctgtggacaaccagaggggcagcggcctggccggccccaagaggagctctgtggtgagccccagccaccccccaccagccccacccctgggcagccccccaggccccaagccaggctttgcccctcctccagcccctcctcctcctcctccacccatgattggcatccccccacctcctcctcctgtgggcttcggcagccctggcaccccacctccacccagcccccccagcttccccccccacccagactttgctgcccctcctcctcctcctcctcctcctgctgctgactaccccaccctgcccccaccacccctgagccagcccactggaggagcccctcctcctcctcctcctcctcctcctcctggccccccacctccacccttcaccggggctgatggccagcctgccatccccccacccctgagtgacaccaccaagcccaagagcagcctgcctgctgtgtctgatgcccggagtgacctgctgagcgccatccggcagggcttccagctgcggcgggtggaggagcagcgggagcaggagaagagagatgtggtgggcaatgatgtggccaccatcctgagcagaagaattgctgtggagtacagcgacagtgaagatgacagcagcgagtttgatgaagatgactggagcgactag

SEQ ID NO: 22516 - DNA, 846 bp, synthetic construct
  misc_feature 1..846: note = Description of Artificial Sequence: Synthetic coding sequence
  source 1..846: mol_type = other DNA
atgcccctggtgaccaggaacatcgagcccaggcacctgtgccggcagaccctgcccagcgtgcgctctgagctggagtgtgtgaccaacatcaccctggccaacgtcatccggcagctgggcagcctgagcaaatatgcagaggacatctttggagagctgttcacccaggccaacacctttgccagccgggtgagcagcctggccgagcgggtggaccggctgcaggtgaaggtgacccagctggaccccaaggaggaggaggtgtccctgcagggcatcaacaccaggaaggccttccgcagcagcaccatccaggaccagaagctgtttgacaggaacagcctgcctgtgcctgtgctggagacctacaacacctgtgacaccccaccacccctgaacaacctgaccccctacagagatgatggcaaggaggccctgaagttctacacagaccccagctacttctttgacctgtggaaggagaagatgctgcaggacaccaaggacatcatgaaggagaagaggaagcacaggaaggagaagaaggacaaccccaacagaggaaatgtgaaccccaggaagatcaagaccaggaaggaggagtgggagaagatgaagatgggccaggagtttgtggagagcaaggagaagctgggcaccagcggctacccacccaccctggtgtaccagaatggcagcatcggctgtgtggagaatgtggatgccagcagctacccacctccaccccagagcgacagcgccagcagccccagccccagcttcagcgaggacaacctgcccccacctcctgctgagttccgcttctctgctgcccagggctag

SEQ ID NO: 22517 - DNA, 1533 bp, synthetic construct
  misc_feature 1..1533: note = Description of Artificial Sequence: Synthetic coding sequence
  source 1..1533: mol_type = other DNA
atgcctgtgcccccacctccagcccctcctcctccacccacctttgccctggccaacacagagaagcccaccctgaacaagacagagcaggccggcagaaatgccctgctgagtgacatcagcaagggcaagaagctgaagaagacagtgaccaatgacagaagtgcccccatcctggacaagcccaagggagctggagctgggggcggcggcggcggctttggaggcggcggcggctttggaggcggcggcggcggcggcggcggcggcagctttggaggcggcggccccccaggcctgggcggcctcttccaggccggcatgcccaagctgcggagcacagccaacagagacaatgattctgggggcagccggccccccctgctgcccccaggcggccgcagcaccagcgccaagcccttcagccccccatctggccctggccgcttccctgtgcccagccctggccacaggagcggccccccagagccccagaggaacaggatgcccccacccaggccagatgtgggcagcaagccagacagcatccccccacctgtgcccagcaccccccggcccatccagagcagcccccacaacagaggcagcccccctgtgcctgggggcccccggcagcccagccctggccccaccccaccacccttccctggcaacagaggaacagccctgggcggcggcagcatccggcagagccccctgagcagcagcagccccttcagcaaccggccccccctgccccccacccccagccgggccctggatgacaagcccccacctcctcctcctcctgtgggcaaccggcccagcatccaccgggaggccgtgcccccacctccaccccagaacaacaagccccctgtgcccagcaccccccggcccagcgccagcagccaggcccctcctcctcctcctccacccagccggcccggccccccacccctgccccccagcagcagtggaaatgatgagaccccccggctgccccagaggaacctgagcctgagcagcagcaccccacccctgcccagccctggccgcagcggccccctgcccccaccacccagcgagaggcctcctcctcctgtgcgggaccccccaggccgcagcggccccctgcccccacctcctcctgtgtccagaaatggcagcaccagccgggccctgcctgccaccccccagctgcccagccgctctggagtggacagccccaggagcggcccccggccccccctgcccccagaccggcccagcgctggggcccctcctcctcctccacccagcaccagcatcagaaatggcttccaggacagcccctgtgaagatgagtgggagagccgcttctacttccaccccatcagtgacctgcccccacctgagccctacgtgcagaccaccaagagctaccccagcaagctggccagaaatgaaagccgcagcggcagcaacagaagagagcggggggccccacccctgccccccatcccccggccccccaagcaggccgctgagtag

SEQ ID NO: 22518 - DNA, 1512 bp, synthetic construct
  misc_feature 1..1512: note = Description of Artificial Sequence: Synthetic coding sequence
  source 1..1512: mol_type = other DNA
atgcctgtgcccccacctccagcccctcctcctccacccacctttgccctggccaacacagagaagcccaccctgaacaagacagagcaggccggcagaaatgccctgctgagtgacatcagcaagggcaagaagctgaagaagacagtgaccaatgacagaagtgcccccatcctggacaagcccaagggagctggagctgggggcggcggcggcggctttggaggcggcggcggctttggaggcggcggcggcggcggcggcggcggcagctttggaggcggcggccccccaggcctgggcggcctcttccaggccggcatgcccaagctgcggagcacagccaacagagacaatgattctgggggcagccggccccccctgctgcccccaggcggccgcagcaccagcgccaagcccttcagccccccatctggccctggccgcttccctgtgcccagccctggccacaggagcggccccccagagccccagaggaacaggatgcccccacccaggccagatgtgggcagcaagccagacagcatccccccacctgtgcccagcaccccccggcccatccagagcagcccccacaacagaggcagcccccctgtgcctgggggcccccggcagcccagccctggccccaccccaccacccttccctggcaacagaggaacagccctgggcggcggcagcatccggcagagccccctgagcagcagcagccccttcagcaaccggccccccctgccccccacccccagccgggccctggatgacaagcccccacctcctcctcctcctgtgggcaaccggcccagcatccaccgggaggccgtgcccccacctccaccccagaacaacaagccccctgtgcccagcaccccccggcccagcgccagcagccaggcccctcctcctcctcctccacccagccggcccggccccccacccctgccccccagcagcagtggaaatgatgagaccccccggctgccccagaggaacctgagcctgagcagcagcaccccacccctgcccagccctggccgcagcggccccctgcccccaccacccagcgagaggcctcctcctcctgtgcgggaccccccaggccgcagcggccccctgcccccacctcctcctgtgtccagaaatggcagcaccagccgggccctgcctgccaccccccagctgcccagccgctctggagtggacagccccaggagcggcccccggccccccctgcccccagaccggcccagcgctggggcccctcctcctcctccacccagcaccagcatcagaaatggcttccaggacagcccctgtgaagatgagtgggagagccgcttctacttccaccccatcagtgacctgcccccacctgagccctacgtgcagaccaccaagagctaccccagcaagctggccagaaatgaaagccgcagcggcagcaacagaagagagcggggggccccacccctgccccccatccccaggtag

SEQ ID NO: 22519 - DNA, 1512 bp, synthetic construct; identical to SEQ ID NO: 22518
  misc_feature 1..1512: note = Description of Artificial Sequence: Synthetic coding sequence
  source 1..1512: mol_type = other DNA

SEQ ID NO: 22520 - DNA, 1512 bp, synthetic construct; identical to SEQ ID NO: 22518
  misc_feature 1..1512: note = Description of Artificial Sequence: Synthetic coding sequence
  source 1..1512: mol_type = other DNA

SEQ ID NO: 22521 - DNA, 1080 bp, synthetic construct
  misc_feature 1..1080: note = Description of Artificial Sequence: Synthetic coding sequence
  source 1..1080: mol_type = other DNA
atgcctgtgcccccacctccagcccctcctcctccacccacctttgccctggccaacacagagaagcccaccctgaacaagacagagcaggccggcagaaatgccctgctgagtgacatcagcaagggcaagaagctgaagaagacagtgaccaatgacagaagtgcccccatcctggacaagcccaagggagctggagctgggggcggcggcggcggctttggaggcggcggcggctttggaggcggcggcggcggcggcggcggcggcagctttggaggcggcggccccccaggcctgggcggcctcttccaggccggcatgcccaagctgcggagcacagccaacagagacaatgattctgggggcagccggccccccctgctgcccccaggcggccgcagcaccagcgccaagcccttcagccccccatctggccctggccgcttccctgtgcccagccctggccacaggagcggccccccagagccccagaggaacaggatgcccccacccaggccagatgtgggcagcaagccagacagcatccccccacctgtgcccagcaccccccggcccatccagagcagcccccacaacagaggcagcccccctgtgcctgggggcccccggcagcccagccctggccccaccccacctcctcctcctcctgtgcgggaccccccaggccgcagcggccccctgcccccacctcctcctgtgtccagaaatggcagcaccagccgggccctgcctgccaccccccagctgcccagccgctctggagtggacagccccaggagcggcccccggccccccctgcccccagaccggcccagcgctggggcccctcctcctcctccacccagcaccagcatcagaaatggcttccaggacagcccctgtgaagatgagtgggagagccgcttctacttccaccccatcagtgacctgcccccacctgagccctacgtgcagaccaccaagagctaccccagcaagctggccagaaatgaaagccgcagcggcagcaacagaagagagcggggggccccacccctgccccccatccccaggtag

SEQ ID NO: 22522 - DNA, 1482 bp, synthetic construct
  misc_feature 1..1482: note = Description of Artificial Sequence: Synthetic coding sequence
  source 1..1482: mol_type = other DNA
atgcctgtgcccccacctccagcccctcctcctccacccacctttgccctggccaacacagagaagcccaccctgaacaagacagagcaggccggcagaaatgccctgctgagtgacatcagcaagggcaagaagctgaagaagacagtgaccaatgacagaagtgcccccatcctggacaagcccaagggagctggagctgggggcggcggcggcggctttggaggcggcggcggctttggaggcggcggcggcggcggcggcggcggcagctttggaggcggcggccccccaggcctgggcggcctcttccaggccggcatgcccaagctgcggagcacagccaacagagacaatgattctgggggcagccggccccccctgctgcccccaggcggccgcagcaccagcgccaagcccttcagccccccatctggccctggccgcttccctgtgcccagccctggccacaggagcggccccccagagccccagaggaacaggatgcccccacccaggccagatgtgggcagcaagccagacagcatccccccacctgtgcccagcaccccccggcccatccagagcagcccccacaacagaggcagcccccctgtgcctgggggcccccggcagcccagccctggccccaccccaccacccttccctggcaacagaggaacagccctgggcggcggcagcatccggcagagccccctgagcagcagcagccccttcagcaaccggccccccctgccccccacccccagccgggccctggatgacaagcccccacctcctcctcctcctgtgggcaaccggcccagcatccaccgggaggccgtgcccccacctccaccccagaacaacaagccccctgtgcccagcaccccccggcccagcgccagcagccaggcccctcctcctcctcctccacccagccggcccggccccccacccctgccccccagcagcagtggaaatgatgagaccccccggctgccccagaggaacctgagcctgagcagcagcaccccacccctgcccagccctggccgcagcggccccctgcccccaccacccagcgagaggcctcctcctcctgtgcgggaccccccaggccgcagcggccccctgcccccacctcctcctgtgtccagaaatggcagcaccagccgggccctgcctgccaccccccagctgcccagccgctctggagtggacagccccaggagcggcccccggccccccctgcccccagaccggcccagcgctggggcccctcctcctcctccacccagcaccagcatcagaaatggcttccaggacagcccctgtgaagatgagtgggagagccgcttctacttccaccccatcagtgacctgcccccacctgagccctacgtgcagaccaccaagagctaccccagcaagctggccagaaatgaaagccgctctgagtacttctgccagggcttctag

SEQ ID NO: 22523 - DNA, 303 bp, synthetic construct
  misc_feature 1..303: note = Description of Artificial Sequence: Synthetic coding sequence
  source 1..303: mol_type = other DNA
atgcctgtgcccccacctccagcccctcctcctccacccacctttgccctggccaacacagagaagcccaccctgaacaagacagagcaggccggcagaaatgccctgctgagtgacatcagcaagggcaagaagctgaagaagacagtgaccaatgacagaagtgcccccatcctggacaagcccaagggagctggagctgggggcggcggcggcggctttggaggcggcggcggctttggaggcggcggcggcggcggcggcggcggcagctttggaggcggcggccccccaggcctgtag

SEQ ID NO: 22524 - DNA, 1647 bp, synthetic construct
  misc_feature 1..1647: note = Description of Artificial Sequence: Synthetic coding sequence
  source 1..1647: mol_type = other DNA
atgaagaccctggagacccagcccctggccccagactgctgccccagcgaccaggaccctgccccagcccaccccagcccccacgccagccccatgaacaagaatgctgacagcgagctgatgcctcctcctcctgagcggggggaccccccccggctgagcccagaccctgtggccggcagcgctgtgtcccaggagctgcgggagggggaccctgtgtccctgagcacccccctggagacagaatttggcagccccagcgagctgagccccagaattgaggagcaggagctgtctgagaacaccagcctgcctgctgaggaggccaacggcagcctgtctgaggaggaggccaatggacctgagctgggcagcggcaaggccatggaggacaccagcggggagcctgctgctgaagatgaaggagacacagcctggaactacagcttcagccagctgccccgcttcctgagcggctcctggagcgagttcagcacccagcctgagaacttcctgaagggctgcaagtgggccccagatggcagctgcatcctgaccaacagcgctgacaacatcctgcgcatctacaacctgcccccagagctgtaccacgagggggagcaggtggagtatgcagagatggtgcctgtgctgaggatggtggagggggacaccatctatgactactgctggtacagcctgatgagcagcgcccagcctgacaccagctatgtggccagcagcagccgggagaaccccatccacatctgggatgccttcaccggggagctgcgggccagcttccgggcctacaaccacctggatgagctgacagctgcccacagcctgtgcttctccccagatggcagccagctgttctgtggcttcaacagaacagtgcgggtcttcagcacagcccggcccggccgggactgtgaggtgcgggccacctttgccaagaagcagggccagagcggcatcatcagctgcatcgccttctccccagcccagcccctgtatgcctgtggcagctatggccgcagcctgggcctgtatgcctgggatgatggcagccccctggccctgctgggcggccaccagggcggcatcacccacctgtgcttccacccagatggcaaccgcttcttcagcggggccaggaaggatgctgagctgctgtgctgggacctgcggcagagcggctaccccctgtggagcctgggccgggaggtgaccaccaaccagaggatctactttgacctggaccccaccggccagttcctggtgtctggcagcaccagcggggctgtgtctgtgtgggacacagatggccctggaaatgatggcaagccagagcctgtgctgtccttcctgccccagaaggactgcaccaatggagtgtccctgcaccccagcctgcccctgctggccacagccagcggccagagggtcttccctgagcccacagaaagtggagatgaaggagaggagctgggcctgcccctgctgagcaccaggcatgtgcacctggagtgccgcctgcagctgtggtggtgtggcggggccccagacagcagcatcccagatgaccaccagggcgagaagggccagggcggcacagagggcggcgtgggggagctgatctag

SEQ ID NO: 22525 - DNA, 1647 bp, synthetic construct; identical to SEQ ID NO: 22524
  misc_feature 1..1647: note = Description of Artificial Sequence: Synthetic coding sequence
  source 1..1647: mol_type = other DNA

SEQ ID NO: 22526 - DNA, 1647 bp, synthetic construct; identical to SEQ ID NO: 22524
  misc_feature 1..1647: note = Description of Artificial Sequence: Synthetic coding sequence
  source 1..1647: mol_type = other DNA

SEQ ID NO: 22527 - DNA, 567 bp, synthetic construct
  misc_feature 1..567: note = Description of Artificial Sequence: Synthetic coding sequence
  source 1..567: mol_type = other DNA
atgaagaccctggagacccagcccctggccccagactgctgccccagcgaccaggaccctgccccagcccagcctgacaccagctatgtggccagcagcagccgggagaaccccatccacatctgggatgccttcaccggggagctgcgggccagcttccgggcctacaaccacctggatgagctgacagctgcccacagcctgtgcttctccccagatggcagccagctgttctgtggcttcaacagaacagtgcgggtcttcagcacagcccggcccggccgggactgtgaggtgcgggccaccttcggcaagcacctgtgcctgcagggcagaagaagaggcaagggcacagccacctgcaccggggccttctgtgagcccggggccacctgtggcggcagccggcggcccctgtatggccctggcagccgctgcagccctgtgggccgcggggccaaccggctgcgggccggcaggaagcccagccagggccagcctgctggccagaggacagccagcttcctgaacagctaccctgtgtcctgtggggccttcggcctgtag

SEQ ID NO: 22528 - DNA, 1647 bp, synthetic construct; identical to SEQ ID NO: 22524
  misc_feature 1..1647: note = Description of Artificial Sequence: Synthetic coding sequence
  source 1..1647: mol_type = other DNA

SEQ ID NO: 22529 - DNA, 1299 bp, synthetic construct
  misc_feature 1..1299: note = Description of Artificial Sequence: Synthetic coding sequence
  source 1..1299: mol_type = other DNA
atggacacagagaagagcggcaagcgggagtttgatgtgcggcagaccccccaggtgaacatcaaccccttcaccccagacagcctgctgctgcacagcagcggccagtgcagaagaaggaagaggacctactggaatgacagctgtggggaggacatggaggccagtgactatgagctggaggatgagaccaggcctgccaagaggatcaccatcacagagagcaacatgaagagccgctacaccacagagttccacgagctggagaagattggcagcggggagtttggcagcgtcttcaagtgtgtgaagaggctggatggctgcatctatgccatcaagaggagcaagaagcccctggccggctctgtggatgagcagaatgccctgcgggaggtgtatgcccatgctgtgctgggccagcacagccacgtggtgcgctacttcagcgcctgggccgaggatgaccacatgctgatccagaatgagtactgcaatggaggcagcctggctgatgccatcagcgagaactaccgcatcatgagctacttcaaggaggccgagctgaaggacctgctgctgcaggtgggccggggcctgcgctacatccacagcatgagcctggtgcacatggacatcaagcccagcaacatcttcatcagcaggaccagcatccccaatgctgccagcgaggagggagatgaagatgactgggccagcaacaaggtgatgttcaagattggagacctgggccacgtgacccgcatcagcagcccccaggtggaggagggggacagccgcttcctggccaatgaggtgctgcaggagaactacacccacctgcccaaggctgacatctttgccctggccctgactgtggtgtgtgccgccggggctgagcccctgcccagaaatggagaccagtggcatgagatccggcagggccgcctgccccgcatcccccaggtgctgagccaggagttcacagagctgctgaaggtgatgatccacccagaccctgagcggcggcccagcgccatggccctggtgaagcacagcgtgctgctgagcgccagcaggaagtctgctgagcagctgcgcatcgagctgaatgctgagaagttcaagaacagcctgctgcagaaggagctgaagaaggcccagatggccaaggctgctgctgaggagcgggccctcttcacagacaggatggccaccaggagcaccacccagagcaacagaaccagccggctgattggcaagaagatgaacagatctgtgtccctgaccatctactag

SEQ ID NO: 22530 - DNA, 1941 bp, synthetic construct
  misc_feature 1..1941: note = Description of Artificial Sequence: Synthetic coding sequence
  source 1..1941: mol_type = other DNA
atgtccttcctgagccggcagcagcccccacctccaagaagagctggagctgcctgcaccctgcggcagaagctgatcttcagcccctgcagcgactgtgaggaggaggaggaggaggaggaggaggagggcagcggccacagcactggagaagattctgccttccaggagccagacagccccctgcccccagcccggagccccacagagcccggccctgagcggcggcgcagccctggccctgcccctggcagccctggagagctggaggaggacctgctgctgcccggggcctgccctggagcagatgaagctgggggcggcgctgagggggacagctgggaggaggagggcttcggcagcagcagccctgtgaagagccctgctgccccctacttcctgggcagcagcttcagccctgtgcgctgtggcggccctggagatgccagcccccggggctgtggggccaggagagctggggagggcagaagaagccccaggccagaccaccctggcaccccaccccacaagaccttcaggaagctgcggctgtttgacaccccccacacccccaagagcctgctgagcaaggcccggggcatcgacagcagctctgtgaagctgcggggcagcagcctcttcatggacacagagaagagcggcaagcgggagtttgatgtgcggcagaccccccaggtgaacatcaaccccttcaccccagacagcctgctgctgcacagcagcggccagtgcagaagaaggaagaggacctactggaatgacagctgtggggaggacatggaggccagtgactatgagctggaggatgagaccaggcctgccaagaggatcaccatcacagagagcaacatgaagagccgctacaccacagagttccacgagctggagaagattggcagcggggagtttggcagcgtcttcaagtgtgtgaagaggctggatggctgcatctatgccatcaagaggagcaagaagcccctggccggctctgtggatgagcagaatgccctgcgggaggtgtatgcccatgctgtgctgggccagcacagccacgtggtgcgctacttcagcgcctgggccgaggatgaccacatgctgatccagaatgagtactgcaatggaggcagcctggctgatgccatcagcgagaactaccgcatcatgagctacttcaaggaggccgagctgaaggacctgctgctgcaggtgggccggggcctgcgctacatccacagcatgagcctggtgcacatggacatcaagcccagcaacatcttcatcagcaggaccagcatccccaatgctgccagcgaggagggagatgaagatgactgggccagcaacaaggtgatgttcaagattggagacctgggccacgtgacccgcatcagcagcccccaggtggaggagggggacagccgcttcctggccaatgaggtgctgcaggagaactacacccacctgcccaaggctgacatctttgccctggccctgactgtggtgtgtgccgccggggctgagcccctgcccagaaatggagaccagtggcatgagatccggcagggccgcctgccccgcatcccccaggtgctgagccaggagttcacagagctgctgaaggtgatgatccacccagaccctgagcggcggcccagcgccatggccctggtgaagcacagcgtgctgctgagcgccagcaggaagtctgctgagcagctgcgcatcgagctgaatgctgagaagttcaagaacagcctgctgcagaaggagctgaagaaggcccagatggccaaggctgctgctgaggagcgggccctcttcacagacaggatggccaccaggagcaccacccagagcaacagaaccagccggctgattggcaagaagatgaacagatctgtgtccctgaccatctactag

SEQ ID NO: 22531 - DNA, 1554 bp, synthetic construct
  misc_feature 1..1554: note = Description of Artificial Sequence: Synthetic coding sequence
  source 1..1554: mol_type = other DNA
ctgcaggaccctgccagcacctgtgtgcctgagcccgccagccagcacaccctgcggagcggccctggctgcctgcagcagcctgagcagcagggcgtgcgggaccccggcggcatctgggccaagctgggcgctgctgaggccagcgctgagcggctgcagggccgccgcagcagaggagccagcggcagcgagccccagcagatgggcagtgatgtgcgggacctgaatgccctgctgcctgctgtgcccagcctgggcggcggcggcggctgtgccctgcctgtgtctggagctgcccagtgggcccctgtgctggactttgcccctcctggggccagcgcctacggcagcctgggcggccctgcccctcctccagcccctcctcctcctcctcctcctccaccccacagcttcatcaagcaggagcccagctggggcggcgctgagccccatgaggagcagtgcctgagcgccttcaccgtgcacttcagcggccagttcaccggcacagctggggcctgccgctatggccccttcggccccccaccacccagccaggccagcagcggccaggccaggatgttccccaatgccccctacctgcccagctgcctggagagccagcctgccatccggaaccagggctacagcacagtgacctttgatggcacccccagctatggccacacccccagccaccacgccgcccagttccccaaccacagcttcaagcatgaggaccccatgggccagcagggcagcctgggggagcagcagtacagcgtgcccccacctgtgtatggctgccacacccccacagacagctgcaccggcagccaggccctgctgctgcggaccccctacagcagtgacaacctgtaccagatgaccagccagctggagtgcatgacctggaaccagatgaacctgggcgccaccctgaagggcgtggccgccggcagcagcagctctgtgaagtggacagagggccagagcaaccacagcacaggctatgaaagtgacaaccacaccacccccatcctgtgtggggcccagtaccgcatccacacccatggagtcttccggggcatccaggatgtgagaagagtgcctggggtggcccccaccctggtgcgcagcgccagcgagaccagcgagaagaggcccttcatgtgtgcctacccaggctgcaacaagcgctacttcaagctgagccacctgcagatgcacagcaggaagcacactggagagaagccctaccagtgtgacttcaaggactgtgagcggcgcttcagcagaagtgaccagctgaagaggcaccagaggaggcacactggagtgaagcccttccagtgcaagacctgccagaggaagttcagcagaagtgaccacctgaagacccacaccaggacccacacaggcaagaccagcgagaagcccttcagctgccgctggcccagctgccagaagaagtttgcccggagtgatgagctggtgcgccaccacaacatgcaccagaggaacatgaccaagctgcagctggccctgtag

SEQ ID NO: 22532 - DNA, 954 bp, synthetic construct
  misc_feature 1..954: note = Description of Artificial Sequence: Synthetic coding sequence
  source 1..954: mol_type = other DNA
ctgcaggaccctgccagcacctgtgtgcctgagcccgccagccagcacaccctgcggagcggccctggctgcctgcagcagcctgagcagcagggcgtgcgggaccccggcggcatctgggccaagctgggcgctgctgaggccagcgctgagcggctgcagggccgccgcagcagaggagccagcggcagcgagccccagcagatgggcagtgatgtgcgggacctgaatgccctgctgcctgctgtgcccagcctgggcggcggcggcggctgtgccctgcctgtgtctggagctgcccagtgggcccctgtgctggactttgcccctcctggggccagcgcctacggcagcctgggcggccctgcccctcctccagcccctcctcctcctcctcctcctccaccccacagcttcatcaagcaggagcccagctggggcggcgctgagccccatgaggagcagtgcctgagcgccttcaccgtgcacttcagcggccagttcaccggcacagctggggcctgccgctatggccccttcggccccccaccacccagccaggccagcagcggccaggccaggatgttccccaatgccccctacctgcccagctgcctggagagccagcctgccatccggaaccagggctacagcacagtgacctttgatggcacccccagctatggccacacccccagccaccacgccgcccagttccccaaccacagcttcaagcatgaggaccccatgggccagcagggcagcctgggggagcagcagtacagcgtgcccccacctgtgtatggctgccacacccccacagacagctgcaccggcagccaggccctgctgctgcggaccccctacagcagtgacaacctgtaccagatgaccagccagctggagtgcatgacctggaaccagatgaacctgggcgccaccctgaagggctag

SEQ ID NO: 22533 - DNA, 909 bp, synthetic construct
  misc_feature 1..909: note = Description of Artificial Sequence: Synthetic coding sequence
  source 1..909: mol_type = other DNA
atggagaagggctacagcacagtgacctttgatggcacccccagctatggccacacccccagccaccacgccgcccagttccccaaccacagcttcaagcatgaggaccccatgggccagcagggcagcctgggggagcagcagtacagcgtgcccccacctgtgtatggctgccacacccccacagacagctgcaccggcagccaggccctgctgctgcggaccccctacagcagtgacaacctgtaccagatgaccagccagctggagtgcatgacctggaaccagatgaacctgggcgccaccctgaagggcgtggccgccggcagcagcagctctgtgaagtggacagagggccagagcaaccacagcacaggctatgaaagtgacaaccacaccacccccatcctgtgtggggcccagtaccgcatccacacccatggagtcttccggggcatccaggatgtgagaagagtgcctggggtggcccccaccctggtgcgcagcgccagcgagaccagcgagaagaggcccttcatgtgtgcctacccaggctgcaacaagcgctacttcaagctgagccacctgcagatgcacagcaggaagcacactggagagaagccctaccagtgtgacttcaaggactgtgagcggcgcttcagcagaagtgaccagctgaagaggcaccagaggaggcacactggagtgaagcccttccagtgcaagacctgccagaggaagttcagcagaagtgaccacctgaagacccacaccaggacccacactggagagaagcccttcagctgccgctggcccagctgccagaagaagtttgcccggagtgatgagctggtgcgccaccacaacatgcaccagaggaacatgaccaagctgcagctggccctgtag

SEQ ID NO: 22534 - DNA, 1545 bp, synthetic construct
  misc_feature 1..1545: note = Description of Artificial Sequence: Synthetic coding sequence
  source 1..1545: mol_type = other DNA
ctgcaggaccctgccagcacctgtgtgcctgagcccgccagccagcacaccctgcggagcggccctggctgcctgcagcagcctgagcagcagggcgtgcgggaccccggcggcatctgggccaagctgggcgctgctgaggccagcgctgagcggctgcagggccgccgcagcagaggagccagcggcagcgagccccagcagatgggcagtgatgtgcgggacctgaatgccctgctgcctgctgtgcccagcctgggcggcggcggcggctgtgccctgcctgtgtctggagctgcccagtgggcccctgtgctggactttgcccctcctggggccagcgcctacggcagcctgggcggccctgcccctcctccagcccctcctcctcctcctcctcctccaccccacagcttcatcaagcaggagcccagctggggcggcgctgagccccatgaggagcagtgcctgagcgccttcaccgtgcacttcagcggccagttcaccggcacagctggggcctgccgctatggccccttcggccccccaccacccagccaggccagcagcggccaggccaggatgttccccaatgccccctacctgcccagctgcctggagagccagcctgccatccggaaccagggctacagcacagtgacctttgatggcacccccagctatggccacacccccagccaccacgccgcccagttccccaaccacagcttcaagcatgaggaccccatgggccagcagggcagcctgggggagcagcagtacagcgtgcccccacctgtgtatggctgccacacccccacagacagctgcaccggcagccaggccctgctgctgcggaccccctacagcagtgacaacctgtaccagatgaccagccagctggagtgcatgacctggaaccagatgaacctgggcgccaccctgaagggcgtggccgccggcagcagcagctctgtgaagtggacagagggccagagcaaccacagcacaggctatgaaagtgacaaccacaccacccccatcctgtgtggggcccagtaccgcatccacacccatggagtcttccggggcatccaggatgtgagaagagtgcctggggtggcccccaccctggtgcgcagcgccagcgagaccagcgagaagaggcccttcatgtgtgcctacccaggctgcaacaagcgctacttcaagctgagccacctgcagatgcacagcaggaagcacactggagagaagccctaccagtgtgacttcaaggactgtgagcggcgcttcagcagaagtgaccagctgaagaggcaccagaggaggcacactggagtgaagcccttccagtgcaagacctgccagaggaagttcagcagaagtgaccacctgaagacccacaccaggacccacactggagagaagcccttcagctgccgctggcccagctgccagaagaagtttgcccggagtgatgagctggtgcgccaccacaacatgcaccagaggaacatgaccaagctgcagctggccctgtag

SEQ ID NO: 22535 - DNA, 1494 bp, synthetic construct
  misc_feature 1..1494: note = Description of Artificial Sequence: Synthetic coding sequence
  source 1..1494: mol_type = other DNA
ctgcaggaccctgccagcacctgtgtgcctgagcccgccagccagcacaccctgcggagcggccctggctgcctgcagcagcctgagcagcagggcgtgcgggaccccggcggcatctgggccaagctgggcgctgctgaggccagcgctgagcggctgcagggccgccgcagcagaggagccagcggcagcgagccccagcagatgggcagtgatgtgcgggacctgaatgccctgctgcctgctgtgcccagcctgggcggcggcggcggctgtgccctgcctgtgtctggagctgcccagtgggcccctgtgctggactttgcccctcctggggccagcgcctacggcagcctgggcggccctgcccctcctccagcccctcctcctcctcctcctcctccaccccacagcttcatcaagcaggagcccagctggggcggcgctgagccccatgaggagcagtgcctgagcgccttcaccgtgcacttcagcggccagttcaccggcacagctggggcctgccgctatggccccttcggccccccaccacccagccaggccagcagcggccaggccaggatgttccccaatgccccctacctgcccagctgcctggagagccagcctgccatccggaaccagggctacagcacagtgacctttgatggcacccccagctatggccacacccccagccaccacgccgcccagttccccaaccacagcttcaagcatgaggaccccatgggccagcagggcagcctgggggagcagcagtacagcgtgcccccacctgtgtatggctgccacacccccacagacagctgcaccggcagccaggccctgctgctgcggaccccctacagcagtgacaacctgtaccagatgaccagccagctggagtgcatgacctggaaccagatgaacctgggcgccaccctgaagggccacagcacaggctatgaaagtgacaaccacaccacccccatcctgtgtggggcccagtaccgcatccacacccacggcgtcttccggggcatccaggatgtgcggcgggtgcctggggtggcccccaccctggtgcgcagcgccagcgagaccagcgagaagaggcccttcatgtgtgcctacccaggctgcaacaagcgctacttcaagctgagccacctgcagatgcacagcaggaagcacactggagagaagccctaccagtgtgacttcaaggactgtgaaagacgcttcagcagaagtgaccagctgaagaggcaccagaggaggcacactggagtgaagcccttccagtgcaagacctgccagaggaagttcagcagaagtgaccacctgaagacccacaccaggacccacactggagagaagcccttcagctgccgctggcccagctgccagaagaagtttgcccggagtgatgagctggtgcgccaccacaacatgcaccagaggaacatgaccaagctgcagctggccctgtag

SEQ ID NO: 22536 - DNA, 396 bp, synthetic construct
  misc_feature 1..396: note = Description of Artificial Sequence: Synthetic coding sequence
  source 1..396: mol_type = other DNA
atgggccagcagggcagcctgggggagcagcagtacagcgtgcccccacctgtgtatggctgccacacccccacagacagctgcaccggcagccaggccctgctgctgcggaccccctacagcagtgacaacctgtaccagatgaccagccagctggagtgcatgacctggaaccagatgaacctgggcgccaccctgaagggcgtggccgccggcagcagcagctctgtgaagtggacagagggccagagcaaccacagcacaggctatgaaagtgacaaccacaccacccccatcctgtgtggggcccagtaccgcatccacacccacggcgtcttccggggcatccaggatgtgcggcgggtgcctggggtggcccccaccctggtgaggtag

SEQ ID NO: 22537 - DNA, 537 bp, synthetic construct
  misc_feature 1..537: note = Description of Artificial Sequence: Synthetic coding sequence
  source 1..537: mol_type = other DNA
tgactgggcgccaccctgaagggcgtggccgccggcagcagcagctctgtgaagtggacagagggccagagcaaccacagcacaggctatgaaagtgacaaccacaccacccccatcctgtgtggggcccagtaccgcatccacacccacggcgtcttccggggcatccaggatgtgcggcgggtgcctggggtggcccccaccctggtgcgcagcgccagcgagaccagcgagaagaggcccttcatgtgtgcctacccaggctgcaacaagcgctacttcaagctgagccacctgcagatgcacagcaggaagcacactggagtgaagcccttccagtgcaagacctgccagaggaagttcagcagaagtgaccacctgaagacccacaccaggacccacacaggcaagaccagcgagaagcccttcagctgccgctggcccagctgccagaagaagtttgcccggagtgatgagctggtgcgccaccacaacatgcaccagaggaacatgaccaagctgcagctggccctgtag

SEQ ID NO: 22538 - DNA, 867 bp, synthetic construct
  misc_feature 1..867: note = Description of Artificial Sequence: Synthetic coding sequence
  source 1..867: mol_type = other DNA
atggagaagggctacagcacagtgacctttgatggcacccccagctatggccacacccccagccaccacgccgcccagttccccaaccacagcttcaagcatgaggaccccatgggccagcagggcagcctgggggagcagcagtacagcgtgcccccacctgtgtatggctgccacacccccacagacagctgcaccggcagccaggccctgctgctgcggaccccctacagcagtgacaacctgtaccagatgaccagccagctggagtgcatgacctggaaccagatgaacctgggcgccaccctgaagggccacagcacaggctatgaaagtgacaaccacaccacccccatcctgtgtggggcccagtaccgcatccacacccacggcgtcttccggggcatccaggatgtgcggcgggtgcctggggtggcccccaccctggtgcgcagcgccagcgagaccagcgagaagaggcccttcatgtgtgcctacccaggctgcaacaagcgctacttcaagctgagccacctgcagatgcacagcaggaagcacactggagagaagccctaccagtgtgacttcaaggactgtgaaagacgcttcagcagaagtgaccagctgaagaggcaccagaggaggcacactggagtgaagcccttccagtgcaagacctgccagaggaagttcagcagaagtgaccacctgaagacccacaccaggacccacacaggcaagaccagcgagaagcccttcagctgccgctggcccagctgccagaagaagtttgcccggagtgatgagctggtgcgccaccacaacatgcaccagaggaacatgaccaagctgcagctggccctgtag

SEQ ID NO: 22539 - DNA, 1065 bp, synthetic construct
  misc_feature 1..1065: note = Description of Artificial Sequence: Synthetic coding sequence
  source 1..1065: mol_type = other DNA
atgagggcccggccccaggtgtgtgaggccctgctgtttgccctggccctgcagacaggagtgtgctacggcatcaagtggctggccctgagcaagaccccatctgccctggccctgaaccagacccagcactgcaagcagctggagggcctggtgtctgcccaggtgcagctgtgccgcagcaacctggagctgatgcacacagtggtgcacgccgcccgggaggtgatgaaggcctgcagaagagcctttgctgacatgcgctggaactgcagcagcattgagctggcccccaactacctgctggacctggagcggggcacccgggagagcgcctttgtgtatgccctgtctgctgctgccatcagccacgccatcgcccgggcctgcaccagcggggacctgcccggctgcagctgtggccctgtgcctggagagcccccaggccctggcaaccgctggggcggctgtgccgacaacctgtcctatggcctgctgatgggcgccaagttcagtgatgcccccatgaaggtgaagaagacaggcagccaggccaacaagctgatgaggctgcacaacagcgaggtgggccggcaggccctgcgggccagcctggagatgaagtgcaagtgccacggcgtgtctggcagctgcagcatccgcacctgctggaagggcctgcaggagctgcaggatgtggccgctgacctgaagacccgctacctgagcgccaccaaggtggtgcaccggcccatgggcaccaggaagcacctggtgcccaaggacctggacatccggcctgtgaaggacagcgagctggtgtacctgcagagcagcccagacttctgcatgaagaatgagaaggtgggcagccacggcacccaggaccggcagtgcaacaagaccagcaatggaagtgacagctgtgacctgatgtgctgcggccggggctacaacccctacacagacagagtggtggagcgctgccactgcaagtaccactggtgctgctacgtgacctgccgccgctgtgagaggacagtggagagatatgtgtgcaagtag

SEQ ID NO: 22540 - DNA, 762 bp, synthetic construct
  misc_feature 1..762: note = Description of Artificial Sequence: Synthetic coding sequence
  source 1..762: mol_type = other DNA
atgagggcccggccccaggtgtgtgaggccctgctgtttgccctggccctgcagacaggagtgtgctacggcatcaagtggctggccctgagcaagaccccatctgccctggccctgaaccagacccagcactgcaagcagctggagggcctggtgtctgcccaggtgcagctgtgccgcagcaacctggagctgatgcacacagtggtgcacgccgcccgggaggtgatgaaggcctgcagaagagcctttgctgacatgcgctggaactgcagcagcattgagctggcccccaactacctgctggacctggagcggggcacccgggagagcgcctttgtgtatgccctgtctgctgctgccatcagccacgccatcgcccgggcctgcaccagcggggacctgcccggctgcagctgtggccctgtgcctggagagcccccaggccctggcaaccgctggggcggctgtgccgacaacctgtcctatggcctgctgatgggcgccaagttcagtgatgcccccatgaaggtgaagaagacaggcagccaggccaacaagctgatgaggctgcacaacagcgaggtgggccggcaggccctgcgggccagcctgctggtgaacagccgctgccaggcctgggaggccgcctgtgccctgcccagcctgggcagccaccaggagcagaaggtgtggccaccctggaaggagggccgcaccagcaaggagacagacaagatcaagaacaacctggccgcctag

SEQ ID NO: 22541 - DNA, 18 bp, synthetic construct
  misc_feature 1..18: note = Description of Artificial Sequence: Synthetic coding sequence
  source 1..18: mol_type = other DNA
atgagggcccggccctag

SEQ ID NO: 22542 - DNA, 1143 bp, synthetic construct
  misc_feature 1..1143: note = Description of Artificial Sequence: Synthetic coding sequence
  source 1..1143: mol_type = other DNA
atgaagaagagcatcggcatcctgagccctggggtggccctgggcatggccggcagcgccatgagcagcaagttcttcctggtggccctggccatcttcttctcctttgcccaggtggtgattgaggccaacagctggtggagcctgggcatgaacaaccctgtgcagatgtctgaggtgtacatcattggagcccagcccctgtgcagccagctggccggcctgagccagggccagaagaagctgtgccacctgtaccaggaccacatgcagtacatcggggagggcgccaagacaggcatcaaggagtgccagtaccagttccgccaccggcgctggaactgcagcacagtggacaacacctctgtgtttggccgggtgatgcagatcggcagccgggagacagccttcacctatgctgtgtctgctgctggggtggtgaatgccatgagccgggcctgccgggagggggagctgagcacctgtggctgcagcagagctgcccggcccaaggacctgccccgggactggctgtggggcggctgtggggacaacatcgactatggctacagatttgccaaggagtttgtggatgcccgggagcgggagcgcatccacgccaagggcagctatgaaagtgcccgcatcctgatgaacctgcacaacaatgaagctggaagaagaacagtgtacaacctggctgatgtggcctgcaagtgccacggcgtgtctggcagctgcagcctgaagacctgctggctgcagctggccgacttcaggaaggtgggagatgccctgaaggagaagtatgacagcgctgctgccatgaggctgaacagccggggcaagctggtgcaggtgaacagccgcttcaacagccccaccacccaggacctggtgtacatcgaccccagcccagactactgtgtgagaaatgaaagcacaggcagcctgggcacccagggccgcctgtgcaacaagaccagcgagggcatggatggctgtgagctgatgtgctgcggccggggctatgaccagttcaagacagtgcagacagagcgctgccactgcaagttccactggtgctgctacgtgaagtgcaagaagtgcacagaaattgtggaccagtttgtgtgcaagtag

SEQ ID NO: 22543 - DNA, 390 bp, synthetic construct
  misc_feature 1..390: note = Description of Artificial Sequence: Synthetic coding sequence
  source 1..390: mol_type = other DNA
atgaagaagagcatcggcatcctgagccctggggtggccctgggcatggccggcagcgccatgagcagcaagttcttcctggtggccctggccatcttcttctcctttgcccaggtggtgattgaggccaacagctggtggagcctgggcatgaacaaccctgtgcagatgagccaggatgtgggcggccacggctggctgcgggcccacgtgctgcggccctggctgcggcctgtgcaggacagagcagatggagccctgcccctgcaggtgcccctggtgctgctgcggcaggtgcaggaggtgcatggagaccggggccctgtgtgtgtgcaggtggtgggcgccacccagcacagcgcccccctgcccggccctgcctacctgtag

SEQ ID NO: 22544 - DNA, 1143 bp, synthetic construct; identical to SEQ ID NO: 22542
  misc_feature 1..1143: note = Description of Artificial Sequence: Synthetic coding sequence
  source 1..1143: mol_type = other DNA

SEQ ID NO: 22545 - DNA, 645 bp, synthetic construct
  misc_feature 1..645: note = Description of Artificial Sequence: Synthetic coding sequence
  source 1..645: mol_type = other DNA
atggccggcagcgccatgagcagcaagttcttcctggtggccctggccatcttcttctcctttgcccaggtggtgattgaggccaacagctggtggagcctgggcatgaacaaccctgtgcagatgtctgaggtgtacatcatcggggcccagcccctgtgcagccagctggccggcctgagccagggccagaagaagctgtgccacctgtaccaggaccacatgcagtacatcggggagggcgccaagacaggcatcaaggagtgccagtaccagttccgccaccggcgctggaactgcagcacagtggacaacacctctgtgtttggccgggtgatgcagatcggcagccgggagacagccttcacctatgctgtgtctgctgctggggtggtgaatgccatgagccgggcctgccgggagggggagctgagcacctgtggctgcagccgggccgcccggcccaaggacctgccccgggactggctgtggggcggctgtggggacaacattgattatggctacagatttgccaaggagtttgtggatgcccgggagcgggagcgcatccacgccaagggcagctatgagagcgcccgcatcctgatgaacctgcacaacaatgaggccggccggcgggtgtag

SEQ ID NO: 22546 - DNA, 1098 bp, synthetic construct
  misc_feature 1..1098: note = Description of Artificial Sequence: Synthetic coding sequence
  source 1..1098: mol_type = other DNA
atggccggcagcgccatgagcagcaagttcttcctggtggccctggccatcttcttctcctttgcccaggtggtgattgaggccaacagctggtggagcctgggcatgaacaaccctgtgcagatgtctgaggtgtacatcatcggggcccagcccctgtgcagccagctggccggcctgagccagggccagaagaagctgtgccacctgtaccaggaccacatgcagtacatcggggagggcgccaagacaggcatcaaggagtgccagtaccagttccgccaccggcgctggaactgcagcacagtggacaacacctctgtgtttggccgggtgatgcagatcggcagccgggagacagccttcacctatgctgtgtctgctgctggggtggtgaatgccatgagccgggcctgccgggagggggagctgagcacctgtggctgcagccgggccgcccggcccaaggacctgccccgggactggctgtggggcggctgtggggacaacattgattatggctacagatttgccaaggagtttgtggatgcccgggagcgggagcgcatccacgccaagggcagctatgagagcgcccgcatcctgatgaacctgcacaacaatgaggccggccgcaggacagtgtacaacctggctgatgtggcctgcaagtgccacggcgtgtctggcagctgcagcctgaagacctgctggctgcagctggccgacttcaggaaggtgggagatgccctgaaggagaagtatgattctgctgctgccatgaggctgaacagccggggcaagctggtgcaggtgaacagccgcttcaacagccccaccacccaggacctggtgtacatcgaccccagcccagactactgtgtgagaaatgaaagcacaggcagcctgggcacccagggccgcctgtgcaacaagaccagcgagggcatggatggctgtgagctgatgtgctgcggccggggctatgaccagttcaagacagtgcagacagagcgctgccactgcaagttccactggtgctgctacgtgaagtgcaagaagtgcacagagatcgtggaccagtttgtgtgcaagtag

SEQ ID NO: 22547 - DNA, 876 bp, synthetic construct
  misc_feature 1..876: note = Description of Artificial Sequence: Synthetic coding sequence
  source 1..876: mol_type = other DNA
atgcagtacatcggggagggcgccaagacaggcatcaaggagtgccagtaccagttccgccaccggcgctggaactgcagcacagtggacaacacctctgtgtttggccgggtgatgcagatcggcagccgggagacagccttcacctatgctgtgtctgctgctggggtggtgaatgccatgagccgggcctgccgggagggggagctgagcacctgtggctgcagccgggccgcccggcccaaggacctgccccgggactggctgtggggcggctgtggggacaacattgattatggctacagatttgccaaggagtttgtggatgcccgggagcgggagcgcatccacgccaagggcagctatgagagcgcccgcatcctgatgaacctgcacaacaatgaggccggccgcaggacagtgtacaacctggctgatgtggcctgcaagtgccacggcgtgtctggcagctgcagcctgaagacctgctggctgcagctggccgacttcaggaaggtgggagatgccctgaaggagaagtatgattctgctgctgccatgaggctgaacagccggggcaagctggtgcaggtgaacagccgcttcaacagccccaccacccaggacctggtgtacatcgaccccagcccagactactgtgtgagaaatgaaagcacaggcagcctgggcacccagggccgcctgtgcaacaagaccagcgagggcatggatggctgtgagctgatgtgctgcggccggggctatgaccagttcaagacagtgcagacagagcgctgccactgcaagttccactggtgctgctacgtgaagtgcaagaagtgcacagagatcgtggaccagtttgtgtgcaagtag

SEQ ID NO: 22548 - DNA, 1080 bp, synthetic construct
  misc_feature 1..1080: note = Description of Artificial Sequence: Synthetic coding sequence
  source 1..1080: mol_type = other DNA
atgcccagcctgctgctgctcttcaccgctgccctgctgagctcctgggcccagctgctgacagatgccaacagctggtggagcctggccctgaaccctgtgcagaggcctgagatgttcatcatcggggcccagcctgtgtgcagccagctgcccggcctgagccctggccagaggaagctgtgccagctgtaccaggagcacatggcctacatcggggagggcgccaagacaggcatcaaggagtgccagcaccagttccggcagaggcgctggaactgcagcacagctgacaatgcctctgtgtttggccgggtgatgcagatcggcagccgggagacagccttcacccatgctgtgtctgctgctggggtggtgaatgccatcagccgggcctgccgggagggggagctgagcacctgtggctgcagcaggacagcccggcccaaggacctgccccgggactggctgtggggcggctgtggggacaacgtggagtatggctacagatttgccaaggagtttgtggatgcccgggagcgggagaagaactttgccaagggcagcgaggagcagggccgggtgctgatgaacctgcagaacaatgaggccggccggcgggctgtgtacaagatggctgatgtggcctgcaagtgccacggcgtgtctggcagctgcagcctgaagacctgctggctgcagctggccgagttcaggaaggtgggggaccggctgaaggagaagtatgattctgctgctgccatgagggtgaccaggaagggccgcctggagctggtgaacagccgcttcacccagcccaccccagaggacctggtgtatgtggaccccagcccagactactgcctgagaaatgaaagcacaggcagcctgggcacccagggccgcctgtgcaacaagaccagcgagggcatggatggctgtgagctgatgtgctgcggccggggctacaaccagttcaagtctgtgcaggtggagcgctgccactgcaagttccactggtgctgctttgtgcgctgcaagaagtgcacagagatcgtggaccagtacatctgcaagtag

SEQ ID NO: 22549 - DNA, 1080 bp, synthetic construct; identical to SEQ ID NO: 22548
  misc_feature 1..1080: note = Description of Artificial Sequence: Synthetic coding sequence
  source 1..1080: mol_type = other DNA

SEQ ID NO: 22550 - DNA, 1080 bp, synthetic construct; identical to SEQ ID NO: 22548
  misc_feature 1..1080: note = Description of Artificial Sequence: Synthetic coding sequence
  source 1..1080: mol_type = other DNA

SEQ ID NO: 22551 - DNA, 1398 bp, synthetic construct
  misc_feature 1..1398: note = Description of Artificial Sequence: Synthetic coding sequence
  source 1..1398: mol_type = other DNA
atgacaggccgggccatggaccccctgcctgctgctgctgtgggcgctgctgctgaggccgaggctgatgaggaggccgaccccccagccagtgacctgcccaccccccaggccatcgagccccaggccatcgtgcagcaggtgcctgcccccagcaggatgcagatgccccagggcaaccccctgctgctgagccacaccctgcaggagctgctggcccgggacacagtgcaggtggagctgatccctgagaagaagggcctcttcctgaagcacgtggagtatgaggtgagcagccagcgcttcaagagctctgtgtaccgccgctacaatgactttgtggtgttccaggagatgctgctgcacaagttcccctacaggatggtgcctgccctgccccccaagaggatgctgggcgctgaccgggagttcatcgaggccaggagaagagccctgaagagatttgtgaacctggtggcccggcaccccctcttctctgaagatgtggtgctgaagctgttcctgtccttcagcggcagtgatgtgcagaacaagctgaaggagagcgcccagtgtgtgggagatgagttcctgaactgcaagctggccacccgggccaaggacttcctgcctgctgacatccaggcccagtttgccatcagccgggagctgatccggaacatctacaacagcttccacaagctgcgggacagagctgagcgcatcgccagccgggccatcgacaatgctgctgacctgctgatctttgggaaggagctgagcgccatcggcagtgacaccacccccctgcccagctgggccgccctgaacagcagcacctggggcagcctgaagcaggccctgaagggcctgtctgtggagtttgccctgctggccgacaaggccgcccagcagggcaagcaggaggagaatgatgtggtggagaagctgaacctcttcctggacctgctgcagagctacaaggacctgtgtgaaagacatgagaagggcgtgctgcacaagcaccagagggccctgcacaagtacagcctgatgaagaggcagatgatgtctgccacagcccagaaccgggagcctgagagcgtggagcagctggagagccgcatcgtggagcaggagaatgccatccagaccatggagctgaggaactacttcagcctgtactgcctgcaccaggagacccagctgattcatgtgtacctgcccctgaccagccacatcctgcgggcctttgtgaacagccagatccagggccacaaggagatgagcaaggtgtggaatgacctgcggcccaagctgagctgcctgtttgctggcccccacagcaccctgaccccaccctgcagccccccagaagatggcctgtgcccccactag

SEQ ID NO: 22552 - DNA, 174 bp, synthetic construct
  misc_feature 1..174: note = Description of Artificial Sequence: Synthetic coding sequence
  source 1..174: mol_type = other DNA
atgagctctgtgcagcagcagcccccaccaccccggcgggtgaccaacgtgggcagcctgctgctgaccccccaggagaatgaaagcctcttcaccttcctgggcaagaagtgtgtgaccatgagcagcgctgtggtgcagctgtatgctgctgacaggaacctgagctgctag

SEQ ID NO: 22553 - DNA, 1140 bp, synthetic construct
  misc_feature 1..1140: note = Description of Artificial Sequence: Synthetic coding sequence
  source 1..1140: mol_type = other DNA
atggccaggagaagtgccttccctgctgctgccctgtggctgtggagcatcctgctgtgcctgctggccctgcgggcagaggccggccccccccaggaggagagcctgtacctgtggattgatgcccaccaggcccgggtgctgattggatttgaggaggacatcctgattgtgtctgagggcaagatggcccccttcacccatgacttcaggaaggcccagcagaggatgcctgccatccctgtgaacatccacagcatgaacttcacctggcaggccgccggccaggccgagtacttctatgagttcctgagcctgcggagcctggacaagggcatcatggctgaccccaccgtgaatgtgcccctgctgggcaccgtgccccacaaggcctctgtggtgcaggtgggcttcccctgcctgggcaagcaggatggagtggccgcctttgaggtggatgtgattgtgatgaacagcgagggcaacaccatcctgcagaccccccagaatgccatcttcttcaagacctgccagcaggctgaatgtcctgggggctgcagaaatggaggcttctgcaatgaaagacgcatctgtgaatgtccagatggcttccacggcccccactgtgagaaggccctgtgcaccccccgctgcatgaatggaggcctgtgtgtgaccccaggcttctgcatctgccccccaggcttctatggagtgaactgtgacaaggccaactgcagcaccacctgcttcaacggcggcacctgcttctacccaggcaagtgcatctgccccccaggcctggagggggagcagtgtgagatcagcaaatgtccccagccctgcagaaatggaggaaaatgtattggcaagagcaagtgcaagtgcagcaagggctaccagggcgacctgtgcagcaagcctgtgtgtgagcccggctgtggggcccacggcacctgccacgagcccaacaagtgccagtgccaggagggctggcacggccgccactgcaacaagagatatgaggccagcctcatccacgccctgcggcctgctggggcccagctgcggcagcacacccccagcctgaagaaggccgaggagcggcgggaccccccagagagcaactacatctggtag

SEQ ID NO: 22554 - DNA, 120 bp, synthetic construct
  misc_feature 1..120: note = Description of Artificial Sequence: Synthetic coding sequence
  source 1..120: mol_type = other DNA
aagaagaggaaggagaagaagcgggagaagagaagaggcaaggagaggaaggagctgttcaagctggtgagccacgtgctggagaacaggatgggctggcagcacctgaagtggatgtag

SEQ ID NO: 22555 - DNA, 1095 bp, synthetic construct
  misc_feature 1..1095: note = Description of Artificial Sequence: Synthetic coding sequence
  source 1..1095: mol_type = other DNA
atggcccgggccagcgaggccgtgagccgcatcctggaggagtggcacaaggccaaggtggaggccatgaccctggacctggccctgctgcggtctgtgcagcactttgctgaggccttcaaggccaagaatgtgcccctgcacgtgctggtgtgcaatgctgccacctttgccctgccctggagcctgaccaaggatggcctggagaccaccttccaggtgaaccacctgggccacttctacctggtgcagctgctgaggatgttctgtgccgcccagctgctgcctgtgtccctgtggagcccccagagccccatcgacctgcagatcctgaccaccccctgggagaactggacctctgtggccagcctgcagcagaagaccaccatcggccgctgctggctgatcaccggccccagcagcgccaccagcagcagccccaccagctgcaccgtggcccccacccggggccacgtggagaggtctgcctcctggaagtatgatgtgctgcagcacagcagccagctggtgggcgtgcacacagctgtgtacctgggggaggccttccaccaggtgcacgccaccggcagctgccaccaccgggtgctgtgctgctgccccaggactggaggcagcggcagagatgtgctgcagcagctgctgcccctgcacgccctgaccaggagcagcgagaggagagatggccctgaccctgtgggcagcgagcggctcatccaggagcggctggccagccctgccaagtggagcagcgagaggatgggcacccacaccaggcctgtgtgtgtgcccagcaggaagtgccagggccccctgcccaacgtgccccccacccagatcaggaagagcaagggcaacaagagcagccacaacagagtgaagaacctgaagtaccagtgggaggccggcaacagctggggcaaggtgtccctcttctggggctgggcccggcacaggagcctgtgcttcctggtggtggcctgcctgaaggtgaagacctgcctggtgtgccgcttccgcatcagcctggagaagcaccagcagttctccttcttctactgctacagaattgcctag

SEQ ID NO: 22556 - DNA, 570 bp, synthetic construct
  misc_feature 1..570: note = Description of Artificial Sequence: Synthetic coding sequence
  source 1..570: mol_type = other DNA
atggccgccctgcgctatgccggcctggatgacacagacagtgaagatgagctgcccccaggctgggaggagaggaccaccaaggatggctgggtgtactatgccaaccacacagaggagaagacccagtgggagcaccccaagacaggcaagaggaagagggtggccggggacctgccctacggctgggagcaggagacagatgaaaatggccaggtgttctttgtggaccacatcaacaagaggaccacctacctggacccccggctggccttcaccgtggatgacaaccccaccaagcccaccacccggcagagatatgatggcagcaccacagccatggagatcctgcagggccgggacttcaccgggaaggtggtggtggtgactggagccaacagcggcatcggctttgaaacagccaagagctttgccctgcatggagcccacgtgatcctggcctgcaggaacatggcccgggccagcgaggccgtgagccgcatcctggaggagtggaagaccaagtaccaccccccacctgagaagtgccgcatcaagatcttccactag

SEQ ID NO: 22557 - DNA, 936 bp, synthetic construct
  misc_feature 1..936: note = Description of Artificial Sequence: Synthetic coding sequence
  source 1..936: mol_type = other DNA
atggccgccctgcgctatgccggcctggatgacacagacagtgaagatgagctgcccccaggctgggaggagaggaccaccaaggatggctgggtgtactatgccaaccacacagaggagaagacccagtgggagcaccccaagacaggcaagaggaagagggtggccggggacctgccctacggctgggagcaggagacagatgaaaatggccaggtgttctttgtggaccacatcaacaagaggaccacctacctggacccccggctggccttcaccgtggatgacaaccccaccaagcccaccacccggcagagatatgatggcagcaccacagccatggagatcctgcagggccgggacttcaccgggaaggtggtggtggtgactggagccaacagcggcatcgccaccggcagctgccaccaccgggtgctgtgctgctgccccaggactggaggcagcggcagagatgtgctgcagcagctgctgcccctgcacgccctgaccaggagcagcgagaggagagatggccctgaccctgtgggcgcccagcgggaggccgaccccaggacagcctggcagcctgtgcggctgagcggggcccagagcggctgggcccacaccccagccctgtgtgtgagcccccacgccagcgcccgggccggccccctgcccaacgtgccccccacccagatcaggaagagcaaaggaaacaagagcagccacaacagagtgaagaacctgaagtaccagtgggaggccggcaacagctggggcaaggtgtccctcttctggggctgggcccggcacaggagcctgtgcttcctggtggtggcctgcctgaaggtgaagacctgcctggtgtgccgcttccgcatcagcctggagaagcaccagcagttctccttcttctactgctaccgcatcgcctag

SEQ ID NO: 22558 - DNA, 705 bp, synthetic construct
  misc_feature 1..705: note = Description of Artificial Sequence: Synthetic coding sequence
  source 1..705: mol_type = other DNA
atggccgccctgcgctatgccggcctggatgacacagacagtgaagatgagctgcccccaggctgggaggagaggaccaccaaggatggctgggtgtactatgccaaccacacagaggagaagacccagtgggagcaccccaagacaggcaagaggaagagggtggccggggacctgccctacggctgggagcaggagacagatgaaaatggccaggtgttctttgtggaccacatcaacaagaggaccacctacctggacccccggctggccttcaccgtggatgacaaccccaccaagcccaccacccggcagagatatgatggcagcaccacagccatggagatcctgcagggccgggacttcaccgggaaggtggtggtggtgactggagccaacagcggcatcggctttgaaacagccaagagctttgccctgcatggagcccacgtgatcctggcctgcaggaacatggcccgggccagcgaggccgtgagccgcatcctggaggagtggcagcagggcgccgccaccaccgtgtactgtgccgctgtgcctgagctggagggcctgggcggcatgtacttcaacaactgctgccgctgcatgcccagccctgaggcccagagcgaggagacagcccggaccctgtgggccctgtctgagcggctcatccaggagcggctgggcagccagagcggctag

SEQ ID NO: 22559 - DNA, 1245 bp, synthetic construct
  misc_feature 1..1245: note = Description of Artificial Sequence: Synthetic coding sequence
  source 1..1245: mol_type = other DNA
atggccgccctgcgctatgccggcctggatgacacagacagtgaagatgagctgcccccaggctgggaggagaggaccaccaaggatggctgggtgtactatgccaaccacacagaggagaagacccagtgggagcaccccaagacaggcaagaggaagagggtggccggggacctgccctacggctgggagcaggagacagatgaaaatggccaggtgttctttgtggaccacatcaacaagaggaccacctacctggacccccggctggccttcaccgtggatgacaaccccaccaagcccaccacccggcagagatatgatggcagcaccacagccatggagatcctgcagggccgggacttcaccgggaaggtggtggtggtgactggagccaacagcggcatcggctttgaaacagccaagagctttgccctgcatggagcccacgtgatcctggcctgcaggaacatggcccgggccagcgaggccgtgagccgcatcctggaggagtggcacaaggccaaggtggaggccatgaccctggacctggccctgctgcggtctgtgcagcactttgctgaggccttcaaggccaagaatgtgcccctgcacgtgctggtgtgcaatgctgccacctttgccctgccctggagcctgaccaaggatggcctggagaccaccttccaggtgaaccacctgggccacttctacctggtgcagctgctgcaggatgtgctgtgccgcagcgccccagcccgggtcatcgtggtgagcagcgagagccaccgcttcacagacatcaatgacagcctgggcaagctggacttcagccggctgagccccaccaagaatgactactgggccatgctggcctacaacagaagcaagctgtgcaacatcctcttcagcaatgagctgcaccggcggctgagcccccggggcgtgaccagcaatgctgtgcaccctggcaacatgatgtacagcaacatccaccgctcctggtgggtgtacaccctgctcttcaccctggcccggcccttcaccaagtccatgcagcagggcgccgccaccaccgtgtactgtgccgctgtgcctgagctggagggcctgggcggcatgtacttcaacaactgctgccgctgcatgcccagccctgaggcccagagcgaggagacagcccggaccctgtgggccctgtctgagcggctcatccaggagcggctgggcagccagagcggctag

SEQ ID NO: 22560 - DNA, 642 bp, synthetic construct
  misc_feature 1..642: note = Description of Artificial Sequence: Synthetic coding sequence
  source 1..642: mol_type = other DNA
atggccgccctgcgctatgccggcctggatgacacagacagtgaagatgagctgcccccaggctgggaggagaggaccaccaaggatggctgggtgtactatgccaaccacacagaggagaagacccagtgggagcaccccaagacaggcaagaggaagagggtggccggggacctgccctacggctgggagcaggagacagatgaaaatggccaggtgttctttgtggaccacatcaacaagaggaccacctacctggacccccggctggccttcaccgtggatgacaaccccaccaagcccaccacccggcagagatatgatggcagcaccacagccatggagatcctgcagggccgggacttcaccgggaaggtggtggtggtgactggagccaacagcggcatcggcaaggccagctgccacgtgggccgcatcctgaagcacaccagggtggaggagctgagcctgctgcccacagccatcaaccgggagctgcccccaccctgcaccgtgctgctgagccagaactggagggtgtgggagggctgcaccagcaccacagctgctgctgcctgcccccaccagaagctgcgggccaagaggcggcccggcccctgtggccgcagcgcccggggctag

SEQ ID NO: 22561 - DNA, 1245 bp, synthetic construct; identical to SEQ ID NO: 22559
  misc_feature 1..1245: note = Description of Artificial Sequence: Synthetic coding sequence
  source 1..1245: mol_type = other DNA

SEQ ID NO: 22562 - DNA, 111 bp, synthetic construct
  misc_feature 1..111: note = Description of Artificial Sequence: Synthetic coding sequence
  source 1..111: mol_type = other DNA
atggccgccctgcgctatgccggcctggatgacacagacagtgaagatgagctgcccccaggctgggaggagaggaccaccaaggatggctgggtgtactatgccaagtag

SEQ ID NO: 22563 - DNA, 1047 bp, synthetic construct
  misc_feature 1..1047: note = Description of Artificial Sequence: Synthetic coding sequence
  source 1..1047: mol_type = other DNA
atggcccacagccagaacagcctggagctgcccatcaacatcaatgccacccagatcaccacagcctacggccaccgggccctgcccaagctgaaggaggagctgcagagcgaggacctgcagacccggcagaaggccctgatggccctgtgtgacctgatgcatgaccctgagtgcatctacaaggccatgaacatcggctgcatggagaacctgaaggccctgctgaaggacagcaacagcatggtgcgcatcaagaccacagaggtgctgcacatcacagccagccacagcgtgggccgctatgccttcctggagcatgacatcgtgctggccctgtccttcctgctgaatgaccccagccctgtgtgccggggcaacctgtacaaggcctacatgcagctggtgcaggtgcccaggggggcccaggagatcatcagcaagggcctcatcagcagcctggtgtggaagctgcaggtggaggtggaggaggaggagttccaggagttcatcctggacaccctggtgctgtgcctgcaggaggatgccacagaggccctgggcagcaatgtggtgctggtgctgaagcagaagctgctgagcgccaaccagaacatccgcagcaaggccgcccgggccctgctgaatgtgtccatcagccgggagggcaagaagcaggtgtgccactttgatgtgatccccatcctggtgcacctgctgaaggaccctgtggagcacgtgaagagcaatgctgctggggccctgatgtttgccaccgtcatcacagagggcaagtatgctgccctggaggcccaggccatcggcctgctgctggagctgctgcacagccccatgaccatcgcccggctgaatgccaccaaggccctgaccatgctggccgaggcccctgagggcaggaaggccctgcagacccacgtgcccaccttccgggccatggaggtggagacctatgagaagccccaggtggccgaggccctgcagagagctgccagaattgccatcagcgtcatcgagttcaagccctag

SEQ ID NO: 22564 - DNA, 1131 bp, synthetic construct
  misc_feature 1..1131: note = Description of Artificial Sequence: Synthetic coding sequence
  source 1..1131: mol_type = other DNA
atggtggtggtggccgccgcccccaacccagcagatggcacccccaaggtgctgctgctgagcggccagcctgccagcgctgctggggccccagctggccaggccctgcccctgatggtgcctgcccagagaggagccagccctgaggccgccagcggcggcctgccccaggccaggaagaggcagaggctgacccacctgagccctgaggagaaggccctgcggaggaagctgaagaacagagtggccgcccagacagcccgggacaggaagaaggccaggatgtctgagctggagcagcaggtggtggacctggaggaggagaaccagaagctgctgctggagaaccagctgctgcgggagaagacccacggcctggtggtggagaaccaggagctgcggcagaggctgggcatggatgccctggtggccgaggaggaggccgaggccaagggaaatgaggtgcggcctgtggccggcagcgctgagagcgctgctggggccggccctgtggtgaccccacctgagcacctgcccatggacagcggcggcatcgacagcagtgacagcgagagtgacatcctgctgggcatcctggacaacctggaccctgtgatgttcttcaagtgccccagccctgagcccgccagcctggaggagctgcctgaggtgtacccagagggccccagcagcctgcctgccagcctgagcctgtctgtgggcaccagcagcgccaagctggaggccatcaatgaactcatccgctttgaccacatctacaccaagcccctggtgctggagatccccagcgagacagagagccaggccaacgtggtggtgaagattgaggaggcccccctgagccccagtgaaaatgaccaccctgagttcatcgtgtctgtgaaggaggagcctgtggaggatgacctggtgcctgagctgggcatcagcaacctgctgagcagcagccactgccccaagcccagcagctgcctgctggatgcctacagcgactgtggctatggaggcagcctgagccccttcagtgacatgagcagcctgctgggcgtgaaccacagctgggaggacacctttgccaatgaactcttcccccagctgatctctgtgtag

SEQ ID NO: 22565 - DNA, 801 bp, synthetic construct
  misc_feature 1..801: note = Description of Artificial Sequence: Synthetic coding sequence
  source 1..801: mol_type = other DNA
atggtggtggtggccgccgcccccaacccagcagatggcacccccaaggtgctgctgctgagcggccagcctgccagcgctgctggggccccagctggccaggccctgcccctgatggtgcctgcccagagaggagccagccctgaggccgccagcggcggcctgccccaggccaggaagaggcagaggctgacccacctgagccctgaggagaaggccctgcggaggaagctgaagaacagagtggccgcccagacagcccgggacaggaagaaggccaggatgtctgagctggagcagcaggtggtggacctggaggaggaggtgaagctgctgaagaaccagaagctgctgctggagaaccagctgctgcgggagaagacccacggcctggtggtggagaaccaggagctgcggcagaggctgggcatggatgccctggtggccgaggaggaggccgaggccaagggaaatgaggtgcggcctgtggccggcagcgctgagagcgctgccctgcggctgcgggcccccctgcagcaggtgcaggcccagctgagccccctgcagaacatcagcccctggatcctggccgtgctgaccctgcagatccagagcctcatcagctgctgggccttctggaccacctggacccagagctgcagcagcaatgccctgccccagagcctgcctgcctggaggagcagccagaggagcacccagaaggaccctgtgccctaccagccccccttcctgtgccagtggggccgccaccagcccagctggaagcccctgatgaactag

SEQ ID NO: 22566 - DNA, 636 bp, synthetic construct
  misc_feature 1..636: note = Description of Artificial Sequence: Synthetic coding sequence
  source 1..636: mol_type = other DNA
atgagggcccctgtgttccaggccctgctgctgtgtggccggcggctggtggtgcagcccctgaacagcgacatgaggaagctgaagaacagagtggccgcccagacagcccgggacaggaagaaggccaggatgtctgagctggagcagcaggtggtggacctggaggaggagaaccagaagctgctgctggagaaccagctgctgcgggagaagacccacggcctggtggtggagaaccaggagctgcggcagaggctgggcatggatgccctggtggccgaggaggaggccgaggccaagggaaatgaggtgcggcctgtggccggcagcgctgagagcgctgccctgcggctgcgggcccccctgcagcaggtgcaggcccagctgagccccctgcagaacatcagcccctggatcctggccgtgctgaccctgcagatccagagcctcatcagctgctgggccttctggaccacctggacccagagctgcagcagcaatgccctgccccagagcctgcctgcctggaggagcagccagaggagcacccagaaggaccctgtgccctaccagccccccttcctgtgccagtggggccgccaccagcccagctggaagcccctgatgaactag

SEQ ID NO: 22567 - DNA, 822 bp, synthetic construct
  misc_feature 1..822: note = Description of Artificial Sequence: Synthetic coding sequence
  source 1..822: mol_type = other DNA
atggctgctgctgatggagccctgcctgaggccgccgccctggagcagcctgctgagctgcctgcctctgtgcgggccagcattgaaaggaagaggcagagggccctgatgctgcggcaggcccggctggccgcccggccctacagcgccacagctgctgctgccaccggcggcatggccaacgtgaaggccgcccccaagatcatcgacacaggaggcggcttcatcctggaggaggaggaggaggaggagcagaagattggcaaggtggtgcaccagcccggccctgtgatggagtttgattatgtgatctgtgaagaatgtgggaaggagttcatggacagctacctgatgaaccactttgacctgcccacctgtgacaactgcagagatgctgatgacaagcacaagctgatcaccaagacagaggccaagcaggagtacctgctgaaggactgtgacctggagaagcgggagccccccctgaagttcatcgtgaagaagaacccccaccacagccagtggggagacatgaagctgtacctgaagctgcagatcgtgaagaggagcctggaggtgtggggcagccaggaggccctggaggaggccaaggaggtgcggcaggagaaccgggagaagatgaagcagaagaagtttgacaagaaggtgaaggagctgcggcgggctgtgcgcagctctgtgtggaagcgggagaccatcgtgcaccagcacgagtatggccctgaggagaacctggaggatgacatgtacaggaagacctgcaccatgtgtggccacgagctgacctatgagaagatgtag

SEQ ID NO: 22568 - DNA, 2823 bp, synthetic construct
  misc_feature 1..2823: note = Description of Artificial Sequence: Synthetic coding sequence
  source 1..2823: mol_type = other DNA
atggccaggaagagagctgctggaggagagccccggggccgggagctgcggagccagaagagcaaggccaagagcaaggcccggcgggaggaggaggaggaggatgcctttgaagatgagaagccacccaagaagagcctgctgagcaaggtgtcccagggcaagaggaagaggggctgcagccaccctgggggcagcgcagatggccctgccaagaagaaggtggccaaggtgacagtgaagtctgagaacctgaaggtgatcaaggatgaggccctgagtgatggagatgacctgcgggacttccccagcgacctgaagaaggcccaccacctgaagagaggagccaccatgaatgaagacagcaatgaggaggaggaggagagtgaaaatgactgggaggaggtggaggagctgtctgagcctgtgctgggagatgtgcgggagagcacagccttcagccgcagcctgctgcctgtgaagcctgtggagattgaaattgagaccccagagcaggccaagacccgggagaggtctgagaagatcaagctggagtttgagacctacctgcggcgggccatgaagcgcttcaacaagggcgtgcatgaggacacccacaaggtgcacctgctgtgcctgctggccaacggcttctacagaaacaacatctgcagccagcctgacctgcacgccatcggcctgagcatcatcccagcccgcttcaccagggtgctgcccagagatgtggacacctactacctgagcaacctggtgaagtggttcatcggcaccttcaccgtgaatgctgagctgagcgccagcgagcaggacaacctgcagaccaccctggagaggagatttgccatctacagcgccagagatgatgaggagctggtgcacatcttcctgctgatcctgcgggccctgcagctgctgacccggctggtgctgagcctgcagcccatccccctgaagagcgccacagccaagggcaagaagcccagcaaggagcggctgacagctgaccccggcggcagcagcgagaccagcagccaggtgctggagaaccacaccaagcccaagaccagcaagggcaccaagcaggaggagacctttgccaagggcacctgccggcccagcgccaagggcaagagaaataaaggaggcaggaagaagaggagcaagcccagcagcagtgaagaagatgagggccctggggacaagcaggagaaggccacccagaggcggccccacggccgggagcggcgggtggccagccgggtgtcctacaaggaggagagcggcagtgatgaagctggcagcggcagtgactttgagctgagcagtggagaggccagtgaccccagtgatgaggacagcgagcccggcccccccaagcagaggaaggccccagccccccagaggaccaaggccggcagcaagagcgccagcaggacccaccggggcagccacaggaaggaccccagcctgcctgctgccagcagcagcagcagcagcagcaagaggggcaagaagatgtgcagtgatggagagaaggccgagaagaggagcattgctggcatcgaccagtggctggaggtgttctgtgagcaggaggagaagtgggtgtgtgtggactgtgtgcatggagtggtgggccagcccctgacctgctacaagtatgccaccaagcccatgacctacgtggtgggcatcgacagtgatggctgggtgagagatgtgacccagagatatgaccctgtgtggatgacagtgaccaggaaatgtcgggtggatgctgagtggtgggccgagaccctgcggccctaccagagccccttcatggaccgggagaagaaggaggacctggagttccaggccaagcacatggaccagcccctgcccacagccatcggcctgtacaagaaccaccccctgtatgccctgaagaggcacctgctgaagtatgaggccatctacccagagacagctgccatcctgggctactgccgcggggaggccgtgtacagccgggactgtgtgcacaccctgcacagccgggacacctggctgaagaaggcccgggtggtgcggctgggggaggtgccctacaagatggtgaagggcttcagcaacagagccaggaaggcccggctggccgagccccagctgcgggaggagaatgacctgggcctgtttggctactggcagacagaggagtaccagccccctgtggccgtggatggcaaggtgcccagaaatgaatttggaaatgtgtacctgttcctgcccagcatgatgcccatcggctgtgtgcagctgaacctgcccaacctgcaccgggtggccaggaagctggacatcgactgtgtgcaggccatcactggatttgacttccacggcggctacagccaccctgtgacagatggctacatcgtgtgtgaggagttcaaggatgtgctgctgacagcctgggagaatgagcaggccgtcatcgagaggaaggagaaggagaagaaggagaagagggccctgggcaactggaagctgctggccaagggcctgctgatccgggagcggctgaagagaagatatggccccaagtctgaggccgccgccccccacacagatgctgggggcggcctgagcagtgatgaggaggagggcaccagcagccaggccgaggccgcccgcatcctggccgcctcctggccccagaacagagaagatgaggagaagcagaagctgaagggcggccccaagaagaccaagcgggagaagaaggccgccgccagccacctgttcccctttgagcagctgtag

SEQ ID NO: 22569 - DNA, 2712 bp, synthetic construct
  misc_feature 1..2712: note = Description of Artificial Sequence: Synthetic coding sequence
  source 1..2712: mol_type = other DNA
atggccaggaagagagctgctggaggagagccccggggccgggagctgcggagccagaagagcaaggccaagagcaaggcccggcgggaggaggaggaggaggatgcctttgaagatgagaagccacccaagaagagcctgctgagcaaggtgtcccagggcaagaggaagaggggctgcagccaccctgggggcagcgcagatggccctgccaagaagaaggtggccaaggtgacagtgaagtctgagaacctgaaggtgatcaaggatgaggccctgagtgatggagatgacctgcgggacttccccagcgacctgaagaaggcccaccacctgaagagaggagccaccatgaatgaagacagcaatgaggaggaggaggagagtgaaaatgactgggaggaggccaagacccgggagaggtctgagaagatcaagctggagtttgagacctacctgcggcgggccatgaagcgcttcaacaagggcgtgcatgaggacacccacaaggtgcacctgctgtgcctgctggccaacggcttctacagaaacaacatctgcagccagcctgacctgcacgccatcggcctgagcatcatcccagcccgcttcaccagggtgctgcccagagatgtggacacctactacctgagcaacctggtgaagtggttcatcggcaccttcaccgtgaatgctgagctgagcgccagcgagcaggacaacctgcagaccaccctggagaggagatttgccatctacagcgccagagatgatgaggagctggtgcacatcttcctgctgatcctgcgggccctgcagctgctgacccggctggtgctgagcctgcagcccatccccctgaagagcgccacagccaagggcaagaagcccagcaaggagcggctgacagctgaccccggcggcagcagcgagaccagcagccaggtgctggagaaccacaccaagcccaagaccagcaagggcaccaagcaggaggagacctttgccaagggcacctgccggcccagcgccaagggcaagaggaacaagggcggcaggaagaagaggagcaagcccagcagcagcgaggaggatgagggccctggggacaagcaggagaaggccacccagaggcggccccacggccgggagaggagagtggccagccgggtgtcctacaaggaggagagcggcagtgatgaggccggcagcggcagtgactttgagctgagcagcggggaggccagtgaccccagtgatgaagattctgagcccggcccccccaagcagaggaaggccccagccccccagaggaccaaggccggcagcaagagcgccagcaggacccaccggggcagccacaggaaggaccccagcctgcctgctgccagcagcagcagcagcagcagcaagaggggcaagaagatgtgcagtgatggagagaaggccgagaagaggagcattgctggcatcgaccagtggctggaggtgttctgtgagcaggaggagaagtgggtgtgtgtggactgtgtgcacggcgtggtgggccagcccctgacctgctacaagtatgccaccaagcccatgacctacgtggtgggcatcgacagtgatggctgggtgagagatgtgacccagagatatgaccctgtgtggatgacagtgaccaggaagtgccgggtggatgctgagtggtgggccgagaccctgcggccctaccagagccccttcatggaccgggagaagaaggaggacctggagttccaggccaagcacatggaccagcccctgcccacagccatcggcctgtacaagaaccaccccctgtatgccctgaagaggcacctgctgaagtatgaggccatctacccagagacagctgccatcctgggctactgccgcggggaggccgtgtacagccgggactgtgtgcacaccctgcacagccgggacacctggctgaagaaggcccgggtggtgcggctgggggaggtgccctacaagatggtgaagggcttcagcaacagagccaggaaggcccggctggccgagccccagctgcgggaggagaatgacctgggcctgtttggctactggcagacagaggagtaccagccccctgtggccgtggatggcaaggtgcccagaaatgaatttggaaatgtgtacctgttcctgcccagcatgatgcccatcggctgtgtgcagctgaacctgcccaacctgcaccgggtggccaggaagctggacatcgactgtgtgcaggccatcaccggctttgacttccatggaggctacagccaccctgtgacagatggctacatcgtgtgtgaggagttcaaggatgtgctgctgacagcctgggagaatgagcaggccgtgattgaaaggaaggagaaggagaagaaggagaagagggccctgggcaactggaagctgctggccaagggcctgctgatccgggagcggctgaagagaagatatggccccaagtctgaggccgccgccccccacacagatgctgggggcggcctgagcagtgatgaggaggagggcaccagcagccaggccgaggccgcccgcatcctggccgcctcctggccccagaaccgggaggatgaggagaagcagaagctgaagggcggccccaagaagaccaagcgggagaagaaggctgctgccagccacctgttcccctttgagcagctgtag

SEQ ID NO: 22570 - DNA, 423 bp, synthetic construct
  misc_feature 1..423: note = Description of Artificial Sequence: Synthetic coding sequence
  source 1..423: mol_type = other DNA
atggccaggaagagagctgctggaggagagccccggggccgggagctgcggagccagaagagcaaggccaagagcaaggcccggcgggaggaggaggaggaggatgcctttgaagatgagaagccacccaagaagagcctgctgagcaaggtgtcccagggcaagaggaagaggggctgcagccaccctgggggcagcgcagatggccctgccaagaagaaggtggccaaggtgacagtgaagtctgagaacctgaaggtgatcaaggatgaggccctgagtgatggagatgacctgcgggacttccccagcgacctgaagaaggcccaccacctgaagagaggagccaccatgaatgaagacagcaatgaggaggaggaggagagtgaaaatgactgggaggaggtggaggtgaagaggtag

SEQ ID NO: 22571 - DNA, 507 bp, synthetic construct
  misc_feature 1..507: note = Description of Artificial Sequence: Synthetic coding sequence
  source 1..507: mol_type = other DNA
atggccaggaagagagctgctggaggagagccccggggccgggagctgcggagccagaagagcaaggccaagagcaaggcccggcatgcctttgaagatgagaagccacccaagaagagcctgctgagcaaggtgtcccagggcaagaggaagaggggctgcagccaccctgggggcagcgcagatggccctgccaagaagaaggtggccaaggtgacagtgaagtctgagaacctgaaggtgatcaaggatgaggccctgagtgatggagatgacctgcgggacttccccagcgacctgaagaaggcccaccacctgaagagaggagccaccatgaatgaagacagcaatgaggaggaggaggagagtgaaaatgactgggaggaggtggaggagctgtctgagcctgtgctgggagatgtgcgggagagcacagccttcagccgcagcctgctgcctgtgaagcctgtggagattgaaattgagaccccagagcaggccaagtag

SEQ ID NO: 22572 - DNA, 462 bp, synthetic construct
  misc_feature 1..462: note = Description of Artificial Sequence: Synthetic coding sequence
  source 1..462: mol_type = other DNA
agcagcagcaagaggggcaagaagatgtgcagtgatggagagaaggccgagaagaggagcattgctggcatcgaccagtggctggaggtgttctgtgagcaggaggagaagtgggtgtgtgtggactgtgtgcatggagtggtgggccagcccctgacctgctacaagtatgccaccaagcccatgacctacgtggtgggcatcgacagtgatggctgggtgagagatgtgacccagagatatgaccctgtgtggatgacagtgaccaggaaatgtcgggtggatgctgagtggtgggccgagaccctgcggccctaccagagccccttcatggaccgggagaagaaggaggacctggagggcctgtgtgcccacagcgccttccagggccacgtggccgaggagagcaagagcggggaggcctggaggagcaccctgcaggatggagagcggctcttctag

SEQ ID NO: 22573 - DNA, 177 bp, synthetic construct
  misc_feature 1..177: note = Description of Artificial Sequence: Synthetic coding sequence
  source 1..177: mol_type = other DNA
atgtgcagtgatggagagaaggccgagaagaggagcattgctggcatcgaccagtggctggaggtgttctgtgagcaggaggagaagtgggtgtgtgtggactgccgctgtggcggccctgccagtgacctgctgcaggtgcgccaccaggcccatgacctgtgtggcggccactag

SEQ ID NO: 22574 - DNA, 231 bp, synthetic construct
  misc_feature 1..231: note = Description of Artificial Sequence: Synthetic coding sequence
  source 1..231: mol_type = other DNA
aaggccacccagaggcggccccacggccgggagcggcgggtggccagccgggtgtcctacaaggaggagagcggcagtgatgaagctggcagcggcagtgactttgagctgagcagtggagaggccagtgaccccagtgatgaggacagcgagcccggcccccccaagcagaggaaggccccagccccccagaggaccaaggccggcagcaagagcgccagcaggacatag

SEQ ID NO: 22575 - DNA, 849 bp, synthetic construct
  misc_feature 1..849: note = Description of Artificial Sequence: Synthetic coding sequence
  source 1..849: mol_type = other DNA
atggagggggacttctctgtgtgcaggaactgcaagagacatgtggtgtctgccaacttcaccctgcacgaggcctactgcctgcgcttcctggtgctgtgcccagaatgtgaggagcctgtgcccaaggagaccatggaggagcactgcaagctggagcaccagcaggccaatgaatgccaggagaggcctgtggagtgcaagttctgcaagctggacatgcagctgagcaagctggagctgcacgagagctactgcggcagcaggacagagctgtgccagggctgcggccagttcatcatgcacaggatgctggcccagcacagagatgtgtgccgctctgagcaggcccagctgggcaaaggagagcgcatcagcgcccctgagcgggagatctactgccactactgcaaccagatgatccctgagaacaagtacttccaccacatgggcaagtgctgcccagattctgagttcaagaagcacttccctgtgggcaaccctgagatcctgcccagcagcctgcccagccaggccgctgagaaccagaccagcaccatggagaaggatgtgcggcccaagaccaggagcatcaaccgcttccccctgcacagcgagagcagcagcaagaaggcccccaggagcaagaacaagaccctggaccccctgctgatgtctgagcccaagcccaggaccagcagccccaggggggacaaggccgcctatgacatcctgcggcgctgcagccagtgtggcatcctgctgcccctgcccatcctgaaccagcaccaggagaagtgccgctggctggccagcagcaagggcaagcaggtgaggaacttctcctag

SEQ ID NO: 22576 - DNA, 906 bp, synthetic construct
  misc_feature 1..906: note = Description of Artificial Sequence: Synthetic coding sequence
  source 1..906: mol_type = other DNA
atggagggggacttctctgtgtgcaggaactgcaagagacatgtggtgtctgccaacttcaccctgcacgaggcctactgcctgcgcttcctggtgctgtgcccagaatgtgaggagcctgtgcccaaggagaccatggaggagcactgcaagctggagcaccagcaggtgggctgcaccatgtgccagcagagcatgcagaagagcagcctggagttccacaaggccaatgaatgccaggagaggcctgtggagtgcaagttctgcaagctggacatgcagctgagcaagctggagctgcacgagagctactgcggcagcaggacagagctgtgccagggctgcggccagttcatcatgcacaggatgctggcccagcacagagatgtgtgccgctctgagcaggcccagctgggcaagggggagcgcatcagcgcccctgagcgggagatctactgccactactgcaaccagatgatccctgagaacaagtacttccaccacatgggcaagtgctgcccagacagcgagttcaagaagcacttccctgtgggcaaccctgagatcctgcccagcagcctgcccagccaggccgctgagaaccagaccagcaccatggagaaggatgtgcggcccaagaccaggagcatcaaccgcttccccctgcacagcgagagcagcagcaagaaggcccccaggagcaagaacaagaccctggaccccctgctgatgtctgagcccaagcccaggaccagcagccccaggggggacaaggccgcctatgacatcctgcggcgctgcagccagtgtggcatcctgctgcccctgcccatcctgaaccagcaccaggagaagtgccgctggctggccagcagcaagggcaagcaggtgaggaacttctcctag

SEQ ID NO: 22577 - DNA, 600 bp, synthetic construct
  misc_feature 1..600: note = Description of Artificial Sequence: Synthetic coding sequence
  source 1..600: mol_type = other DNA
atgagcctgcactacggctgctgctgcccagaatgtacctctgtggccatcaaggagatgatgtgggtgatccggccccgggtggcctgtgtggtgaaggatgctggcagcgctggggagcgcatcagcgcccctgagcgggagatctactgccactactgcaaccagatgatccctgagaacaagtacttccaccacatgggcaagtgctgcccagacagcgagttcaagaagcacttccctgtgggcaaccctgagatcctgcccagcagcctgcccagccaggccgctgagaaccagaccagcaccatggagaaggatgtgcggcccaagaccaggagcatcaaccgcttccccctgcacagcgagagcagcagcaagaaggcccccaggagcaagaacaagaccctggaccccctgctgatgtctgagcccaagcccaggaccagcagccccaggggggacaaggccgcctatgacatcctgcggcgctgcagccagtgtggcatcctgctgcccctgcccatcctgaaccagcaccaggagaagtgccgctggctggccagcagcaagggcaagcaggtgaggaacttctcctag

SEQ ID NO: 22578 - DNA, 495 bp, synthetic construct
  misc_feature 1..495: note = Description of Artificial Sequence: Synthetic coding sequence
  source 1..495: mol_type = other DNA
atggagggggacttctctgtgtgcaggaactgcaagagacatgtggtgtctgccaacttcaccctgcacgaggcctactgcctgcgcttcctggtgctgtgcccagaatgtgaggagcctgtgcccaaggagaccatggaggagcactgcaagctggagcaccagcaggtgggctgcaccatgtgccagcagagcatgcagaagagcagcctggagttccacaaggccaatgaatgccaggagaggcctgtggagtgcaagttctgcaagctggacatgcagctgagcaagctggagctgcacgagagctactgcggcagcaggacagagctgtgccagggctgcggccagttcatcatgcacaggatgctggcccagcacagagatgtgtgccgctctgagcaggcccagctgggcaaggagaccagcccagaccccgggaagtgcctgagcatcaccgtggccgccgccctgagcgcccacctgtggccctag

SEQ ID NO: 22579 - DNA, 906 bp, synthetic construct
  misc_feature 1..906: note = Description of Artificial Sequence: Synthetic coding sequence
  source 1..906: mol_type = other DNA
atggagggggacttctctgtgtgcaggaactgcaagagacatgtggtgtctgccaacttcaccctgcacgaggcctactgcctgcgcttcctggtgctgtgcccagaatgtgaggagcctgtgcccaaggagaccatggaggagcactgcaagctggagcaccagcaggtgtctgagatgggcagcggccggggcaagtgcagcatcctgcctgccaggaagaaggccaatgaatgccaggagaggcctgtggagtgcaagttctgcaagctggacatgcagctgagcaagctggagctgcacgagagctactgcggcagcaggacagagctgtgccagggctgcggccagttcatcatgcacaggatgctggcccagcacagagatgtgtgccgctctgagcaggcccagctgggcaagggggagcgcatcagcgcccctgagcgggagatctactgccactactgcaaccagatgatccctgagaacaagtacttccaccacatgggcaagtgctgcccagacagcgagttcaagaagcacttccctgtgggcaaccctgagatcctgcccagcagcctgcccagccaggccgctgagaaccagaccagcaccatggagaaggatgtgcggcccaagaccaggagcatcaaccgcttccccctgcacagcgagagcagcagcaagaaggcccccaggagcaagaacaagaccctggaccccctgctgatgtctgagcccaagcccaggaccagcagccccaggggggacaaggccgcctatgacatcctgcggcgctgcagccagtgtggcatcctgctgcccctgcccatcctgaaccagcaccaggagaagtgccgctggctggccagcagcaagggcaagcaggtgaggaacttctcctag

SEQ ID NO: 22580 - DNA, 1494 bp, synthetic construct
  misc_feature 1..1494: note = Description of Artificial Sequence: Synthetic coding sequence
  source 1..1494: mol_type = other DNA
atgaccttcaacagctttgagggcagcaagacctgtgtgcctgctgacatcaacaaggaggaggagtttgtggaggagttcaaccggctgaagacctttgccaacttccccagcggcagccctgtgtctgccagcaccctggcccgggccggcttcctgtacacaggagagggggacacagtgcgctgcttcagctgccacgccgctgtggaccgctggcagtatggagacagcgctgtgggccgccacaggaaggtgagccccaactgccgcttcatcaatggcttctacctggagaacagcgccacccagagcaccaacagcggcatccagaatggccagtacaaggtggagaactacctgggcagccgggaccactttgccctggaccggcccagcgagacccatgctgactacctgctgaggacaggccaggtggtggacatcagtgacaccatctaccccaggaacccagccatgtacagcgaggaggcccggctgaagagcttccagaactggccagactatgcccacctgaccccccgggagctggccagcgctggcctgtactacacaggcatcggggaccaggtgcagtgcttctgctgcggcggcaagctgaagaactgggagccctgtgaccgggcctggagcgagcacagaagacacttccccaactgcttctttgtgctgggcaggaacctgaacatccgctctgagagtgatgctgtgtccagtgacaggaacttccccaacagcaccaacctgcccaggaaccccagcatggctgactatgaggcccgcatcttcaccttcggcacctggatctacagcgtgaacaaggagcagctggcccgggccggcttctacgccctgggggagggggacaaggtgaagtgcttccactgcggcggcggcctgacagactggaagcccagcgaggacccctgggagcagcacgccaagtggtacccaggctgcaagtacctgctggagcagaagggccaggagtacatcaacaacatccacctgacccacagcctggaggagtgcctggtgaggaccacagagaagacccccagcctgaccaggagaattgatgacaccatcttccagaaccccatggtgcaggaggccatccgcatgggcttctccttcaaggacatcaagaagatcatggaggagaagatccagatcagcggcagcaactacaagagcctggaggtgctggtggccgacctggtgaatgcccagaaggacagcatgcaggatgagagcagccagaccagcctgcagaaggagatcagcacagaggagcagctgcggcggctgcaggaggagaagctgtgcaagatctgcatggacaggaacatcgccatcgtgtttgtgccctgtggccacctggtgacctgcaagcagtgtgccgaggccgtggacaagtgccccatgtgctacaccgtcatcaccttcaagcagaagatcttcatgtcctag

SEQ ID NO: 22581 - DNA, 1494 bp, synthetic construct; identical to SEQ ID NO: 22580
  misc_feature 1..1494: note = Description of Artificial Sequence: Synthetic coding sequence
  source 1..1494: mol_type = other DNA

SEQ ID NO: 22582 - DNA, 51 bp, synthetic construct
  misc_feature 1..51: note = Description of Artificial Sequence: Synthetic coding sequence
  source 1..51: mol_type = other DNA
atgaccttcaacagctttgagggcagcaagacctgtgtgcctgctgactag

SEQ ID NO: 22583 - DNA, 471 bp, synthetic construct
  misc_feature 1..471: note = Description of Artificial Sequence: Synthetic coding sequence
  source 1..471: mol_type = other DNA
atgaccttcaacagctttgagggcagcaagacctgtgtgcctgctgacatcaacaaggaggaggagtttgtggaggagttcaaccggctgaagacctttgccaacttccccagcggcagccctgtgtctgccagcaccctggcccgggccggcttcctgtacacaggagagggggacacagtgcgctgcttcagctgccacgccgctgtggaccgctggcagtatggagacagcgctgtgggccgccacaggaaggtgagccccaactgccgcttcatcaatggcttctacctggagaacagcgccacccagagcaccaacagcggcatccagaatggccagtacaaggtggagaactacctgggcagccgggaccactttgccctggaccggcccagcgagacccatgctgactacctgctgaggacaggccaggtggtggacatcagtgacaccatctaccccaggtag

SEQ ID NO: 22584 - DNA, 1494 bp, synthetic construct; identical to SEQ ID NO: 22580
  misc_feature 1..1494: note = Description of Artificial Sequence: Synthetic coding sequence
  source 1..1494: mol_type = other DNA

SEQ ID NO: 22585 - DNA, 2568 bp, synthetic construct
  misc_feature 1..2568: note = Description of Artificial Sequence: Synthetic coding sequence
  source 1..2568: mol_type = other DNA
atggtggtgatggcccggctgagcaggcctgagaggccagacctggtgtttgaggaggaggacctgccctatgaggaggagatcatgaggaaccagttctctgtgaagtgctggctgcgctacatcgagttcaagcagggcgcccccaagccccggctgaaccagctgtatgagcgggccctgaagctgctgccctgcagctacaagctgtggtaccgctacctgaaggcccggcgggcccaggtgaagcaccgctgtgtgacagatcctgcctatgaagatgtgaacaactgccacgagcgggcctttgtgttcatgcacaagatgccccggctgtggctggactactgccagttcctgatggaccagggccgggtgacccacaccaggaggacctttgaccgggccctgcgggccctgcccatcacccagcacagccgcatctggcccctgtacctgcgcttcctgcggagccaccccctgcctgagacagctgtgcggggctaccgccgcttcctgaagctgagccctgagagcgctgaggagtacatcgagtacctgaagagcagtgaccggctggatgaggccgcccagaggctggccaccgtggtgaatgatgaaagatttgtgtccaaggccggcaagagcaactaccagctgtggcatgagctgtgtgacctgatcagccagaacccagacaaggtgcagagcctgaatgtggatgccatcatccggggcggcctgacccgcttcacagaccagctgggcaagctgtggtgcagcctggccgactactacatccgcagcggccactttgagaaggccagagatgtgtatgaggaggccatcagaacagtgatgacagtgcgggacttcacccaggtgtttgacagctatgcccagtttgaggagagcatgattgctgccaagatggagacagccagcgagctgggccgggaggaggaggatgatgtggacctggagctgcggctggccaggtttgagcagctgatcagccggcggcccctgctgctgaacagcgtgctgctgcggcagaacccccaccacgtgcatgagtggcacaagagggtggccctgcaccagggccggccccgggagatcatcaacacctacacagaagctgtgcagacagtggaccccttcaaggccaccgggaagccccacaccctgtgggtggcctttgccaagttctatgaggacaatggccagctggatgatgcccgggtcatcctggagaaggccaccaaggtgaacttcaagcaggtggatgacctggcctctgtgtggtgccagtgtggggagctggagctgcggcatgaaaattatgatgaggccctgcggctgctgaggaaggccacagccctgcctgccaggagagctgagtactttgatggcagcgagcctgtgcagaacagagtgtacaagagcctgaaggtgtggagcatgctggccgacctggaggagagcctgggcaccttccagagcaccaaggctgtgtatgaccgcatcctggacctgagaattgccaccccccagatcgtcatcaactatgccatgttcctggaggagcacaagtactttgaggagagcttcaaggcctatgagcggggcatcagcctcttcaagtggcccaacgtgtctgacatctggagcacctacctgaccaagttcatcgcccgctatggaggcaggaagctggagcgggcccgggacctgtttgagcaggccctggatggctgcccccccaagtatgccaagaccctgtacctgctgtatgcccagctggaggaggagtggggcctggcccggcatgccatggctgtgtatgaaagagccaccagggctgtggagcccgcccagcagtatgacatgttcaacatctacatcaagagagctgctgagatctatggagtgacccacacccggggcatctaccagaaggccatcgaggtgctgagtgatgaacatgcccgggagatgtgcctgcgctttgctgacatggagtgcaagctgggggagattgaccgggcccgggccatctacagcttctgcagccagatctgtgaccccaggaccaccggggccttctggcagacctggaaggactttgaggtgcgccacggcaatgaagacaccatcaaggagatgctgcgcatcagaagatctgtgcaggccacctacaacacccaggtgaacttcatggccagccagatgctgaaggtgtctggcagcgccactggaacagtgtctgacctggcccctggccagagcggcatggatgacatgaagctgctggagcagagagctgagcagctggccgctgaggccgagcgggaccagcccctgcgggcccagagcaagatcctgtttgtgcggagtgatgccagccgggaggagctggccgagctggcccagcaggtgaaccctgaggagatccagctgggagaagatgaagatgaagatgagatggacctggagcccaatgaggtgcggctggagcagcagagcgtgcctgctgctgtgtttggcagcctgaaggaggactag

SEQ ID NO: 22586 - DNA, 2559 bp, synthetic construct
  misc_feature 1..2559: note = Description of Artificial Sequence: Synthetic coding sequence
  source 1..2559: mol_type = other DNA
atggcccggctgagcaggcctgagaggccagacctggtgtttgaggaggaggacctgccctatgaggaggagatcatgaggaaccagttctctgtgaagtgctggctgcgctacatcgagttcaagcagggcgcccccaagccccggctgaaccagctgtatgaaagagccctgaagctgctgccctgcagctacaagctgtggtaccgctacctgaaggcccggcgggcccaggtgaagcaccgctgtgtgacagatcctgcctatgaagatgtgaacaactgccacgagcgggcctttgtgttcatgcacaagatgccccggctgtggctggactactgccagttcctgatggaccagggccgggtgacccacaccaggaggacctttgaccgggccctgcgggccctgcccatcacccagcacagccgcatctggcccctgtacctgcgcttcctgcggagccaccccctgcctgagacagctgtgcggggctaccgccgcttcctgaagctgagccctgagagcgctgaggagtacatcgagtacctgaagagcagtgaccggctggatgaagctgcccagaggctggccaccgtggtgaatgatgaaagatttgtgtccaaggccggcaagagcaactaccagctgtggcatgagctgtgtgacctgatcagccagaacccagacaaggtgcagagcctgaatgtggatgccatcatccggggcggcctgacccgcttcacagaccagctgggcaagctgtggtgcagcctggccgactactacatccgcagcggccactttgagaaggccagagatgtgtatgaggaggccatcagaacagtgatgacagtgcgggacttcacccaggtgtttgacagctatgcccagtttgaggagagcatgattgctgccaagatggagacagccagcgagctgggccgggaggaggaggatgatgtggacctggagctgcggctggccaggtttgagcagctgatcagcagaagacccctgctgctgaacagcgtgctgctgcggcagaacccccaccacgtgcatgagtggcacaagagggtggccctgcaccagggccggccccgggagatcatcaacacctacacagaggccgtgcagacagtggaccccttcaaggccaccgggaagccccacaccctgtgggtggcctttgccaagttctatgaagataatggccagctggatgatgcccgggtcatcctggagaaggccaccaaggtgaacttcaagcaggtggatgacctggcctctgtgtggtgccagtgtggggagctggagctgcggcatgagaactatgatgaggccctgcggctgctgaggaaggccacagccctgcctgcccggcgggcagagtactttgatggcagcgagcctgtgcagaacagagtgtacaagagcctgaaggtgtggagcatgctggccgacctggaggagagcctgggcaccttccagagcaccaaggctgtgtatgaccgcatcctggacctgcgcatcgccaccccccagatcgtcatcaactatgccatgttcctggaggagcacaagtactttgaggagagcttcaaggcctatgaaagaggcatcagcctcttcaagtggcccaacgtgtctgacatctggagcacctacctgaccaagttcatcgcccgctatggaggcaggaagctggagcgggcccgggacctgtttgagcaggccctggatggctgcccccccaagtatgccaagaccctgtacctgctgtatgcccagctggaggaggagtggggcctggcccggcatgccatggctgtgtatgagcgggccaccagggctgtggagcccgcccagcagtatgacatgttcaacatctacatcaagagagctgctgagatctacggcgtgacccacacccggggcatctaccagaaggccatcgaggtgctgagtgatgagcacgcccgggagatgtgcctgcgctttgctgacatggagtgcaagctgggggagattgaccgggcccgggccatctacagcttctgcagccagatctgtgaccccaggaccactggagccttctggcagacctggaaggactttgaggtgagacatggaaatgaagacaccatcaaggagatgctgcgcatccgccgctctgtgcaggccacctacaacacccaggtgaacttcatggccagccagatgctgaaggtgtctggcagcgccaccggcaccgtgtctgacctggcccctggccagagcggcatggatgacatgaagctgctggagcagagagctgagcagctggccgctgaggccgagcgggaccagcccctgcgggcccagagcaagatcctgtttgtgcggagtgatgccagccgggaggagctggccgagctggcccagcaggtgaaccctgaggagatccagctgggggaggatgaagatgaagatgagatggacctggagcccaatgaggtgcggctggagcagcagagcgtgcctgctgctgtgtttggcagcctgaaggaggactag

SEQ ID NO: 22587 - DNA, 1902 bp, synthetic construct
  misc_feature 1..1902: note = Description of Artificial Sequence: Synthetic coding sequence
  source 1..1902: mol_type = other DNA
atgcctgagatccggctgcggcacgtggtgtcctgcagcagccaggacagcacccactgtgccgagaacctgctgaaggctgacacctacaggaagtggagggctgccaaggccggggagaagaccatctctgtggtgctgcagctggagaaggaggagcagatccacagcgtggacattggaaatgatggcagcgcctttgtggaggtgctggtgggcagcagcgctgggggcgctggggagcaggactatgaggtgctgctggtgaccagcagcttcatgagccccagcgagagccgcagcggcagcaaccccaacagagtgaggatgtttggaccagacaagctggtgcgggctgctgctgagaagcgctgggacagagtgaagatcgtgtgcagccagccctacagcaaggacagccccttcggcctgagctttgtgcgcttccacagccccccagacaaggatgaggccgaggcccccagccagaaggtgacagtgaccaagctgggccagttccgggtgaaggaggaggatgaaagtgccaacagcctgcggcctggggccctcttcttcagccgcatcaacaagaccagccctgtgacagccagtgaccctgctggccccagctatgctgctgccaccctgcaggccagcagcgctgccagcagcgccagccctgtgtcccgggccatcggcagcaccagcaagccccaggagagccccaagggcaagaggaagctggacctgaaccaggaggagaagaagacccccagcaagcccccagcccagctgagccccagcgtgcccaagaggcccaagctgcctgcccccaccaggaccccagccacagcccctgtgcctgcccgggcccagggcgctgtgacaggcaagcccagaggagagggcacagagccccggcggcccagggctggccctgaggagctgggcaagatcctgcagggcgtggtggtggtgctgagcggcttccagaaccccttccgctctgagctgcgggacaaggccctggagctgggcgccaagtacagaccagactggacccgggacagcacccacctgatctgtgcctttgccaacacccccaagtacagccaggtgctgggcctgggcggccgcatcgtgaggaaggagtgggtgctggactgccacaggatgagaagaaggctgcccagccagcgctacctgatggccggccctggcagcagcagcgaggaggatgaggccagccacagcggcggcagcggagatgaggcccccaagctgccccagaagcagccccagaccaagaccaagcccacccaggccgccggccccagcagcccccagaagccacccaccccagaggagaccaaggccgccagccctgtgctgcaggaggacatcgacatcgagggcgtgcagagcgagggccaggacaacggggctgaagattctggggacacagaagatgagctgcggcgggtggccgagcagaaggagcaccggctgcccccaggccaggaggagaatggagaggacccctatgccggcagcacagatgaaaatacagattctgaggagcaccaggagcccccagacctgcctgtgcctgagctgcctgacttcttccagggcaagcacttcttcctgtatggagagttccctggagatgaaagaaggaagctgatccgctacgtgacagccttcaacggggagctggaggacaacatgtctgacagagtgcagtttgtgatcacagcccaggagtgggaccccagctttgaggaggccctgatggacaaccccagcctggcctttgtgcggccccgctggatctacagctgcaatgagaagcagaagctgctgccccaccagctgtatggagtggtgccccaggcctag

SEQ ID NO: 22588 - DNA, 1944 bp, synthetic construct
  misc_feature 1..1944: note = Description of Artificial Sequence: Synthetic coding sequence
  source 1..1944: mol_type = other DNA
agcaccagcagcttctggccaggagaggcccatgatgtggacatgcctgagatccggctgcggcacgtggtgtcctgcagcagccaggacagcacccactgtgccgagaacctgctgaaggctgacacctacaggaagtggagggctgccaaggccggggagaagaccatctctgtggtgctgcagctggagaaggaggagcagatccacagcgtggacattggaaatgatggcagcgcctttgtggaggtgctggtgggcagcagcgctgggggcgctggggagcaggactatgaggtgctgctggtgaccagcagcttcatgagccccagcgagagccgcagcggcagcaaccccaacagagtgaggatgtttggaccagacaagctggtgcgggctgctgctgagaagcgctgggacagagtgaagatcgtgtgcagccagccctacagcaaggacagccccttcggcctgagctttgtgcgcttccacagccccccagacaaggatgaggccgaggcccccagccagaaggtgacagtgaccaagctgggccagttccgggtgaaggaggaggatgaaagtgccaacagcctgcggcctggggccctcttcttcagccgcatcaacaagaccagccctgtgacagccagtgaccctgctggccccagctatgctgctgccaccctgcaggccagcagcgctgccagcagcgccagccctgtgtcccgggccatcggcagcaccagcaagccccaggagagccccaagggcaagaggaagctggacctgaaccaggaggagaagaagacccccagcaagcccccagcccagctgagccccagcgtgcccaagaggcccaagctgcctgcccccaccaggaccccagccacagcccctgtgcctgcccgggcccagggcgctgtgacaggcaagcccagaggagagggcacagagccccggcggcccagggctggccctgaggagctgggcaagatcctgcagggcgtggtggtggtgctgagcggcttccagaaccccttccgctctgagctgcgggacaaggccctggagctgggcgccaagtacagaccagactggacccgggacagcacccacctgatctgtgcctttgccaacacccccaagtacagccaggtgctgggcctgggcggccgcatcgtgaggaaggagtgggtgctggactgccacaggatgagaagaaggctgcccagccagcgctacctgatggccggccctggcagcagcagcgaggaggatgaggccagccacagcggcggcagcggagatgaggcccccaagctgccccagaagcagccccagaccaagaccaagcccacccaggccgccggccccagcagcccccagaagccacccaccccagaggagaccaaggccgccagccctgtgctgcaggaggacatcgacatcgagggcgtgcagagcgagggccaggacaacggggctgaagattctggggacacagaagatgagctgcggcgggtggccgagcagaaggagcaccggctgcccccaggccaggaggagaatggagaggacccctatgccggcagcacagatgaaaatacagattctgaggagcaccaggagcccccagacctgcctgtgcctgagctgcctgacttcttccagggcaagcacttcttcctgtatggagagttccctggagatgaaagaaggaagctgatccgctacgtgacagccttcaacggggagctggaggacaacatgtctgacagagtgcagtttgtgatcacagcccaggagtgggaccccagctttgaggaggccctgatggacaaccccagcctggcctttgtgcggccccgctggatctacagctgcaatgagaagcagaagctgctgccccaccagctgtatggagtggtgccccaggcctag

SEQ ID NO: 22589 - DNA, 1203 bp, synthetic construct
  misc_feature 1..1203: note = Description of Artificial Sequence: Synthetic coding sequence
  source 1..1203: mol_type = other DNA
atgcctgagatccggctgcggcacgtggtgtcctgcagcagccaggacagcacccactgtgccgagaacctgctgaaggctgacacctacaggaagtggagggctgccaaggccggggagaagaccatctctgtggtgctgcagctggagaaggaggagcagatccacagcgtggacattggaaatgatggcagcgcctttgtggaggtgctggtgggcagcagcgctgggggcgctggggagcaggactatgaggtgctgctggtgaccagcagcttcatgagccccagcgagagccgcagcggcagcaaccccaacagagtgaggatgtttggaccagacaagctggtgcgggctgctgctgagaagcgctgggacagagtgaagatcgtgtgcagccagccctacagcaaggacagccccttcggcctgagctttgtgcgcttccacagccccccagacaaggatgaggccgaggcccccagccagaaggtgacagtgaccaagctgggccagttccgggtgaaggaggaggatgaaagtgccaacagcctgcggcctggggccctcttcttcagccgcatcaacaagaccagccctgtgacagccagtgaccctgctggccccagctatgctgctgccaccctgcaggccagcagcgctgccagcagcgccagccctgtgtcccgggccatcggcagcaccagcaagccccaggagagccccaagggcaagaggaagctggacctgaaccaggaggagaagaagacccccagcaagcccccagcccagctgagccccagcgtgcccaagaggcccaagctgcctgcccccaccaggaccccagccacagcccctgtgcctgcccgggcccagggcgctgtgacaggcaagcccagaggagagggcacagagccccggcggcccagggctggccctgaggagctgggcaagatcctgcagggcgtggtggtggtgctgagcggcttccagaaccccttccgctctgagctgcgggacaaggccctggagctgggcgccaagtacagaccagactggacccgggacagcacccacctgatctgtgcctttgccaacacccccaagctgccccagaaggtgcccccccagcacaccccagaccagaaccaggcccacagcggctcctggacccagctgaccccagaggcccccaacccctag

SEQ ID NO: 22590 - DNA, 1809 bp, synthetic construct
  misc_feature 1..1809: note = Description of Artificial Sequence: Synthetic coding sequence
  source 1..1809: mol_type = other DNA
atgcctgagatccggctgcggcacgtggtgtcctgcagcagccaggacagcctggagaaggaggagcagatccacagcgtggacattggaaatgatggcagcgcctttgtggaggtgctggtgggcagcagcgctggaggagctggggagcaggactatgaggtgctgctggtgaccagcagcttcatgagccccagcgagagccgcagcggcagcaaccccaacagagtgaggatgtttggaccagacaagctggtgcgggctgctgctgagaagcgctgggacagagtgaagatcgtgtgcagccagccctacagcaaggacagccccttcggcctgagctttgtgcgcttccacagccccccagacaaggatgaagctgaggcccccagccagaaggtgacagtgaccaagctgggccagttccgggtgaaggaggaggatgagagcgccaacagcctgcggcctggggccctcttcttcagccgcatcaacaagaccagccctgtgacagccagtgaccctgctggccccagctatgctgctgccaccctgcaggccagcagcgctgccagcagcgccagccctgtgtcccgggccatcggcagcaccagcaagccccaggagagccccaagggcaagaggaagctggacctgaaccaggaggagaagaagacccccagcaagcccccagcccagctgagccccagcgtgcccaagaggcccaagctgcctgcccccaccaggaccccagccacagcccctgtgcctgcccgggcccagggcgctgtgacaggcaagcccagaggagagggcacagagccccggcggccccgggccggccctgaggagctgggcaagatcctgcagggcgtggtggtggtgctgagcggcttccagaaccccttccgctctgagctgcgggacaaggccctggagctgggcgccaagtacagaccagactggacccgggacagcacccacctgatctgtgcctttgccaacacccccaagtacagccaggtgctgggcctgggcggcagaattgtgaggaaggagtgggtgctggactgccacaggatgagaagaaggctgcccagccagcgctacctgatggccggccctggcagcagcagtgaagaagatgaggccagccacagcggcggcagcggagatgaggcccccaagctgccccagaagcagccccagaccaagaccaagcccacccaggccgccggccccagcagcccccagaagccacccaccccagaggagaccaaggccgccagccctgtgctgcaggaggacattgatattgaaggagtgcagagcgagggccaggacaatggagctgaggacagcggggacacagaagatgagctgcggcgggtggccgagcagaaggagcaccggctgcccccaggccaggaggagaatggagaggacccctatgccggcagcacagatgagaacacagacagcgaggagcaccaggagcccccagacctgcctgtgcctgagctgcctgacttcttccagggcaagcacttcttcctgtatggagagttccctggagatgagaggaggaagctgatccgctacgtgacagccttcaatggagagctggaggacaacatgtctgacagagtgcagtttgtgatcacagcccaggagtgggaccccagctttgaggaggccctgatggacaaccccagcctggcctttgtgcggccccgctggatctacagctgcaatgagaagcagaagctgctgccccaccagctgtatggagtggtgccccaggcctag

SEQ ID NO: 22591 - DNA, 843 bp, synthetic construct
  misc_feature 1..843: note = Description of Artificial Sequence: Synthetic coding sequence
  source 1..843: mol_type = other DNA
atgtgcagcgccttccacagagctgagagcggcacagagctgctggcccggctggagggccgcagcagcctgaaggagattgagcccaacctgtttgctgatgaggacagccctgtgcacggggacatcctggagttccacggccctgagggcaccgggaagacagagatgctgtaccacctgacagcccgctgcatcctgcccaagtctgagggcggcctggaggtggaggtgctcttcatcgacacagactaccactttgacatgctgcggctggtgaccatcctggagcaccggctgagccagagcagcgaggagatcatcaagtactgcctgggccgcttcttcctggtgtactgcagcagcagcacccacctgctgctgaccctgtacagcctggagagcatgttctgcagccaccccagcctgtgcctgctgatcctggacagcctgagcgccttctactggattgacagagtgaatggaggagagagcgtgaacctgcaggagagcaccctgaggaagtgcagccagtgcctggagaagctggtgaatgactaccgcctggtgctgtttgccaccacccagaccatcatgcagaaggccagcagcagcagcgaggagcccagccacgccagccggcggctgtgtgatgtggacatcgactaccggccctacctgtgcaaggcctggcagcagctggtgaagcacaggatgttcttcagcaagcaggatgacagccagagcagcaaccagttcagcctggtgagccgctgcctgaagagcaacagcctgaagaagcacttcttcatcatcggggagagcggcgtggagttctgctag

SEQ ID NO: 22592 - DNA, 1041 bp, synthetic construct
  misc_feature 1..1041: note = Description of Artificial Sequence: Synthetic coding sequence
  source 1..1041: mol_type = other DNA
atggacctggacctgctggacctgaacccccgcatcatcgccgccatcaagaaggccaagctgaagtctgtgaaggaggtgctgcacttcagcggccctgacctgaagaggctgaccaacctgagcagccctgaggtgtggcacctgctgaggacagccagcctgcacctgcggggcagcagcatcctgacagccctgcagctgcaccagcagaaggagcgcttccccacccagcaccagaggctgagcctgggctgccctgtgctggatgccctgctgcggggcggcctgcccctggatggcatcacagagctggccggccgcagcagcgctgggaagacccagctggccctgcagctgtgcctggccgtgcagttcccccggcagcacggcggcctggaggccggggctgtgtacatctgcacagaagatgccttcccccacaagaggctgcagcagctgatggcccagcagccccggctgaggacagatgtgcctggagagctgctgcagaagctgcgcttcggcagccagatcttcattgaacatgtggctgatgtggacaccctgctggagtgtgtgaacaagaaggtgcctgtgctgctgagccggggcatggcccggctggtggtgattgacagcgtggccgcccccttccgctgtgaatttgacagccaggccagcgccccccgggcccggcacctgcagagcctgggcgccaccctgcgggagctgagcagcgccttccagagccctgtgctgtgcatcaaccaggtgacagaggccatggaggagcagggcgccgcccacggccccctgggcttctgggatgagcgggtgtccccagccctgggcatcacctgggccaaccagctgctggtgcggctgctggccgaccggctgcgggaggaggaggccgccctgggctgcccagcccggaccctgcgggtgctgagcgccccccacctgccccccagcagctgcagctacaccatctctgctgagggcgtgcggggcaccccaggcacccagagccactag

SEQ ID NO: 22593 - DNA, 1041 bp, synthetic construct; identical to SEQ ID NO: 22592
  misc_feature 1..1041: note = Description of Artificial Sequence: Synthetic coding sequence
  source 1..1041: mol_type = other DNA

SEQ ID NO: 22594 - DNA, 1041 bp, synthetic construct; identical to SEQ ID NO: 22592
  misc_feature 1..1041: note = Description of Artificial Sequence: Synthetic coding sequence
  source 1..1041: mol_type = other DNA

SEQ ID NO: 22595 - DNA, 144 bp, synthetic construct
  misc_feature 1..144: note = Description of Artificial Sequence: Synthetic coding sequence
  source 1..144: mol_type = other DNA
atggacctggacctgctggacctgaacccccgcatcatcgccgccatcaagaaggccaagctgaagtctgtgaaggaggtgctgcacttcagcggccctgacctgaagaggctgaccaacctgagcagccctgaggtgtggtag

SEQ ID NO: 22596 - DNA, 138 bp, synthetic construct
  misc_feature 1..138: note = Description of Artificial Sequence: Synthetic coding sequence
  source 1..138: mol_type = other DNA
atggacctggacctgctggacctgaacccccgcatcatcgccgccatcaagaaggccaagctgaagtctgtgaaggaggtgctgcacttcagcggccctgacctgaagaggctgaccaacctgagcagccctgagtag

SEQ ID NO: 22597 - DNA, 1041 bp, synthetic construct; identical to SEQ ID NO: 22592
  misc_feature 1..1041: note = Description of Artificial Sequence: Synthetic coding sequence
  source 1..1041: mol_type = other DNA

SEQ ID NO: 22598 - DNA, 1041 bp, synthetic construct; identical to SEQ ID NO: 22592
  misc_feature 1..1041: note = Description of Artificial Sequence: Synthetic coding sequence
  source 1..1041: mol_type = other DNA

SEQ ID NO: 22599 - DNA, 309 bp, synthetic construct
  misc_feature 1..309: note = Description of Artificial Sequence: Synthetic coding sequence
  source 1..309: mol_type = other DNA
atggacctggacctgctggacctgaacccccgcatcatcgccgccatcaagaaggccaagctgaagtctgtgaaggaggtgctgcacttcagcggccctgacctgaagaggctgaccaacctgagcagccctgaggtgtggcacctgctgaggacagccagcctgcacctgcggggcagcagcatcctgacagccctgcagctgcaccagcagaaggagcgcttccccacccagcaccagaggctgagcctgggctgccctgtgctggatgccctgctgcggggcggcctgcccctggatggcatctag

SEQ ID NO: 22600 - DNA, 186 bp, synthetic construct
  misc_feature 1..186: note = Description of Artificial Sequence: Synthetic coding sequence
  source 1..186: mol_type = other DNA
atggacctggacctgctggacctgaacccccgcatcatcgccgccatcaagaaggccaagctgaagtctgtgaaggaggtgctgcacttcagcggccctgacctgaagaggctgaccaacctgagcagccctgaggtgtggcacctgctgaggacagccagcctgcacctgcggggcagcagctag

SEQ ID NO: 22601 - DNA, 339 bp, synthetic construct
  misc_feature 1..339: note = Description of Artificial Sequence: Synthetic coding sequence
  source 1..339: mol_type = other DNA
atggacctggacctgctggacctgaacccccgcatcatcgccgccatcaagaaggccaagctgaagtctgtgaaggaggtgctgcacttcagcggccctgacctgaagaggctgaccaacctgagcagccctgaggtgtggcacctgctgaggacagccagcctgcacctgcggggcagcagcatcctgacagccctgcagctgcaccagcagaaggagcgcttccccacccagcaccagaggctgagcctgggctgccctgtgctggatgccctgctgcggggcggcctgcccctggatggcatcacagagctggccggccgcagcagcgctggatag

SEQ ID NO: 22602 - DNA, 1005 bp, synthetic construct
  misc_feature 1..1005: note = Description of Artificial Sequence: Synthetic coding sequence
  source 1..1005: mol_type = other DNA
atggagaggaagatcagccgcatccacctggtgtctgagcccagcatcacccacttcctgcaggtgtcctgggagaagaccctggagagcggcttcgtcatcaccctgacagatggccacagcgcctggacaggcaccgtgtctgagagcgagatcagccaggaggctgatgacatggccatggagaagggcaagtatgtgggggagctgaggaaggccctgctgagcggggccggccctgcagatgtgtacaccttcaacttcagcaaggagagctgctacttcttctttgagaagaacctgaaggatgtgtccttccggctgggcagcttcaacctggagaaggtggagaacccagctgaggtgatccgggagctgatctgctactgcctggacaccatcgccgagaaccaggccaagaatgagcacctgcagaaggaaaatgaaaggctgctgcgggactggaatgatgtgcagggccgctttgagaagtgtgtgtctgccaaggaggccctggagacagacctgtacaagcgcttcatcctggtgctgaatgagaagaagaccaagatccgcagcctgcacaacaagctgctgaatgctgcccaggagcgggagaaggacatcaagcaggagggggagacagccatctgcagcgagatgacagctgaccgggaccctgtgtatgatgagagcacagatgaggagagcgagaaccagacagacctgagcggcctggccagcgctgctgtgtccaaggatgacagcatcatcagcagcctggatgtgacagacatcgcccccagcaggaagaggcggcagaggatgcagaggaacctgggcacagagcccaagatggccccccaggagaaccagctgcaggagaaggagaagccagacagcagcctgcctgagaccagcaagaaggagcacatctctgctgagaacatgagcctggagaccctgaggaacagcagccctgaggacctgtttgatgagatctag

SEQ ID NO: 22603 - DNA, 1011 bp, synthetic construct
  misc_feature 1..1011: note = Description of Artificial Sequence: Synthetic coding sequence
  source 1..1011: mol_type = other DNA
atggagaggaagatcagccgcatccacctggtgtctgagcccagcatcacccacttcctgcaggtgtcctgggagaagaccctggagagcggcttcgtcatcaccctgacagatggccacagcgcctggacaggcaccgtgtctgagagcgagatcagccaggaggctgatgacatggccatggagaagggcaagtatgtgggggagctgaggaaggccctgctgagcggggccggccctgcagatgtgtacaccttcaacttcagcaaggagagctgctacttcttctttgagaagaacctgaaggatgtgtccttccggctgggcagcttcaacctggagaaggtggagaacccagctgaggtgatccgggagctgatctgctactgcctggacaccatcgccgagaaccaggccaagaatgagcacctgcagaaggaaaatgaaaggctgctgcgggactggaatgatgtgcagggccgctttgagaagtgtgtgtctgccaaggaggccctggagacagacctgtacaagcgcttcatcctggtgctgaatgagaagaagaccaagatccgcagcctgcacaacaagctgctgaatgctgcccaggagcgggagaaggacatcaagcaggagggggagacagccatctgcagcgagatgacagctgaccgggaccctgtgtatgatgagagcacagatgaggagagcgagaaccagacagacctgagcggcctggccagcgctgctgtgtccaaggatgacagcatcatcagcagcctggatgtgacagacatcgcccccagcaggaagaggcggcagaggatgcagaggaacctgggcacagagcccaagatggccccccaggagaaccagctgcaggagaaggagaacagcaggccagacagcagcctgcctgagaccagcaagaaggagcacatctctgctgagaacatgagcctggagaccctgaggaacagcagccctgaggacctgtttgatgagatctag

SEQ ID NO: 22604 - DNA, 1005 bp, synthetic construct; identical to SEQ ID NO: 22602
  misc_feature 1..1005: note = Description of Artificial Sequence: Synthetic coding sequence
  source 1..1005: mol_type = other DNA

SEQ ID NO: 22605 - DNA, 1011 bp, synthetic construct; identical to SEQ ID NO: 22603
  misc_feature 1..1011: note = Description of Artificial Sequence: Synthetic coding sequence
  source 1..1011: mol_type = other DNA

SEQ ID NO: 22606 - DNA, 186 bp, synthetic construct
  misc_feature 1..186: note = Description of Artificial Sequence: Synthetic coding sequence
  source 1..186: mol_type = other DNA
atgcagaggaacctgggcacagagcccaagatggccccccaggagaaccagctgcaggagaaggagaacagcaggccagacagcagcctgcctgagaccagcaagaaggagcacatctctgctgagaacatgagcctggagaccctgaggaacagcagccctgaggacctgtttgtgtccatctag

SEQ ID NO: 22607 - DNA, 2199 bp, synthetic construct
  misc_feature 1..2199: note = Description of Artificial Sequence: Synthetic coding sequence
  source 1..2199: mol_type = other DNA
atggtgcgcagcggcaacaaggctgctgtggtgctgtgcatggatgtgggcttcaccatgagcaacagcatccctggcatcgagagcccctttgagcaggccaagaaggtgatcaccatgtttgtgcagaggcaggtgtttgctgagaacaaggatgagatcgccctggtgctgtttggaacagatggaacagacaaccccctgtctggaggagaccagtaccagaacatcaccgtgcaccgccacctgatgctgcctgactttgacctgctggaggacatcgagagcaagatccagcccggcagccagcaggccgacttcctggatgccctgattgtgtccatggatgtgatccagcacgagaccatcggcaagaagtttgagaagaggcacatcgagatcttcacagacctgagcagccgcttcagcaagagccagctggacatcatcatccacagcctgaagaagtgtgacatcagcctgcagttcttcctgcccttcagcctgggcaaggaggatggcagcggggacagaggagatggccccttccggctgggcggccacggccccagcttccccctgaagggcatcacagagcagcagaaggagggcctggagatcgtgaagatggtgatgatcagcctggagggggaggatggcctggatgagatctacagcttcagcgagagcctgaggaagctgtgtgtgttcaagaagattgaaagacacagcatccactggccctgccgcctgaccatcggcagcaacctgagcatcagaattgctgcctacaagagcatcctgcaggagcgggtgaagaagacctggacagtggtggatgccaagaccctgaagaaggaggacatccagaaggagaccgtgtactgcctgaatgatgatgatgaaacagaggtgctgaaggaggacatcatccagggcttccgctatggcagtgacatcgtgcccttcagcaaggtggatgaggagcagatgaagtacaagtctgagggcaagtgcttctctgtgctgggcttctgcaagagcagccaggtgcagaggcgcttcttcatgggcaaccaggtgctgaaggtgtttgctgccagagatgatgaggccgctgctgtggccctgagcagcctcatccacgccctggatgacctggacatggtggccatcgtgcgctatgcctatgacaagagggccaacccccaggtgggcgtggccttcccccacatcaagcacaactatgaatgtctggtgtatgtgcagctgcccttcatggaggacctgcggcagtacatgttcagcagcctgaagaacagcaagaagtatgcccccacagaggcccagctgaatgctgtggatgccctgattgacagcatgagcctggccaagaaggatgagaagacagacaccctggaggacctcttccccaccaccaagatccccaacccccgcttccagaggctcttccagtgcctgctgcaccgggccctgcacccccgggagcccctgccccccatccagcagcacatctggaacatgctgaaccccccagctgaggtgaccaccaagagccagatccccctgagcaagatcaagaccctcttccccctcatcgaggccaagaagaaggaccaggtgacagcccaggagatcttccaggacaaccatgaagatggccccacagccaagaagctgaagacagagcagggcggggcccacttctctgtgagcagcctggccgagggctctgtgacctctgtgggctctgtgaacccagctgagaacttccgggtgctggtgaagcagaagaaggccagctttgaggaggccagcaaccagctgatcaaccacatcgagcagttcctggacaccaatgagaccccctacttcatgaagagcattgactgcatccgggccttccgggaggaggccatcaagttcagcgaggagcagcgcttcaacaacttcctgaaggccctgcaggagaaggtggagatcaagcagctgaaccacttctgggagatcgtggtgcaggacggcatcaccctcatcaccaaggaggaggccagcggcagctctgtgacagctgaggaggccaagaagttcctggcccccaaggacaagcccagcggggacacagctgctgtgtttgaggagggcggagatgtggatgacctgctggacatgatctag

SEQ ID NO: 22608 - DNA, 2199 bp, synthetic construct; identical to SEQ ID NO: 22607
  misc_feature 1..2199: note = Description of Artificial Sequence: Synthetic coding sequence
  source 1..2199: mol_type = other DNA

SEQ ID NO: 22609 - DNA, 1830 bp, synthetic construct
  misc_feature 1..1830: note = Description of Artificial Sequence: Synthetic coding sequence
  source 1..1830: mol_type = other DNA
atgagcggctgggagagctactacaagacagaaggagatgaggaggccgaggaggagcaggaggagaacctggaggccagcggggactacaagtacagcggccgggacagcctcatcttcctggtggatgccagcaaggccatgtttgagagccagagtgaagatgagctgaccccatttgacatgagcatccagtgcatccagagcgtgtacatcagcaagatcatcagcagtgaccgggacctgctggccgtggtgttctacggcacagagaaggacaagaacagcgtgaacttcaagaacatctacgtgctgcaggagctggacaaccctggggccaagaggatcctggagctggaccagttcaagggccagcagggccagaagcgcttccaggacatgatgggccacggcagtgactacagcctgtctgaggtgctgtgggtgtgtgccaacctcttcagtgatgtgcagttcaagatgagccacaagaggatcatgctgttcaccaatgaagacaacccccacggcaatgacagcgccaaggccagccgggcccggaccaaggccggggacctgcgggacaccggcatcttcctggacctgatgcacctgaagaagccaggcggctttgacatcagcctcttctacagagacatcatcagcattgctgaagatgaggacctgcgggtgcactttgaggagagcagcaagctggaggacctgctgaggaaggtgcgggccaaggagaccaggaagagggccctgagccggctgaagctgaagctgaacaaggacatcgtcatctctgtgggcatctacaacctggtgcagaaggccctgaagcccccacccatcaagctgtaccgggagaccaatgaacctgtgaagaccaagaccaggaccttcaacaccagcactggaggcctgctgctgcccagcgacaccaagaggagccagatctacggcagccggcagatcatcctggagaaggaggagacagaggagctgaagagatttgatgatcctggcctgatgctgatgggcttcaagcccctggtgctgctgaagaagcaccactacctgcggcccagcctgtttgtgtacccagaggagagcctggtgattggcagcagcaccctcttcagcgccctgctgatcaagtgcctggagaaggaggtggccgccctgtgccgctacaccccaagaagaaacatccccccctactttgtggccctggtgccccaggaggaggagctggatgaccagaagatccaggtgaccccacctggcttccagctggtgttcctgccctttgctgatgacaagaggaagatgcccttcacagagaagatcatggccaccccagagcaggtgggcaagatgaaggccatcgtggagaagctgcgcttcacctacagaagtgacagctttgaaaatcctgtgctgcagcagcacttcaggaacctggaggccctggccctggacctgatggagcctgagcaggccgtggacctgaccctgcccaaggtggaggccatgaacaagaggctgggcagcctggtggatgagttcaaggagctggtgtaccccccagactacaaccctgagggcaaggtgaccaagaggaagcatgacaatgaaggcagcggcagcaagaggcccaaggtggagtacagcgaggaggagctgaagacccacatcagcaagggcaccctgggcaagttcaccgtgcccatgctgaaggaggcctgccgggcctacggcctgaagagcggcctgaagaagcaggagctgctggaggccctgaccaagcacttccaggactag

SEQ ID NO: 22610 - DNA, 1830 bp, synthetic construct; identical to SEQ ID NO: 22609
  misc_feature 1..1830: note = Description of Artificial Sequence: Synthetic coding sequence
  source 1..1830: mol_type = other DNA

SEQ ID NO: 22611 - DNA, 1674 bp, synthetic construct
  misc_feature 1..1674: note = Description of Artificial Sequence: Synthetic coding sequence
  source 1..1674: mol_type = other DNA
atgagcggctgggagagctactacaagacagaaggagatgaggaggccgaggaggagcaggaggagaacctggaggccagcggggactacaagtacagcggccgggacagcctcatcttcctggtggatgccagcaaggccatgtttgagagccagagtgaagatgagctgaccccatttgacatgagcatccagtgcatccagagcgtgtacatcagcaagatcatcagcagtgaccgggacctgctggccgtggtgttctacggcacagagaaggacaagaacagcgtgaacttcaagaacatctacgtgctgcaggagctggacaaccctggggccaagaggatcctggagctggaccagttcaagggccagcagggccagaagcgcttccaggacatgatgggccacggcagtgactacagcctgtctgaggtgctgtgggtgtgtgccaacctcttcagtgatgtgcagttcaagatgagccacaagaggatcatgctgttcaccaatgaagacaacccccacggcaatgacagcgccaaggccagccgggcccggaccaaggccggggacctgcgggacaccggcatcttcctggacctgatgcacctgaagaagccaggcggctttgacatcagcctcttctacagagacatcatcagcattgctgaagatgaggacctgcgggtgcactttgaggagagcagcaagctggaggacctgctgaggaaggtgcgggccaaggagaccaggaagagggccctgagccggctgaagctgaagctgaacaaggacatcgtcatctctgtgggcatctacaacctggtgcagaaggccctgaagcccccacccatcaagctgtaccgggagaccaatgaacctgtgaagaccaagaccaggaccttcaacaccagcactggaggcctgctgctgcccagcgacaccaagaggagccagatctacggcagccggcagatcatcctggagaaggaggagacagaggagctgaagagatttgatgatcctggcctgatgctgatgggcttcaagcccctggtgctgctgaagaagcaccactacctgcggcccagcctgtttgtgtacccagaggagagcctggtgattggcagcagcaccctcttcagcgccctgctgatcaagtgcctggagaaggaggtggccgccctgtgccgctacaccccaagaagaaacatccccccctactttgtggccctggtgccccaggaggaggagctggatgaccagaagatccaggtgaccccacctggcttccagctggtgttcctgccctttgctgatgacaagaggaagatgcccttcacagagaagatcatggccaccccagagcaggtgggcaagatgaaggccatcgtggagaagctgcgcttcacctacagaagtgacagctttgaaaatcctgtgctgcagcagcacttcaggaacctggaggccctggccctggacctgatggagcctgagcaggccgtggacctgaccctgcccaaggtggaggccatgaacaagaggctgggcagcctggtggatgagttcaaggagctggtgtaccccccagactacaaccctgagggcaaggtgaccaagaggaagcacgccaagggcccccgctggagcatccagaagaggagctag

SEQ ID NO: 22612 - DNA, 1707 bp, synthetic construct
  misc_feature 1..1707: note = Description of Artificial Sequence: Synthetic coding sequence
  source 1..1707: mol_type = other DNA
atgagcggctgggagagctactacaagacagaaggagatgaggaggccgaggaggagcaggaggagaacctggaggccagcggggactacaagtacagcggccgggacagcctcatcttcctggtggatgccagcaaggccatgtttgagagccagagtgaagatgagctgaccccatttgacatgagcatccaggagctggacaaccctggggccaagaggatcctggagctggaccagttcaagggccagcagggccagaagcgcttccaggacatgatgggccacggcagtgactacagcctgtctgaggtgctgtgggtgtgtgccaacctcttcagtgatgtgcagttcaagatgagccacaagaggatcatgctgttcaccaatgaagacaacccccatggaaatgattctgccaaggccagccgggcccggaccaaggccggggacctgcgggacaccggcatcttcctggacctgatgcacctgaagaagccaggcggctttgacatcagcctcttctacagagacatcatcagcattgctgaagatgaggacctgcgggtgcactttgaggagagcagcaagctggaggacctgctgaggaaggtgcgggccaaggagaccaggaagagggccctgagccggctgaagctgaagctgaacaaggacatcgtcatctctgtgggcatctacaacctggtgcagaaggccctgaagcccccacccatcaagctgtaccgggagaccaatgaacctgtgaagaccaagaccaggaccttcaacaccagcactggaggcctgctgctgcccagcgacaccaagaggagccagatctacggcagccggcagatcatcctggagaaggaggagacagaggagctgaagagatttgatgaccccggcctgatgctgatgggcttcaagcccctggtgctgctgaagaagcaccactacctgcggcccagcctgtttgtgtacccagaggagagcctggtgattggcagcagcaccctcttcagcgccctgctgatcaagtgcctggagaaggaggtggccgccctgtgccgctacacccccaggaggaacatccccccctactttgtggccctggtgccccaggaggaggagctggatgaccagaagatccaggtgaccccacctggcttccagctggtgttcctgccctttgctgatgacaagaggaagatgcccttcacagagaagatcatggccaccccagagcaggtgggcaagatgaaggccatcgtggagaagctgcgcttcacctacagaagtgacagctttgagaaccctgtgctgcagcagcacttcaggaacctggaggccctggccctggacctgatggagcctgagcaggccgtggacctgaccctgcccaaggtggaggccatgaacaagaggctgggcagcctggtggatgagttcaaggagctggtgtaccccccagactacaaccctgagggcaaggtgaccaagaggaagcatgacaatgaaggcagcggcagcaagaggcccaaggtggagtacagcgaggaggagctgaagacccacatcagcaagggcaccctgggcaagttcaccgtgcccatgctgaaggaggcctgccgggcctacggcctgaagagcggcctgaagaagcaggagctgctggaggccctgaccaagcacttccaggactag

SEQ ID NO: 22613 - DNA, 1680 bp, synthetic construct
  misc_feature 1..1680: note = Description of Artificial Sequence: Synthetic coding sequence
  source 1..1680: mol_type = other DNA
atgaagaagcagaggaagaacaagaagaggaccctgaagcaggtgtgcatccagagcgtgtacatcagcaagatcatcagcagtgaccgggacctgctggccgtggtgttctacggcacagagaaggacaagaacagcgtgaacttcaagaacatctacgtgctgcaggagctggacaaccctggggccaagaggatcctggagctggaccagttcaagggccagcagggccagaagcgcttccaggacatgatgggccacggcagtgactacagcctgtctgaggtgctgtgggtgtgtgccaacctcttcagtgatgtgcagttcaagatgagccacaagaggatcatgctgttcaccaatgaagacaacccccacggcaatgacagcgccaaggccagccgggcccggaccaaggccggggacctgcgggacaccggcatcttcctggacctgatgcacctgaagaagccaggcggctttgacatcagcctcttctacagagacatcatcagcattgctgaagatgaggacctgcgggtgcactttgaggagagcagcaagctggaggacctgctgaggaaggtgcgggccaaggagaccaggaagagggccctgagccggctgaagctgaagctgaacaaggacatcgtcatctctgtgggcatctacaacctggtgcagaaggccctgaagcccccacccatcaagctgtaccgggagaccaatgaacctgtgaagaccaagaccaggaccttcaacaccagcactggaggcctgctgctgcccagcgacaccaagaggagccagatctacggcagccggcagatcatcctggagaaggaggagacagaggagctgaagagatttgatgatcctggcctgatgctgatgggcttcaagcccctggtgctgctgaagaagcaccactacctgcggcccagcctgtttgtgtacccagaggagagcctggtgattggcagcagcaccctcttcagcgccctgctgatcaagtgcctggagaaggaggtggccgccctgtgccgctacaccccaagaagaaacatccccccctactttgtggccctggtgccccaggaggaggagctggatgaccagaagatccaggtgaccccacctggcttccagctggtgttcctgccctttgctgatgacaagaggaagatgcccttcacagagaagatcatggccaccccagagcaggtgggcaagatgaaggccatcgtggagaagctgcgcttcacctacagaagtgacagctttgaaaatcctgtgctgcagcagcacttcaggaacctggaggccctggccctggacctgatggagcctgagcaggccgtggacctgaccctgcccaaggtggaggccatgaacaagaggctgggcagcctggtggatgagttcaaggagctggtgtaccccccagactacaaccctgagggcaaggtgaccaagaggaagcatgacaatgaaggcagcggcagcaagaggcccaaggtggagtacagcgaggaggagctgaagacccacatcagcaagggcaccctgggcaagttcaccgtgcccatgctgaaggaggcctgccgggcctacggcctgaagagcggcctgaagaagcaggagctgctggaggccctgaccaagcacttccaggactag

SEQ ID NO: 22614 - DNA, 1830 bp, synthetic construct; identical to SEQ ID NO: 22609
  misc_feature 1..1830: note = Description of Artificial Sequence: Synthetic coding sequence
  source 1..1830: mol_type = other DNA

SEQ ID NO: 22615 - DNA, 1431 bp, synthetic construct
  misc_feature 1..1431: note = Description of Artificial Sequence: Synthetic coding sequence
  source 1..1431: mol_type = other DNA
atgatgggccacggcagtgactacagcctgtctgaggtgctgtgggtgtgtgccaacctcttcagtgatgtgcagttcaagatgagccacaagaggatcatgctgttcaccaatgaagacaacccccatggaaatgattctgccaaggccagccgggcccggaccaaggccggggacctgcgggacaccggcatcttcctggacctgatgcacctgaagaagccaggcggctttgacatcagcctcttctacagagacatcatcagcattgctgaagatgaggacctgcgggtgcactttgaggagagcagcaagctggaggacctgctgaggaaggtgcgggccaaggagaccaggaagagggccctgagccggctgaagctgaagctgaacaaggacatcgtcatctctgtgggcatctacaacctggtgcagaaggccctgaagcccccacccatcaagctgtaccgggagaccaatgaacctgtgaagaccaagaccaggaccttcaacaccagcactggaggcctgctgctgcccagcgacaccaagaggagccagatctacggcagccggcagatcatcctggagaaggaggagacagaggagctgaagagatttgatgaccccggcctgatgctgatgggcttcaagcccctggtgctgctgaagaagcaccactacctgcggcccagcctgtttgtgtacccagaggagagcctggtgattggcagcagcaccctcttcagcgccctgctgatcaagtgcctggagaaggaggtggccgccctgtgccgctacacccccaggaggaacatccccccctactttgtggccctggtgccccaggaggaggagctggatgaccagaagatccaggtgaccccacctggcttccagctggtgttcctgccctttgctgatgacaagaggaagatgcccttcacagagaagatcatggccaccccagagcaggtgggcaagatgaaggccatcgtggagaagctgcgcttcacctacagaagtgacagctttgagaaccctgtgctgcagcagcacttcaggaacctggaggccctggccctggacctgatggagcctgagcaggccgtggacctgaccctgcccaaggtggaggccatgaacaagaggctgggcagcctggtggatgagttcaaggagctggtgtaccccccagactacaaccctgagggcaaggtgaccaagaggaagcatgacaatgaaggcagcggcagcaagaggcccaaggtggagtacagcgaggaggagctgaagacccacatcagcaagggcaccctgggcaagttcaccgtgcccatgctgaaggaggcctgccgggcctacggcctgaagagcggcctgaagaagcaggagctgctggaggccctgaccaagcacttccaggactag

SEQ ID NO: 22616 - DNA, 741 bp, synthetic construct
  misc_feature 1..741: note = Description of Artificial Sequence: Synthetic coding sequence
  source 1..741: mol_type = other DNA
atggccggggccccagatgagaggagaagaggccctgctgctggggagcagctgcagcagcagcacgtgtcctgccaggtgtttcctgagcggctggcccagggcaacccccagcagggcttcttcagcagcttcttcaccagcaaccagaagtgccagctgcggctgctgaagaccctggagaccaacccctacgtgaagctgctgctggatgccatgaagcacagcggctgtgctgtgaacaaggacagacacttcagctgtgaggactgcaatggaaatgtgtctgggggctttgatgccagcaccagccagatcgtgctgtgccagaacaacatccacaaccaggcccacatgaacagagtggtgacccatgagctgattcatgcctttgaccactgccgggcccacgtggactggttcaccaacatccgccacctggcctgcagcgaggtgcgggccgccaacctgagcggggactgcagcctggtgaatgagatcttccggctgcacttcggcctgaagcagcaccaccagacctgtgtgcgggaccgggccaccctgagcatcctggccgtgaggaacatcagcaaggaggtggccaagaaggctgtggatgaggtgtttgagagctgcttcaatgaccacgagcccttcggccgcatcccccacaacaagacctacgcccgctatgcccaccgggactttgaaaatagagaccgctactacagcaacatctag

SEQ ID NO: 22617 - DNA, 1515 bp, synthetic construct
  misc_feature 1..1515: note = Description of Artificial Sequence: Synthetic coding sequence
  source 1..1515: mol_type = other DNA
atggaccccggccagcagcccccaccccagcctgccccccagggccagggccagccccccagccagcccccccagggccagggccccccatctggccctggccagcctgccccagctgccacccaggccgccccccaggcccccccagctggccaccagatcgtgcacgtgcggggggacagcgagacagacctggaggccctcttcaatgctgtgatgaaccccaagacagccaacgtgccccagacagtgcccatgaggctgaggaagctgcctgacagcttcttcaagcccccagagcccaagagccacagccggcaggccagcacagatgctggaacagctggggccctgaccccccagcacgtgcgggcccacagcagccctgccagcctgcagctgggcgctgtgtccccaggcaccctgacccccactggagtggtgtctggccctgctgccacccccacagcccagcacctgcggcagagcagctttgagatcccagatgatgtgcccctgcctgctggctgggagatggccaagaccagcagcggccagcgctacttcctgaaccacatcgaccagaccaccacctggcaggaccccaggaaggccatgctgagccagatgaatgtgacagcccccaccagcccccctgtgcagcagaacatgatgaacagcgccagcggccccctgcctgatggctgggagcaggccatgacccaggatggagagatctactacatcaaccacaagaacaagaccacctcctggctggacccccggctggaccccaggtttgccatgaaccagaggatcagccagagcgcccctgtgaagcagcccccacccctggccccccagagcccccagggcggcgtgatgggcggcagcaacagcaaccagcagcagcagatgaggctgcagcagctgcagatggagaaggagcggctgcggctgaagcagcaggagctgctgcggcaggccatgaggaacatcaaccccagcacagccaacagccccaagtgccaggagctggccctgcggagccagctgcccaccctggagcaggacggcggcacccagaaccctgtgagcagccctggcatgagccaggagctgcggaccatgaccaccaacagcagtgaccccttcctgaacagcggcacctaccacagcagagatgagagcacagacagcggcctgtccatgagcagctacagcgtgcccaggaccccagatgacttcctgaacagcgtggatgagatggacacaggagacaccatcaaccagagcaccctgcccagccagcagaaccgcttcccagactacctggaggccatccctggcaccaacgtggacctgggcaccctggagggagatggcatgaacattgaaggagaggagctgatgcccagcctgcaggaggccctgagcagtgacatcctgaatgacatggagagcgtgctggccgccaccaagctggacaaggagagcttcctgacctggctgtag

SEQ ID NO: 22618 - DNA, 1365 bp, synthetic construct
  misc_feature 1..1365: note = Description of Artificial Sequence: Synthetic coding sequence
  source 1..1365: mol_type = other DNA
atggaccccggccagcagcccccaccccagcctgccccccagggccagggccagccccccagccagcccccccagggccagggccccccatctggccctggccagcctgccccagctgccacccaggccgccccccaggcccccccagctggccaccagatcgtgcacgtgcggggggacagcgagacagacctggaggccctcttcaatgctgtgatgaaccccaagacagccaacgtgccccagacagtgcccatgaggctgaggaagctgcctgacagcttcttcaagcccccagagcccaagagccacagccggcaggccagcacagatgctggaacagctggggccctgaccccccagcacgtgcgggcccacagcagccctgccagcctgcagctgggcgctgtgtccccaggcaccctgacccccactggagtggtgtctggccctgctgccacccccacagcccagcacctgcggcagagcagctttgagatcccagatgatgtgcccctgcctgctggctgggagatggccaagaccagcagcggccagcgctacttcctgaaccacatcgaccagaccaccacctggcaggaccccaggaaggccatgctgagccagatgaatgtgacagcccccaccagcccccctgtgcagcagaacatgatgaacagcgccagcgccatgaaccagaggatcagccagagcgcccctgtgaagcagcccccacccctggccccccagagcccccagggcggcgtgatgggcggcagcaacagcaaccagcagcagcagatgaggctgcagcagctgcagatggagaaggagcggctgcggctgaagcagcaggagctgctgcggcaggtgcggccccaggagctggccctgcggagccagctgcccaccctggagcaggacggcggcacccagaaccctgtgagcagccctggcatgagccaggagctgcggaccatgaccaccaacagcagtgaccccttcctgaacagcggcacctaccacagcagagatgagagcacagacagcggcctgtccatgagcagctacagcgtgcccaggaccccagatgacttcctgaacagcgtggatgagatggacacaggagacaccatcaaccagagcaccctgcccagccagcagaaccgcttcccagactacctggaggccatccctggcaccaacgtggacctgggcaccctggagggagatggcatgaacattgaaggagaggagctgatgcccagcctgcaggaggccctgagcagtgacatcctgaatgacatggagagcgtgctggccgccaccaagctggacaaggagagcttcctgacctggctgtag

SEQ ID NO: 22619 - DNA, 1266 bp, synthetic construct
  misc_feature 1..1266: note = Description of Artificial Sequence: Synthetic coding sequence
  source 1..1266: mol_type = other DNA
atgaggctgaggaagctgcctgacagcttcttcaagcccccagagcccaagagccacagccggcaggccagcacagatgctggaacagctggggccctgaccccccagcacgtgcgggcccacagcagccctgccagcctgcagctgggcgctgtgtccccaggcaccctgacccccaccggggtggtgtctggccctgctgccacccccacagcccagcacctgcggcagagcagctttgagatcccagatgatgtgcccctgcctgctggctgggagatggccaagaccagcagcggccagcgctacttcctgaaccacatcgaccagaccaccacctggcaggaccccaggaaggccatgctgagccagatgaatgtgacagcccccaccagcccccctgtgcagcagaacatgatgaacagcgccagcggccccctgcctgatggctgggagcaggccatgacccaggatggagagatctactacatcaaccacaagaacaagaccacctcctggctggacccccggctggaccccaggtttgggaaggccatgaaccagaggatcagccagagcgcccctgtgaagcagcccccacccctggccccccagagcccccagggcggcgtgatgggcggcagcaacagcaaccagcagcagcagatgaggctgcagcagctgcagatggagaaggagcggctgcggctgaagcagcaggagctgctgcggcaggccatgaggaacatcaaccccagcacagccaacagccccaagtgccaggagctggccctgcggagccagctgcccaccctggagcaggacggcggcacccagaaccctgtgagcagccctggcatgagccaggagctgcggaccatgaccaccaacagcagtgaccccttcctgaacagcggcacctaccacagcagagatgagagcacagattctggcctgtccatgagcagctacagcgtgcccaggaccccagatgacttcctgaacagcgtggatgagatggacaccggggacaccatcaaccagagcaccctgcccagccagcagaaccgcttcccagactacctggaggccatccctggcaccaacgtggacctgggcaccctggagggagatggcatgaacatcgagggggaggagctgatgcccagcctgcaggaggccctgagcagtgacatcctgaatgacatggagagcgtgctggccgccaccaagctggacaaggagagcttcctgacctggctgtag

SEQ ID NO: 22620 - DNA, 981 bp, synthetic construct
  misc_feature 1..981: note = Description of Artificial Sequence: Synthetic coding sequence
  source 1..981: mol_type = other DNA
atggccaagaccagcagcggccagcgctacttcctgaaccacatcgaccagaccaccacctggcaggaccccaggaaggccatgctgagccagatgaatgtgacagcccccaccagcccccctgtgcagcagaacatgatgaacagcgccagcggccccctgcctgatggctgggagcaggccatgacccaggatggagagatctactacatcaaccacaagaacaagaccacctcctggctggacccccggctggaccccaggtttgccatgaaccagaggatcagccagagcgcccctgtgaagcagcccccacccctggccccccagagcccccagggcggcgtgatgggcggcagcaacagcaaccagcagcagcagatgaggctgcagcagctgcagatggagaaggagcggctgcggctgaagcagcaggagctgctgcggcaggccatgaggaacatcaaccccagcacagccaacagccccaagtgccaggagctggccctgcggagccagctgcccaccctggagcaggacggcggcacccagaaccctgtgagcagccctggcatgagccaggagctgcggaccatgaccaccaacagcagtgaccccttcctgaacagcggcacctaccacagcagagatgagagcacagacagcggcctgtccatgagcagctacagcgtgcccaggaccccagatgacttcctgaacagcgtggatgagatggacacaggagacaccatcaaccagagcaccctgcccagccagcagaaccgcttcccagactacctggaggccatccctggcaccaacgtggacctgggcaccctggagggagatggcatgaacattgaaggagaggagctgatgcccagcctgcaggaggccctgagcagtgacatcctgaatgacatggagagcgtgctggccgccaccaagctggacaaggagagcttcctgacctggctgtag

SEQ ID NO: 22621 - DNA, 1467 bp, synthetic construct
  misc_feature 1..1467: note = Description of Artificial Sequence: Synthetic coding sequence
  source 1..1467: mol_type = other DNA
atggaccccggccagcagcccccaccccagcctgccccccagggccagggccagccccccagccagcccccccagggccagggccccccatctggccctggccagcctgccccagctgccacccaggccgccccccaggcccccccagctggccaccagatcgtgcacgtgcggggggacagcgagacagacctggaggccctcttcaatgctgtgatgaaccccaagacagccaacgtgccccagacagtgcccatgaggctgaggaagctgcctgacagcttcttcaagcccccagagcccaagagccacagccggcaggccagcacagatgctggaacagctggggccctgaccccccagcacgtgcgggcccacagcagccctgccagcctgcagctgggcgctgtgtccccaggcaccctgacccccactggagtggtgtctggccctgctgccacccccacagcccagcacctgcggcagagcagctttgagatcccagatgatgtgcccctgcctgctggctgggagatggccaagaccagcagcggccagcgctacttcctgaaccacatcgaccagaccaccacctggcaggaccccaggaaggccatgctgagccagatgaatgtgacagcccccaccagcccccctgtgcagcagaacatgatgaacagcgccagcggccccctgcctgatggctgggagcaggccatgacccaggatggagagatctactacatcaaccacaagaacaagaccacctcctggctggacccccggctggaccccaggtttgccatgaaccagaggatcagccagagcgcccctgtgaagcagcccccacccctggccccccagagcccccagggcggcgtgatgggcggcagcaacagcaaccagcagcagcagatgaggctgcagcagctgcagatggagaaggagcggctgcggctgaagcagcaggagctgctgcggcaggagctggccctgcggagccagctgcccaccctggagcaggacggcggcacccagaaccctgtgagcagccctggcatgagccaggagctgcggaccatgaccaccaacagcagtgaccccttcctgaacagcggcacctaccacagcagagatgagagcacagacagcggcctgtccatgagcagctacagcgtgcccaggaccccagatgacttcctgaacagcgtggatgagatggacacaggagacaccatcaaccagagcaccctgcccagccagcagaaccgcttcccagactacctggaggccatccctggcaccaacgtggacctgggcaccctggagggagatggcatgaacattgaaggagaggagctgatgcccagcctgcaggaggccctgagcagtgacatcctgaatgacatggagagcgtgctggccgccaccaagctggacaaggagagcttcctgacctggctgtag

SEQ ID NO: 22622 - DNA, 1479 bp, synthetic construct
  misc_feature 1..1479: note = Description of Artificial Sequence: Synthetic coding sequence
  source 1..1479: mol_type = other DNA
atggaccccggccagcagcccccaccccagcctgccccccagggccagggccagccccccagccagcccccccagggccagggccccccatctggccctggccagcctgccccagctgccacccaggccgccccccaggcccccccagctggccaccagatcgtgcacgtgcggggggacagcgagacagacctggaggccctcttcaatgctgtgatgaaccccaagacagccaacgtgccccagacagtgcccatgaggctgaggaagctgcctgacagcttcttcaagcccccagagcccaagagccacagccggcaggccagcacagatgctggaacagctggggccctgaccccccagcacgtgcgggcccacagcagccctgccagcctgcagctgggcgctgtgtccccaggcaccctgacccccactggagtggtgtctggccctgctgccacccccacagcccagcacctgcggcagagcagctttgagatcccagatgatgtgcccctgcctgctggctgggagatggccaagaccagcagcggccagcgctacttcctgaaccacatcgaccagaccaccacctggcaggaccccaggaaggccatgctgagccagatgaatgtgacagcccccaccagcccccctgtgcagcagaacatgatgaacagcgccagcggccccctgcctgatggctgggagcaggccatgacccaggatggagagatctactacatcaaccacaagaacaagaccacctcctggctggacccccggctggaccccaggtttgccatgaaccagaggatcagccagagcgcccctgtgaagcagcccccacccctggccccccagagcccccagggcggcgtgatgggcggcagcaacagcaaccagcagcagcagatgaggctgcagcagctgcagatggagaaggagcggctgcggctgaagcagcaggagctgctgcggcaggtgcggccccaggagctggccctgcggagccagctgcccaccctggagcaggacggcggcacccagaaccctgtgagcagccctggcatgagccaggagctgcggaccatgaccaccaacagcagtgaccccttcctgaacagcggcacctaccacagcagagatgagagcacagacagcggcctgtccatgagcagctacagcgtgcccaggaccccagatgacttcctgaacagcgtggatgagatggacacaggagacaccatcaaccagagcaccctgcccagccagcagaaccgcttcccagactacctggaggccatccctggcaccaacgtggacctgggcaccctggagggagatggcatgaacattgaaggagaggagctgatgcccagcctgcaggaggccctgagcagtgacatcctgaatgacatggagagcgtgctggccgccaccaagctggacaaggagagcttcctgacctggctgtag

SEQ ID NO: 22623 - DNA, 1353 bp, synthetic construct
  misc_feature 1..1353: note = Description of Artificial Sequence: Synthetic coding sequence
  source 1..1353: mol_type = other DNA
atggaccccggccagcagcccccaccccagcctgccccccagggccagggccagccccccagccagcccccccagggccagggccccccatctggccctggccagcctgccccagctgccacccaggccgccccccaggcccccccagctggccaccagatcgtgcacgtgcggggggacagcgagacagacctggaggccctcttcaatgctgtgatgaaccccaagacagccaacgtgccccagacagtgcccatgaggctgaggaagctgcctgacagcttcttcaagcccccagagcccaagagccacagccggcaggccagcacagatgctggaacagctggggccctgaccccccagcacgtgcgggcccacagcagccctgccagcctgcagctgggcgctgtgtccccaggcaccctgacccccactggagtggtgtctggccctgctgccacccccacagcccagcacctgcggcagagcagctttgagatcccagatgatgtgcccctgcctgctggctgggagatggccaagaccagcagcggccagcgctacttcctgaaccacatcgaccagaccaccacctggcaggaccccaggaaggccatgctgagccagatgaatgtgacagcccccaccagcccccctgtgcagcagaacatgatgaacagcgccagcgccatgaaccagaggatcagccagagcgcccctgtgaagcagcccccacccctggccccccagagcccccagggcggcgtgatgggcggcagcaacagcaaccagcagcagcagatgaggctgcagcagctgcagatggagaaggagcggctgcggctgaagcagcaggagctgctgcggcaggagctggccctgcggagccagctgcccaccctggagcaggacggcggcacccagaaccctgtgagcagccctggcatgagccaggagctgcggaccatgaccaccaacagcagtgaccccttcctgaacagcggcacctaccacagcagagatgagagcacagacagcggcctgtccatgagcagctacagcgtgcccaggaccccagatgacttcctgaacagcgtggatgagatggacacaggagacaccatcaaccagagcaccctgcccagccagcagaaccgcttcccagactacctggaggccatccctggcaccaacgtggacctgggcaccctggagggagatggcatgaacattgaaggagaggagctgatgcccagcctgcaggaggccctgagcagtgacatcctgaatgacatggagagcgtgctggccgccaccaagctggacaaggagagcttcctgacctggctgtag

SEQ ID NO: 22624 - DNA, 1860 bp, synthetic construct
  misc_feature 1..1860: note = Description of Artificial Sequence: Synthetic coding sequence
  source 1..1860: mol_type = other DNA
atggccaatgacattgatgagctgattggcatccccttccccaaccacagcagcgaggtgctgtgcagcctgaatgagcagagacatgatggcctgctgtgtgatgtgctgctggtggtgcaggagcaggagtaccgcacccacaggtctgtgctggccgcctgcagcaagtacttcaagaagctgttcaccgctggcaccctggccagccagccctacgtgtatgaaattgactttgtgcagcctgaggccctggccgccatcctggagtttgcctacaccagcaccctgaccatcacagctggaaatgtgaagcacatcctgaatgctgccaggatgctggagatccagtgcatcgtgaatgtgtgcctggagatcatggagcctggaggagatggaggagaggaggatgacaaggaggatgatgatgatgatgaagatgatgatgatgaggaggatgaggaggaggaggaggaggaggaggaggatgatgatgatgacacagaagattttgctgaccaggagaacctgcctgacccccaggacatcagctgccaccagagccccagcaagacagaccacctgacagagaaggcctacagcgacaccccccgggacttcccagacagcttccaggccggcagccctggccacctgggcgtcatccgggacttcagcattgagagcctgctgagagaaaatctctaccccaaggccaacatcccagaccggcggcccagcctgagcccctttgccccagacttcttcccccacctgtggccaggggactttggagcctttgcccagctgcctgagcagcccatggattctggccccctggacctggtgatcaagaacaggaagatcaaggaggaggagaaggaggagctgcccccacctcctcctccacccttccccaatgacttcttcaaggacatgtttcctgacctgcccggcggccccctgggccccatcaaggccgagaatgactatggagcctacctgaacttcctgagcgccacccacctgggcggcctcttccccccctggcccctggtggaggagaggaagctgaagcccaaggccagccagcagtgccccatctgccacaaggtgatcatgggcgctgggaagctgcccaggcacatgaggacccacactggagagaagccctacatgtgcaccatctgtgaggtgcgcttcacccggcaggacaagctgaagatccacatgaggaagcacactggagagcggccctacctgtgcatccactgcaatgccaagtttgtgcacaactatgacctgaagaaccacatgaggatccacactggagtgcggccctaccagtgtgagttctgctacaagagcttcaccaggagtgaccacctgcaccgccacatcaagaggcagagctgcaggatggcccggccccggcggggcaggaagccagctgcctggagggctgccagcctgctgtttggacctgggggccctgccccagacaaggccgcctttgtgatgcccccagccctgggggaggtgggcggccacctgggcggcgctgctgtgtgcctgcccggccccagccctgccaagcacttcctggccgcccccaagggggccctgagcctgcaggagctggagcggcagtttgaggagacccagatgaagctgtttggccgggcccagctggaggccgagagaaatgctgggggcctgctggcctttgccctggccgagaatgtggccgccgcccggccctacttccccctgcctgacccctgggccgccggcctggccggcctgcccggcctggccggcctgaaccacgtggcctccatgtctgaggccaacaactag

SEQ ID NO: 22625 - DNA, 1860 bp, synthetic construct; identical to SEQ ID NO: 22624
  misc_feature 1..1860: note = Description of Artificial Sequence: Synthetic coding sequence
  source 1..1860: mol_type = other DNA

SEQ ID NO: 22626 - DNA, 78 bp, synthetic construct
  misc_feature 1..78: note = Description of Artificial Sequence: Synthetic coding sequence
  source 1..78: mol_type = other DNA
atggccaatgacattgatgagctgattggcatccccttccccaaccacagcagcgaggtgctgtgcagcctgaactag

SEQ ID NO: 22627 - DNA, 57 bp, synthetic construct
  misc_feature 1..57: note = Description of Artificial Sequence: Synthetic coding sequence
  source 1..57: mol_type = other DNA
atggccaatgacattgatgagctgattggcatccccttccccaaccacagcagctag

SEQ ID NO: 22628 - DNA, 3375 bp, synthetic construct
  misc_feature 1..3375: note = Description of Artificial Sequence: Synthetic coding sequence
  source 1..3375: mol_type = other DNA
atggctgatggcccccgctgcaagaggaggaagcaggccaaccccaggagaaataatgtgaccaactacaacacagtggtggagaccaacagcgacagtgatgatgaggacaagctgcacatcgtggaggaggagagcgtgacagatgctgctgactgtgaaggagtgcctgaagatgacctgcccacagaccagacagtgctgcccggccgcagcagcgagcgggagggcaatgccaagaactgctgggaggatgacaggaaggagggccaggagatcctgggccctgaggcccaggctgatgaagctggctgcaccgtgaaggatgatgaatgtgagagtgatgctgaaaatgagcagaaccacgaccccaacgtggaggagttcctgcagcagcaggacacagctgtgatcttccctgaggcccctgaggaggaccagaggcagggcaccccagaggccagcggccatgatgaaaatggcaccccagatgccttcagccagctgctgacctgcccctactgtgaccggggctacaagcgcttcaccagcctgaaggagcacatcaagtacagacatgagaagaatgaagacaacttcagctgcagcctgtgcagctacacctttgcctaccgcacccagctggagcggcacatgaccagccacaagagcggccgggaccagagacatgtgacccagagcggctgcaacaggaagttcaagtgcacagaatgtgggaaggccttcaagtacaagcaccacctgaaggagcacctgcgcatccacagcggggagaagccctatgaatgtcccaactgcaagaagcgcttcagccacagcggcagctacagcagccacatcagcagcaagaagtgcatcagcctcatccctgtgaatggccggcccaggacaggcctgaagaccagccagtgcagcagccccagcctgagcgccagccctggcagccccacccggccccagatccggcagaagattgagaacaagcccctgcaggagcagctgtctgtgaaccagatcaagacagagcctgtggactatgagttcaagcccatcgtggtggccagcggcatcaactgcagcacccccctgcagaatggagtcttcaccggcggcggccccctgcaggccaccagcagcccccagggcatggtgcaggccgtggtgctgcccaccgtgggcctggtgagccccatcagcatcaacctgagtgacatccagaatgtgctgaaggtggccgtggatggaaatgtcatccggcaggtgctggagaacaaccaggccaacctggccagcaaggagcaggagaccatcaatgccagccccatccagcagggcggccacagcgtcatcagcgccatcagcctgcccctggtggaccaggacggcaccaccaagatcatcatcaactacagcctggagcagcccagccagctgcaggtggtgccccagaacctgaagaaggaaaatcctgtggccaccaacagctgcaagtctgagaagctgcctgaggacctgactgtgaagtctgagaaggacaagagctttgagggcggcgtgaatgacagcacctgcctgctgtgtgatgactgccctggggacatcaatgccctgcctgagctgaagcactatgacctgaagcagcccacccagcccccacccctgcctgctgctgaggccgagaagccagagagctctgtgtcctctgccactggagatggcaacctgagccccagccagccccccctgaagaacctgctgagcctgctgaaggcctactatgccctgaatgcccagcccagcgctgaggagctgagcaagattgctgacagcgtgaacctgcccctggatgtggtgaagaagtggtttgagaagatgcaggccggccagatctctgtgcagagcagcgagcccagcagccctgagcccgggaaggtgaacatcccagccaagaacaatgaccagccccagagcgccaatgccaatgagccccaggacagcacagtgaacctgcagagccccctgaagatgaccaacagccctgtgctgcctgtgggcagcaccaccaacggcagccgcagcagcacccccagccccagccccctgaacctgagcagcagcaggaacacccagggctacctgtacacagctgagggcgcccaggaggagccccaggtggagcccctggacctgagcctgcccaagcagcagggcgagctgctggagaggagcaccatcacctctgtgtaccagaacagcgtgtacagcgtgcaggaggagcccctgaacctgagctgtgccaagaaggagccccagaaggacagctgtgtgacagacagcgagcctgtggtgaatgtcatcccccccagcgccaaccccatcaacatcgccatccccaccgtgacagcccagctgcccaccatcgtggccatcgctgaccagaacagcgtgccctgcctgcgggccctggccgccaacaagcagaccatcctgatcccccaggtggcctacacctacagcaccaccgtgtccccagctgtgcaggagccccccctgaaggtgatccagcccaacggcaaccaggatgagcggcaggacaccagcagcgagggcgtgtccaatgtggaggaccagaatgacagcgacagcaccccacccaagaagaagatgaggaagacagaaaatggcatgtatgcctgtgacctgtgtgacaagatcttccagaagagcagcagcctgctgcggcacaagtatgagcacacaggcaagaggcctcatgaatgtggcatctgcaagaaggccttcaagcacaagcaccacctgattgagcacatgaggctgcacagcggggagaagccctaccagtgtgacaagtgtgggaagcgcttcagccacagcggcagctacagccagcacatgaaccaccgctacagctactgcaagcgggaggccgaggagcgggacagcacagagcaggaggaggccggccctgagatcctgagcaatgagcacgtgggcgcccgggccagccccagccagggcgacagtgatgagcgggagagcctgacccgggaggaggatgaggacagcgagaaggaggaggaggaggaggacaaggagatggaggagctgcaggaggagaaggaatgtgagaagccccagggagatgaggaggaggaggaggaggaggaggaggtggaggaggaggaggtggaggaggctgaaaatgaaggagaggaggccaagacagagggcctgatgaaggatgacagagctgagagccaggccagcagcctgggccagaaggtgggggagagcagcgagcaggtgtctgaggagaagaccaatgaggcctag

SEQ ID NO: 22629 - DNA, 3378 bp, synthetic construct
  misc_feature 1..3378: note = Description of Artificial Sequence: Synthetic coding sequence
  source 1..3378: mol_type = other DNA
atggctgatggcccccgctgcaagaggaggaagcaggccaaccccaggagaaataatgtgaccaactacaacacagtggtggagaccaacagcgacagtgatgatgaggacaagctgcacatcgtggaggaggagagcgtgacagatgctgctgactgtgaaggagtgcctgaagatgacctgcccacagaccagacagtgctgcccggccgcagcagcgagcgggagggcaatgccaagaactgctgggaggatgacaccgggaaggagggccaggagatcctgggccctgaggcccaggctgatgaggccggctgcaccgtgaaggatgatgaatgtgagagtgatgctgaaaatgagcagaaccacgaccccaacgtggaggagttcctgcagcagcaggacacagctgtgatcttccctgaggcccctgaggaggaccagaggcagggcaccccagaggccagcggccatgatgaaaatggcaccccagatgccttcagccagctgctgacctgcccctactgtgaccggggctacaagcgcttcaccagcctgaaggagcacatcaagtacagacatgagaagaatgaagacaacttcagctgcagcctgtgcagctacacctttgcctaccgcacccagctggagcggcacatgaccagccacaagagcggccgggaccagagacatgtgacccagagcggctgcaacaggaagttcaagtgcacagaatgtgggaaggccttcaagtacaagcaccacctgaaggagcacctgcgcatccacagcggggagaagccctatgagtgccccaactgcaagaagcgcttcagccacagcggcagctacagcagccacatcagcagcaagaagtgcatcagcctcatccctgtgaatggccggcccaggacaggcctgaagaccagccagtgcagcagccccagcctgagcgccagccctggcagccccacccggccccagatccggcagaagattgagaacaagcccctgcaggagcagctgtctgtgaaccagatcaagacagagcctgtggactatgagttcaagcccatcgtggtggccagcggcatcaactgcagcacccccctgcagaatggagtcttcaccggcggcggccccctgcaggccaccagcagcccccagggcatggtgcaggccgtggtgctgcccaccgtgggcctggtgagccccatcagcatcaacctgagtgacatccagaatgtgctgaaggtggccgtggatggaaatgtcatccggcaggtgctggagaacaaccaggccaacctggccagcaaggagcaggagaccatcaatgccagccccatccagcagggcggccacagcgtcatcagcgccatcagcctgcccctggtggaccaggacggcaccaccaagatcatcatcaactacagcctggagcagcccagccagctgcaggtggtgccccagaacctgaagaaggagaaccctgtggccaccaacagctgcaagtctgagaagctgcctgaggacctgactgtgaagtctgagaaggacaagagctttgaaggaggagtgaatgacagcacctgcctgctgtgtgatgactgccctggggacatcaatgccctgcctgagctgaagcactatgacctgaagcagcccacccagcccccacccctgcctgctgctgaggccgagaagccagagagctctgtgagcagcgccactggagatggcaacctgagccccagccagccccccctgaagaacctgctgagcctgctgaaggcctactatgccctgaatgcccagcccagcgctgaggagctgagcaagattgctgacagcgtgaacctgcccctggatgtggtgaagaagtggtttgagaagatgcaggccggccagatctctgtgcagagcagcgagcccagcagccctgagcccgggaaggtgaacatcccagccaagaacaatgaccagccccagagcgccaatgccaatgagccccaggacagcacagtgaacctgcagagccccctgaagatgaccaacagccctgtgctgcctgtgggcagcaccaccaacggcagccgcagcagcacccccagccccagccccctgaacctgagcagcagcaggaacacccagggctacctgtacacagctgagggcgcccaggaggagccccaggtggagcccctggacctgagcctgcccaagcagcagggcgagctgctggagaggagcaccatcacctctgtgtaccagaacagcgtgtacagcgtgcaggaggagcccctgaacctgagctgtgccaagaaggagccccagaaggacagctgtgtgacagattctgagcctgtggtgaatgtcatccccccatctgccaaccccatcaacatcgccatccccaccgtgacagcccagctgcccaccatcgtggccatcgctgaccagaacagcgtgccctgcctgcgggccctggccgccaacaagcagaccatcctgatcccccaggtggcctacacctacagcaccaccgtgtccccagctgtgcaggagccccccctgaaggtgatccagcccaatggaaaccaggatgagcggcaggacaccagcagcgagggcgtgtccaatgtggaggaccagaatgacagcgacagcaccccacccaagaagaagatgaggaagacagaaaatggcatgtatgcctgtgacctgtgtgacaagatcttccagaagagcagcagcctgctgcggcacaagtatgagcacacaggcaagaggcctcatgaatgtggcatctgcaagaaggccttcaagcacaagcaccacctgattgagcacatgaggctgcacagcggggagaagccctaccagtgtgacaagtgtgggaagcgcttcagccacagcggcagctacagccagcacatgaaccaccgctacagctactgcaagcgggaggccgaggagcgggacagcacagagcaggaggaggccggccctgagatcctgagcaatgaacatgtgggcgcccgggccagccccagccagggcgacagtgatgagcgggagagcctgacccgggaggaggatgaagattctgagaaggaggaggaggaggaggacaaggagatggaggagctgcaggaggagaaggaatgtgagaagccccagggagatgaggaggaggaggaggaggaggaggaggtggaggaggaggaggtggaggaggccgagaatgaaggagaggaggccaagacagagggcctgatgaaggatgacagagctgagagccaggccagcagcctgggccagaaggtgggggagagcagcgagcaggtgtctgaggagaagaccaatgaggcctag

SEQ ID NO: 22630 - DNA, 870 bp, synthetic construct
  misc_feature 1..870: note = Description of Artificial Sequence: Synthetic coding sequence
  source 1..870: mol_type = other DNA
atggctgatggcccccgctgcaagaggaggaagcaggccaaccccaggagaaataatgtgaccaactacaacacagtggtggagaccaacagcgacagtgatgatgaggacaagctgcacatcgtggaggaggagagcgtgacagatgctgctgactgtgaaggagtgcctgaagatgacctgcccacagaccagacagtgctgcccggccgcagcagcgagcgggagggcaatgccaagaactgctgggaggatgacaccgggaaggagggccaggagatcctgggccctgaggcccaggctgatgaggccggctgcaccgtgaaggatgatgaatgtgagagtgatgctgaaaatgagcagaaccacgaccccaacgtggaggagttcctgcagcagcaggacacagctgtgatcttccctgaggcccctgaggaggaccagaggcagggcaccccagaggccagcggccatgatgaaaatggcaccccagatgccttcagccagctgctgacctgcccctactgtgaccggggctacaagcgcttcaccagcctgaaggagcacatcaagtacagacatgagaagaatgaagacaacttcagctgcagcctgtgcagctacacctttgcctaccgcacccagctggagcggcacatgaccagccacaagagcggccgggaccagagacatgtgacccagagcggctgcaacaggaagttcaagtgcacagaatgtgggaaggccttcaagtacaagcaccacctgaaggagcacctgcgcatccacagcggggagaagccctatgagtgccccaactgcaagaagcgcttcagccacagcggcagctacagcagccacatctcctag

SEQ ID NO: 22631 - DNA, 2721 bp, synthetic construct
  misc_feature 1..2721: note = Description of Artificial Sequence: Synthetic coding sequence
  source 1..2721: mol_type = other DNA
atgaccagccacaagagcggccgggaccagagacatgtgacccagagcggctgcaacaggaagttcaagtgcacagaatgtgggaaggccttcaagtacaagcaccacctgaaggagcacctgcgcatccacagcggggagaagccctatgaatgtcccaactgcaagaagcgcttcagccacagcggcagctacagcagccacatcagcagcaagaagtgcatcagcctcatccctgtgaatggccggcccaggacaggcctgaagaccagccagtgcagcagccccagcctgagcgccagccctggcagccccacccggccccagatccggcagaagattgagaacaagcccctgcaggagcagctgtctgtgaaccagatcaagacagagcctgtggactatgagttcaagcccatcgtggtggccagcggcatcaactgcagcacccccctgcagaatggagtcttcaccggcggcggccccctgcaggccaccagcagcccccagggcatggtgcaggccgtggtgctgcccaccgtgggcctggtgagccccatcagcatcaacctgagtgacatccagaatgtgctgaaggtggccgtggatggaaatgtcatccggcaggtgctggagaacaaccaggccaacctggccagcaaggagcaggagaccatcaatgccagccccatccagcagggcggccacagcgtcatcagcgccatcagcctgcccctggtggaccaggacggcaccaccaagatcatcatcaactacagcctggagcagcccagccagctgcaggtggtgccccagaacctgaagaaggaaaatcctgtggccaccaacagctgcaagtctgagaagctgcctgaggacctgactgtgaagtctgagaaggacaagagctttgagggcggcgtgaatgacagcacctgcctgctgtgtgatgactgccctggggacatcaatgccctgcctgagctgaagcactatgacctgaagcagcccacccagcccccacccctgcctgctgctgaggccgagaagccagagagctctgtgtcctctgccactggagatggcaacctgagccccagccagccccccctgaagaacctgctgagcctgctgaaggcctactatgccctgaatgcccagcccagcgctgaggagctgagcaagattgctgacagcgtgaacctgcccctggatgtggtgaagaagtggtttgagaagatgcaggccggccagatctctgtgcagagcagcgagcccagcagccctgagcccgggaaggtgaacatcccagccaagaacaatgaccagccccagagcgccaatgccaatgagccccaggacagcacagtgaacctgcagagccccctgaagatgaccaacagccctgtgctgcctgtgggcagcaccaccaacggcagccgcagcagcacccccagccccagccccctgaacctgagcagcagcaggaacacccagggctacctgtacacagctgagggcgcccaggaggagccccaggtggagcccctggacctgagcctgcccaagcagcagggcgagctgctggagaggagcaccatcacctctgtgtaccagaacagcgtgtacagcgtgcaggaggagcccctgaacctgagctgtgccaagaaggagccccagaaggacagctgtgtgacagacagcgagcctgtggtgaatgtcatcccccccagcgccaaccccatcaacatcgccatccccaccgtgacagcccagctgcccaccatcgtggccatcgctgaccagaacagcgtgccctgcctgcgggccctggccgccaacaagcagaccatcctgatcccccaggtggcctacacctacagcaccaccgtgtccccagctgtgcaggagccccccctgaaggtgatccagcccaacggcaaccaggatgagcggcaggacaccagcagcgagggcgtgtccaatgtggaggaccagaatgacagcgacagcaccccacccaagaagaagatgaggaagacagaaaatggcatgtatgcctgtgacctgtgtgacaagatcttccagaagagcagcagcctgctgcggcacaagtatgagcacacaggcaagaggcctcatgaatgtggcatctgcaagaaggccttcaagcacaagcaccacctgattgagcacatgaggctgcacagcggggagaagccctaccagtgtgacaagtgtgggaagcgcttcagccacagcggcagctacagccagcacatgaaccaccgctacagctactgcaagcgggaggccgaggagcgggacagcacagagcaggaggaggccggccctgagatcctgagcaatgagcacgtgggcgcccgggccagccccagccagggcgacagtgatgagcgggagagcctgacccgggaggaggatgaggacagcgagaaggaggaggaggaggaggacaaggagatggaggagctgcaggaggagaaggaatgtgagaagccccagggagatgaggaggaggaggaggaggaggaggaggtggaggaggaggaggtggaggaggctgaaaatgaaggagaggaggccaagacagagggcctgatgaaggatgacagagctgagagccaggccagcagcctgggccagaaggtgggggagagcagcgagcaggtgtctgaggagaagaccaatgaggcctag

SEQ ID NO: 22632 - DNA, 3327 bp, synthetic construct
  misc_feature 1..3327: note = Description of Artificial Sequence: Synthetic coding sequence
  source 1..3327: mol_type = other DNA
atgaaggtgaccaactacaacacagtggtggagaccaacagcgacagtgatgatgaggacaagctgcacatcgtggaggaggagagcgtgacagatgctgctgactgtgagggcgtgcctgaagatgacctgcccacagaccagacagtgctgcccggccgcagcagcgagcgggagggcaatgccaagaactgctgggaggatgacaccgggaaggagggccaggagatcctgggccctgaggcccaggctgatgaagctggctgcaccgtgaaggatgatgaatgtgagagtgatgctgaaaatgagcagaaccacgaccccaacgtggaggagttcctgcagcagcaggacacagctgtgatcttccctgaggcccctgaggaggaccagaggcagggcaccccagaggccagcggccatgatgaaaatggcaccccagatgccttcagccagctgctgacctgcccctactgtgaccggggctacaagcgcttcaccagcctgaaggagcacatcaagtacagacatgagaagaatgaagacaacttcagctgcagcctgtgcagctacacctttgcctaccgcacccagctggagcggcacatgaccagccacaagagcggccgggaccagagacatgtgacccagagcggctgcaacaggaagttcaagtgcacagaatgtgggaaggccttcaagtacaagcaccacctgaaggagcacctgcgcatccacagcggggagaagccctatgaatgtcccaactgcaagaagcgcttcagccacagcggcagctacagcagccacatcagcagcaagaagtgcatcagcctcatccctgtgaatggccggcccaggacaggcctgaagaccagccagtgcagcagccccagcctgagcgccagccctggcagccccacccggccccagatccggcagaagattgagaacaagcccctgcaggagcagctgtctgtgaaccagatcaagacagagcctgtggactatgagttcaagcccatcgtggtggccagcggcatcaactgcagcacccccctgcagaatggagtcttcaccggcggcggccccctgcaggccaccagcagcccccagggcatggtgcaggccgtggtgctgcccaccgtgggcctggtgagccccatcagcatcaacctgagtgacatccagaatgtgctgaaggtggccgtggatggaaatgtcatccggcaggtgctggagaacaaccaggccaacctggccagcaaggagcaggagaccatcaatgccagccccatccagcagggcggccacagcgtcatcagcgccatcagcctgcccctggtggaccaggacggcaccaccaagatcatcatcaactacagcctggagcagcccagccagctgcaggtggtgccccagaacctgaagaaggaaaatcctgtggccaccaacagctgcaagtctgagaagctgcctgaggacctgactgtgaagtctgagaaggacaagagctttgagggcggcgtgaatgacagcacctgcctgctgtgtgatgactgccctggggacatcaatgccctgcctgagctgaagcactatgacctgaagcagcccacccagcccccacccctgcctgctgctgaggccgagaagccagagagctctgtgtcctctgccactggagatggcaacctgagccccagccagccccccctgaagaacctgctgagcctgctgaaggcctactatgccctgaatgcccagcccagcgctgaggagctgagcaagattgctgacagcgtgaacctgcccctggatgtggtgaagaagtggtttgagaagatgcaggccggccagatctctgtgcagagcagcgagcccagcagccctgagcccgggaaggtgaacatcccagccaagaacaatgaccagccccagagcgccaatgccaatgagccccaggacagcacagtgaacctgcagagccccctgaagatgaccaacagccctgtgctgcctgtgggcagcaccaccaacggcagccgcagcagcacccccagccccagccccctgaacctgagcagcagcaggaacacccagggctacctgtacacagctgagggcgcccaggaggagccccaggtggagcccctggacctgagcctgcccaagcagcagggcgagctgctggagaggagcaccatcacctctgtgtaccagaacagcgtgtacagcgtgcaggaggagcccctgaacctgagctgtgccaagaaggagccccagaaggacagctgtgtgacagacagcgagcctgtggtgaatgtcatcccccccagcgccaaccccatcaacatcgccatccccaccgtgacagcccagctgcccaccatcgtggccatcgctgaccagaacagcgtgccctgcctgcgggccctggccgccaacaagcagaccatcctgatcccccaggtggcctacacctacagcaccaccgtgtccccagctgtgcaggagccccccctgaaggtgatccagcccaacggcaaccaggatgagcggcaggacaccagcagcgagggcgtgtccaatgtggaggaccagaatgacagcgacagcaccccacccaagaagaagatgaggaagacagaaaatggcatgtatgcctgtgacctgtgtgacaagatcttccagaagagcagcagcctgctgcggcacaagtatgagcacacaggcaagaggcctcatgaatgtggcatctgcaagaaggccttcaagcacaagcaccacctgattgagcacatgaggctgcacagcggggagaagccctaccagtgtgacaagtgtgggaagcgcttcagccacagcggcagctacagccagcacatgaaccaccgctacagctactgcaagcgggaggccgaggagcgggacagcacagagcaggaggaggccggccctgagatcctgagcaatgagcacgtgggcgcccgggccagccccagccagggcgacagtgatgagcgggagagcctgacccgggaggaggatgaggacagcgagaaggaggaggaggaggaggacaaggagatggaggagctgcaggaggagaaggaatgtgagaagccccagggagatgaggaggaggaggaggaggaggaggaggtggaggaggaggaggtggaggaggctgaaaatgaaggagaggaggccaagacagagggcctgatgaaggatgacagagctgagagccaggccagcagcctgggccagaaggtgggggagagcagcgagcaggtgtctgaggagaagaccaatgaggcctag

SEQ ID NO: 22633 - DNA, 3180 bp, synthetic construct
  misc_feature 1..3180: note = Description of Artificial Sequence: Synthetic coding sequence
  source 1..3180: mol_type = other DNA
atggctgatggcccccgctgcaagaggaggaagcaggccaaccccaggagaaataatgtgaccaactacaacacagtggtggagaccaacagcgacagtgatgatgaggacaagctgcacatcgtggaggaggagagcgtgacagatgctgctgactgtgaaggagtgcctgaagatgacctgcccacagaccagacagtgctgcccggccgcagcagcgagcgggagggcaatgccaagaactgctgggaggatgacaggaaggagggccaggagatcctgggccctgaggcccaggctgatgaagctggctgcaccgtgaaggatgatgaatgtgagagtgatgctgaaaatgagcagaaccacgaccccaacgtggaggagttcctgcagcagcaggacacagctgtgatcttccctgaggcccctgaggaggaccagaggcagggcaccccagaggccagcggccatgatgaaaatggcaccccagatgccttcagccagctgctgacctgcccctactgtgaccggggctacaagcgcttcaccagcctgaaggagcacatcaagtacagacatgagaagaatgaagacaacttcagctgcagcctgtgcagctacacctttgcctaccgcacccagctggagcggcacatgaccagccacaagagcggccgggaccagagacatgtgacccagagcggctgcaacaggaagttcaagtgcacagaatgtgggaaggccttcaagtacaagcaccacctgaaggagcacctgcgcatccacagcggggagaagccctatgaatgtcccaactgcaagaagcgcttcagccacagcggcagctacagcagccacatcagcagcaagaagtgcatcagcctcatccctgtgaatggccggcccaggacaggcctgaagaccagccagtgcagcagccccagcctgagcgccagccctggcagccccacccggccccagatccggcagaagattgagaacaagcccctgcaggagcagctgtctgtgaaccagatcaagacagagcctgtggactatgagttcaagcccatcgtggtggccagcggcatcaactgcagcacccccctgcagaatggagtcttcaccggcggcggccccctgcaggccaccagcagcccccagggcatggtgcaggccgtggtgctgcccaccgtgggcctggtgagccccatcagcatcaacctgagtgacatccagaatgtgctgaaggtggccgtggatggaaatgtcatccggcaggtgctggagaacaaccaggccaacctggccagcaaggagcaggagaccatcaatgccagccccatccagcagggcggccacagcgtcatcagcgccatcagcctgcccctggtggaccaggacggcaccaccaagatcatcatcaactacagcctggagcagcccagccagctgcaggtggtgccccagaacctgaagaaggaaaatcctgtggccaccaacagctgcaagtctgagaagctgcctgaggacctgactgtgaagtctgagaaggacaagagctttgagggcggcgtgaatgacagcacctgcctgctgtgtgatgactgccctggggacatcaatgccctgcctgagctgaagcactatgacctgaagcagcccacccagcccccacccctgcctgctgctgaggccgagaagccagagagctctgtgtcctctgccactggagatggcaacctgagccccagccagccccccctgaagaacctgctgagcctgctgaaggcctactatgccctgaatgcccagcccagcgctgaggagctgagcaagattgctgacagcgtgaacctgcccctggatgtggtgaagaagtggtttgagaagatgcaggccggccagatctctgtgcagagcagcgagcccagcagccctgagcccgggaaggtgaacatcccagccaagaacaatgaccagccccagagcgccaatgccaatgagccccaggacagcacagtgaacctgcagagccccctgaagatgaccaacagccctgtgctgcctgtgggcagcaccaccaacggcagccgcagcagcacccccagccccagccccctgaacctgagcagcagcaggaacacccagggctacctgtacacagctgagggcgcccaggaggagccccaggtggagcccctggacctgagcctgcccaagcagcagggcgagctgctggagaggagcaccatcacctctgtgtaccagaacagcgtgtacagcgtgcaggaggagcccctgaacctgagctgtgccaagaaggagccccagaaggacagctgtgtgacagacagcgagcctgtggtgaatgtcatcccccccagcgccaaccccatcaacatcgccatccccaccgtgacagcccagctgcccaccatcgtggccatcgctgaccagaacagcgtgccctgcctgcgggccctggccgccaacaagcagaccatcctgatcccccaggtggcctacacctacagcaccaccgtgtccccagctgtgcaggagccccccctgaaggtgatccagcccaacggcaaccaggatgagcggcaggacaccagcagcgagggcgtgtccaatgtggaggaccagaatgacagcgacagcaccccacccaagaagaagatgaggaagacagaaaatggcatgtatgcctgtgacctgtgtgacaagatcttccagaagagcagcagcctgctgcggcacaagtatgagcacacaggcaagaggcctcatgaatgtggcatctgcaagaaggccttcaagcacaagcaccacctgattgagcacatgaggctgcacagcggggagaagccctaccagtgtgacaagtgtgggaagcgcttcagccacagcggcagctacagccagcacatgaaccaccgctacagctactgcaagcgggaggccgaggagcgggacagcacagagcaggaggaggccggccctgagatcctgagcaatgagcacgtgggcgcccgggccagccccagccagggcgacagtgatgagcgggagagcctgacccgggaggaggatgaggacagcgagaaggaggaggaggaggaggacaaggagatggaggagctgcaggaggagaagcacaagaagaagaagtag

SEQ ID NO: 22634 - DNA, 1932 bp, synthetic construct
  misc_feature 1..1932: note = Description of Artificial Sequence: Synthetic coding sequence
  source 1..1932: mol_type = other DNA
atggctgatggcccccgctgcaagaggaggaagcaggccaaccccaggagaaataatggcaccccagatgccttcagccagctgctgacctgcccctactgtgaccggggctacaagcgcttcaccagcctgaaggagcacatcaagtacagacatgagaagaatgaagacaacttcagctgcagcctgtgcagctacacctttgcctaccgcacccagctggagcggcacatgaccagccacaagagcggccgggaccagagacatgtgacccagagcggctgcaacaggaagttcaagtgcacagaatgtgggaaggccttcaagtacaagcaccacctgaaggagcacctgcgcatccacagcggggagaagccctatgagtgccccaactgcaagaagcgcttcagccacagcggcagctacagcagccacatcagcagcaagaagtgcatcagcctcatccctgtgaatggccggcccaggacaggcctgaagaccagccagtgcagcagccccagcctgagcgccagccctggcagccccacccggccccagatccggcagaagattgagaacaagcccctgcaggagcagctgtctgtgaaccagatcaagacagagcctgtggactatgagttcaagcccatcgtggtggccagcggcatcaactgcagcacccccctgcagaatggagtcttcaccggcggcggccccctgcaggccaccagcagcccccagggcatggtgcaggccgtggtgctgcccaccgtgggcctggtgagccccatcagcatcaacctgagtgacatccagaatgtgctgaaggtggccgtggatggaaatgtcatccggcaggtgctggagaacaaccaggccaacctggccagcaaggagcaggagaccatcaatgccagccccatccagcagggcggccacagcgtcatcagcgccatcagcctgcccctggtggaccaggacggcaccaccaagatcatcatcaactacagcctggagcagcccagccagctgcaggtggtgccccagaacctgaagaaggagaaccctgtggccaccaacagctgcaagtctgagaagctgcctgaggacctgactgtgaagtctgagaaggacaagagctttgaaggaggagtgaatgacagcacctgcctgctgtgtgatgactgccctggggacatcaatgccctgcctgagctgaagcactatgacctgaagcagcccacccagcccccacccctgcctgctgctgaggccgagaagccagagagctctgtgagcagcgccactggagatggcaacctgagccccagccagccccccctgaagaacctgctgagcctgctgaaggcctactatgccctgaatgcccagcccagcgctgaggagctgagcaagattgctgacagcgtgaacctgcccctggatgtggtgaagaagtggtttgagaagatgcaggccggccagatctctgtgcagagcagcgagcccagcagccctgagcccgggaaggtgaacatcccagccaagaacaatgaccagccccagagcgccaatgccaatgagccccaggacagcacagtgaacctgcagagccccctgaagatgaccaacagccctgtgctgcctgtgggcagcaccaccaacggcagccgcagcagcacccccagccccagccccctgaacctgagcagcagcaggaacacccagggctacctgtacacagctgagggcgcccaggaggagccccaggtggagcccctggacctgagcctgcccaagcagcagggcgaggaggccaagacagagggcctgatgaaggatgacagagctgagagccaggccagcagcctgggccagaaggtgggggagagcagcgagcaggtgtctgaggagaagaccaatgaggcctag

SEQ ID NO: 22635 - DNA, 3174 bp, synthetic construct
  misc_feature 1..3174: note = Description of Artificial Sequence: Synthetic coding sequence
  source 1..3174: mol_type = other DNA
atggctgatggcccccgctgcaagaggaggaagcaggccaaccccaggagaaataatggcaaggagggccaggagatcctgggccctgaggcccaggctgatgaggccggctgcaccgtgaaggatgatgaatgtgagagtgatgctgaaaatgagcagaaccacgaccccaacgtggaggagttcctgcagcagcaggacacagctgtgatcttccctgaggcccctgaggaggaccagaggcagggcaccccagaggccagcggccatgatgaaaatggcaccccagatgccttcagccagctgctgacctgcccctactgtgaccggggctacaagcgcttcaccagcctgaaggagcacatcaagtacagacatgagaagaatgaagacaacttcagctgcagcctgtgcagctacacctttgcctaccgcacccagctggagcggcacatgaccagccacaagagcggccgggaccagagacatgtgacccagagcggctgcaacaggaagttcaagtgcacagaatgtgggaaggccttcaagtacaagcaccacctgaaggagcacctgcgcatccacagcggggagaagccctatgagtgccccaactgcaagaagcgcttcagccacagcggcagctacagcagccacatcagcagcaagaagtgcatcagcctcatccctgtgaatggccggcccaggacaggcctgaagaccagccagtgcagcagccccagcctgagcgccagccctggcagccccacccggccccagatccggcagaagattgagaacaagcccctgcaggagcagctgtctgtgaaccagatcaagacagagcctgtggactatgagttcaagcccatcgtggtggccagcggcatcaactgcagcacccccctgcagaatggagtcttcaccggcggcggccccctgcaggccaccagcagcccccagggcatggtgcaggccgtggtgctgcccaccgtgggcctggtgagccccatcagcatcaacctgagtgacatccagaatgtgctgaaggtggccgtggatggaaatgtcatccggcaggtgctggagaacaaccaggccaacctggccagcaaggagcaggagaccatcaatgccagccccatccagcagggcggccacagcgtcatcagcgccatcagcctgcccctggtggaccaggacggcaccaccaagatcatcatcaactacagcctggagcagcccagccagctgcaggtggtgccccagaacctgaagaaggagaaccctgtggccaccaacagctgcaagtctgagaagctgcctgaggacctgactgtgaagtctgagaaggacaagagctttgaaggaggagtgaatgacagcacctgcctgctgtgtgatgactgccctggggacatcaatgccctgcctgagctgaagcactatgacctgaagcagcccacccagcccccacccctgcctgctgctgaggccgagaagccagagagctctgtgagcagcgccactggagatggcaacctgagccccagccagccccccctgaagaacctgctgagcctgctgaaggcctactatgccctgaatgcccagcccagcgctgaggagctgagcaagattgctgacagcgtgaacctgcccctggatgtggtgaagaagtggtttgagaagatgcaggccggccagatctctgtgcagagcagcgagcccagcagccctgagcccgggaaggtgaacatcccagccaagaacaatgaccagccccagagcgccaatgccaatgagccccaggacagcacagtgaacctgcagagccccctgaagatgaccaacagccctgtgctgcctgtgggcagcaccaccaacggcagccgcagcagcacccccagccccagccccctgaacctgagcagcagcaggaacacccagggctacctgtacacagctgagggcgcccaggaggagccccaggtggagcccctggacctgagcctgcccaagcagcagggcgagctgctggagaggagcaccatcacctctgtgtaccagaacagcgtgtacagcgtgcaggaggagcccctgaacctgagctgtgccaagaaggagccccagaaggacagctgtgtgacagattctgagcctgtggtgaatgtcatccccccatctgccaaccccatcaacatcgccatccccaccgtgacagcccagctgcccaccatcgtggccatcgctgaccagaacagcgtgccctgcctgcgggccctggccgccaacaagcagaccatcctgatcccccaggtggcctacacctacagcaccaccgtgtccccagctgtgcaggagccccccctgaaggtgatccagcccaatggaaaccaggatgagcggcaggacaccagcagcgagggcgtgtccaatgtggaggaccagaatgacagcgacagcaccccacccaagaagaagatgaggaagacagaaaatggcatgtatgcctgtgacctgtgtgacaagatcttccagaagagcagcagcctgctgcggcacaagtatgagcacacaggcaagaggcctcatgaatgtggcatctgcaagaaggccttcaagcacaagcaccacctgattgagcacatgaggctgcacagcggggagaagccctaccagtgtgacaagtgtgggaagcgcttcagccacagcggcagctacagccagcacatgaaccaccgctacagctactgcaagcgggaggccgaggagcgggacagcacagagcaggaggaggccggccctgagatcctgagcaatgaacatgtgggcgcccgggccagccccagccagggcgacagtgatgagcgggagagcctgacccgggaggaggatgaagattctgagaaggaggaggaggaggaggacaaggagatggaggagctgcaggaggagaaggaatgtgagaagccccagggagatgaggaggaggaggaggaggaggaggaggtggaggaggaggaggtggaggaggccgagaatgaaggagaggaggccaagacagagggcctgatgaaggatgacagagctgagagccaggccagcagcctgggccagaaggtgggggagagcagcgagcaggtgtctgaggagaagaccaatgaggcctag

SEQ ID NO: 22636 - DNA, 3048 bp, synthetic construct
  misc_feature 1..3048: note = Description of Artificial Sequence: Synthetic coding sequence
  source 1..3048: mol_type = other DNA
atgatgaatgccagccagatgcagaagatgagcaagaccatgatcctgatgctgaagagcttctacaacaacaagaccctgctgtccttcttcctgcggcacctgaagaggacccggggccgggcccaccagaagcctgtggtgatgatgaagatggagcaccagatgcacttccacaactacagccctgtgcacatcgtcatcggctacaagcgcttcaccagcctgaaggagcacatcaagtacagacatgagaagaatgaagacaacttcagctgcagcctgtgcagctacacctttgcctaccgcacccagctggagcggcacatgaccagccacaagagcggccgggaccagagacatgtgacccagagcggctgcaacaggaagttcaagtgcacagaatgtgggaaggccttcaagtacaagcaccacctgaaggagcacctgcgcatccacagcggggagaagccctatgagtgccccaactgcaagaagcgcttcagccacagcggcagctacagcagccacatcagcagcaagaagtgcatcagcctcatccctgtgaatggccggcccaggacaggcctgaagaccagccagtgcagcagccccagcctgagcgccagccctggcagccccacccggccccagatccggcagaagattgagaacaagcccctgcaggagcagctgtctgtgaaccagatcaagacagagcctgtggactatgagttcaagcccatcgtggtggccagcggcatcaactgcagcacccccctgcagaatggagtcttcaccggcggcggccccctgcaggccaccagcagcccccagggcatggtgcaggccgtggtgctgcccaccgtgggcctggtgagccccatcagcatcaacctgagtgacatccagaatgtgctgaaggtggccgtggatggaaatgtcatccggcaggtgctggagaacaaccaggccaacctggccagcaaggagcaggagaccatcaatgccagccccatccagcagggcggccacagcgtcatcagcgccatcagcctgcccctggtggaccaggacggcaccaccaagatcatcatcaactacagcctggagcagcccagccagctgcaggtggtgccccagaacctgaagaaggagaaccctgtggccaccaacagctgcaagtctgagaagctgcctgaggacctgactgtgaagtctgagaaggacaagagctttgaaggaggagtgaatgacagcacctgcctgctgtgtgatgactgccctggggacatcaatgccctgcctgagctgaagcactatgacctgaagcagcccacccagcccccacccctgcctgctgctgaggccgagaagccagagagctctgtgagcagcgccactggagatggcaacctgagccccagccagccccccctgaagaacctgctgagcctgctgaaggcctactatgccctgaatgcccagcccagcgctgaggagctgagcaagattgctgacagcgtgaacctgcccctggatgtggtgaagaagtggtttgagaagatgcaggccggccagatctctgtgcagagcagcgagcccagcagccctgagcccgggaaggtgaacatcccagccaagaacaatgaccagccccagagcgccaatgccaatgagccccaggacagcacagtgaacctgcagagccccctgaagatgaccaacagccctgtgctgcctgtgggcagcaccaccaacggcagccgcagcagcacccccagccccagccccctgaacctgagcagcagcaggaacacccagggctacctgtacacagctgagggcgcccaggaggagccccaggtggagcccctggacctgagcctgcccaagcagcagggcgagctgctggagaggagcaccatcacctctgtgtaccagaacagcgtgtacagcgtgcaggaggagcccctgaacctgagctgtgccaagaaggagccccagaaggacagctgtgtgacagattctgagcctgtggtgaatgtcatccccccatctgccaaccccatcaacatcgccatccccaccgtgacagcccagctgcccaccatcgtggccatcgctgaccagaacagcgtgccctgcctgcgggccctggccgccaacaagcagaccatcctgatcccccaggtggcctacacctacagcaccaccgtgtccccagctgtgcaggagccccccctgaaggtgatccagcccaatggaaaccaggatgagcggcaggacaccagcagcgagggcgtgtccaatgtggaggaccagaatgacagcgacagcaccccacccaagaagaagatgaggaagacagaaaatggcatgtatgcctgtgacctgtgtgacaagatcttccagaagagcagcagcctgctgcggcacaagtatgagcacacaggcaagaggcctcatgaatgtggcatctgcaagaaggccttcaagcacaagcaccacctgattgagcacatgaggctgcacagcggggagaagccctaccagtgtgacaagtgtgggaagcgcttcagccacagcggcagctacagccagcacatgaaccaccgctacagctactgcaagcgggaggccgaggagcgggacagcacagagcaggaggaggccggccctgagatcctgagcaatgaacatgtgggcgcccgggccagccccagccagggcgacagtgatgagcgggagagcctgacccgggaggaggatgaagattctgagaaggaggaggaggaggaggacaaggagatggaggagctgcaggaggagaaggaatgtgagaagccccagggagatgaggaggaggaggaggaggaggaggaggtggaggaggaggaggtggaggaggccgagaatgaaggagaggaggccaagacagagggcctgatgaaggatgacagagctgagagccaggccagcagcctgggccagaaggtgggggagagcagcgagcaggtgtctgaggagaagaccaatgaggcctag

SEQ ID NO: 22637 - DNA, 3360 bp, synthetic construct
  misc_feature 1..3360: note = Description of Artificial Sequence: Synthetic coding sequence
  source 1..3360: mol_type = other DNA
atggctgatggcccccgctgcaagaggaggaagcaggccaaccccaggagaaataatgtgaccaactacaacacagtggtggagaccaacagcgacagtgatgatgaggacaagctgcacatcgtggaggaggagagcgtgacagatgctgctgactgtgaaggagtgcctgaagatgacctgcccacagaccagacagtgctgcccggccgcagcagcgagcgggagggcaatgccaagaactgctgggaggatgacaggaaggagggccaggagatcctgggccctgaggcccaggctgatgaagctggctgcaccgtgaaggatgatgaatgtgagagtgatgctgaaaatgagcagaaccacgaccccaacgtggaggagttcctgcagcagcaggacacagctgtgatcttccctgaggcccctgaggaggaccagaggcagggcaccccagaggccagcggccatgatgaaaatggcaccccagatgccttcagccagctgctgacctgcccctactgtgaccggggctacaagcgcttcaccagcctgaaggagcacatcaagtacagacatgagaagaatgaagacaacttcagctgcagcctgtgcagctacacctttgcctaccgcacccagctggagcggcacatgaccagccacaagagcggccgggaccagagacatgtgacccagagcggctgcaacaggaagttcaagtgcacagaatgtgggaaggccttcaagtacaagcaccacctgaaggagcacctgcgcatccacagcggggagaagccctatgaatgtcccaactgcaagaagcgcttcagccacagcggcagctacagcagccacatcagcagcaagaagtgcatcagcctcatccctgtgaatggccggcccaggacaggcctgaagaccagccagtgcagcagccccagcctgagcgccagccctggcagccccacccggccccagatccggcagaagattgagaacaagcccctgcaggagcagctgtctgtgaaccagatcaagacagagcctgtggactatgagttcaagcccatcgtggtggccagcggcatcaactgcagcacccccctgcagaatggagtcttcaccggcggcggccccctgcaggccaccagcagcccccagggcatggtgcaggccgtggtgctgcccaccgtgggcctggtgagccccatcagcatcaacctgagtgacatccagaatgtgctgaaggtggccgtggatggaaatgtcatccggcaggtgctggagaacaaccaggccaacctggccagcaaggagcaggagaccatcaatgccagccccatccagcagggcggccacagcgtcatcagcgccatcagcctgcccctggtggaccaggacggcaccaccaagatcatcatcaactacagcctggagcagcccagccagctgcaggtggtgccccagaacctgaagaaggaaaatcctgtggccaccaacagctgcaagtctgagaagctgcctgaggacctgactgtgaagtctgagaaggacaagagctttgagggcggcgtgaatgacagcacctgcctgctgtgtgatgactgccctggggacatcaatgccctgcctgagctgaagcactatgacctgaagcagcccacccagcccccacccctgcctgctgctgaggccgagaagccagagagctctgtgtcctctgccactggagatggcaacctgagccccagccagccccccctgaagaacctgctgagcctgctgaaggcctactatgccctgaatgcccagcccagcgctgaggagctgagcaagattgctgacagcgtgaacctgcccctggatgtggtgaagaagtggtttgagaagatgcaggccggccagatctctgtgcagagcagcgagcccagcagccctgagcccgggaaggtgaacatcccagccaagaacaatgaccagccccagagcgccaatgccaatgagccccaggacagcacagtgaacctgcagagccccctgaagatgaccaacagccctgtgctgcctgtgggcagcaccaccaacggcagccgcagcagcacccccagccccagccccctgaacctgagcagcagcaggaacacccagggctacctgtacacagctgagggcgcccaggaggagccccaggtggagcccctggacctgagcctgcccaagcagcagggcgagctgctggagaggagcagcctgcctgagcagtgcctcttctgccccggccgcaccctggagctggtgctgaagaaggagccccagaaggacagctgtgtgacagattctgagcctgtggtgaatgtcatccccccatctgccaaccccatcaacatcgccatccccaccgtgacagcccagctgcccaccatcgtggccatcgctgaccagaacagcgtgccctgcctgcgggccctggccgccaacaagcagaccatcctgatcccccaggtggcctacacctacagcaccaccgtgtccccagctgtgcaggagccccccctgaaggtgatccagcccaatggaaaccaggatgagcggcaggacaccagcagcgagggcgtgtccaatgtggaggaccagaatgacagcgacagcaccccacccaagaagaagatgaggaagacagaaaatggcatgtatgcctgtgacctgtgtgacaagatcttccagaagagcagcagcctgctgcggcacaagtatgagcacacaggcaagaggcctcatgaatgtggcatctgcaagaaggccttcaagcacaagcaccacctgattgagcacatgaggctgcacagcggggagaagccctaccagtgtgacaagtgtgggaagcgcttcagccacagcggcagctacagccagcacatgaaccaccgctacagctactgcaagcgggaggccgaggagcgggacagcacagagcaggaggaggccggccctgagatcctgagcaatgaacatgtgggcgcccgggccagccccagccagggcgacagtgatgagcgggagagcctgacccgggaggaggatgaagattctgagaaggaggaggaggaggaggacaaggagatggaggagctgcaggaggagaaggaatgtgagaagccccagggagatgaggaggaggaggaggaggaggaggaggtggaggaggaggaggtggaggaggccgagaatgaaggagaggaggccaagacagagggcctgatgaaggatgacagagctgagagccaggccagcagcctgggccagaaggtgggggagagcagcgagcaggtgtctgaggagaagaccaatgaggcctag

SEQ ID NO: 22638 - DNA, 834 bp, synthetic construct
  misc_feature 1..834: note = Description of Artificial Sequence: Synthetic coding sequence
  source 1..834: mol_type = other DNA
atgaaggtgaccaactacaacacagtggtggagaccaacagcgacagtgatgatgaggacaagctgcacatcgtggaggaggagagcgtgacagatgctgctgactgtgagggcgtgcctgaagatgacctgcccacagaccagacagtgctgcccggccgcagcagcgagcgggagggcaatgccaagaactgctgggaggatgacaccgggaaggagggccaggagatcctgggccctgaggcccaggctgatgaagctggctgcaccgtgaaggatgatgaatgtgagagtgatgctgaaaatgagcagaaccacgaccccaacgtggaggagttcctgcagcagcaggacacagctgtgatcttccctgaggcccctgaggaggaccagaggcagggcaccccagaggccagcggccatgatgaaaatggcaccccagatgccttcagccagctgctgacctgcccctactgtgaccggggctacaagcgcttcaccagcctgaaggagcacatcaagtacagacatgagaagaatgaagacaacttcagctgcagcctgtgcagctacacctttgcctaccgcacccagctggagcggcacatgaccagccacaagagcggccgggaccagagacatgtgacccagagcggctgcaacaggaagttcaagtgcacagaatgtgggaaggccttcaagtacaagcaccacctgaaggagcacctgcgcatccacagcggggagaagccctatgaatgtcccaactgcaagaagcgcttcagccacagcggcagctacagcagccacatcagcagcaagaagtgcatctag

SEQ ID NO: 22639 - DNA, 3315 bp, synthetic construct
  misc_feature 1..3315: note = Description of Artificial Sequence: Synthetic coding sequence
  source 1..3315: mol_type = other DNA
atggctgatggcccccgctgcaagaggaggaagcaggccaaccccaggagaaataatgtgaccaactacaacacagtggtggagaccaacagcgacagtgatgatgaggacaagctgcacatcgtggaggaggagagcgtgacagatgctgctgactgtgaaggagtgcctgaagatgacctgcccacagaccagacagtgctgcccggccgcagcagcgagcgggagggcaatgccaagaactgctgggaggatgacatcaaggatgatgaatgtgagagtgatgctgaaaatgagcagaaccacgaccccaacgtggaggagttcctgcagcagcaggacacagctgtgatcttccctgaggcccctgaggaggaccagaggcagggcaccccagaggccagcggccatgatgaaaatggcaccccagatgccttcagccagctgctgacctgcccctactgtgaccggggctacaagcgcttcaccagcctgaaggagcacatcaagtacagacatgagaagaatgaagacaacttcagctgcagcctgtgcagctacacctttgcctaccgcacccagctggagcggcacatgaccagccacaagagcggccgggaccagagacatgtgacccagagcggctgcaacaggaagttcaagtgcacagaatgtgggaaggccttcaagtacaagcaccacctgaaggagcacctgcgcatccacagcggggagaagccctatgaatgtcccaactgcaagaagcgcttcagccacagcggcagctacagcagccacatcagcagcaagaagtgcatcagcctcatccctgtgaatggccggcccaggacaggcctgaagaccagccagtgcagcagccccagcctgagcgccagccctggcagccccacccggccccagatccggcagaagattgagaacaagcccctgcaggagcagctgtctgtgaaccagatcaagacagagcctgtggactatgagttcaagcccatcgtggtggccagcggcatcaactgcagcacccccctgcagaatggagtcttcaccggcggcggccccctgcaggccaccagcagcccccagggcatggtgcaggccgtggtgctgcccaccgtgggcctggtgagccccatcagcatcaacctgagtgacatccagaatgtgctgaaggtggccgtggatggaaatgtcatccggcaggtgctggagaacaaccaggccaacctggccagcaaggagcaggagaccatcaatgccagccccatccagcagggcggccacagcgtcatcagcgccatcagcctgcccctggtggaccaggacggcaccaccaagatcatcatcaactacagcctggagcagcccagccagctgcaggtggtgccccagaacctgaagaaggaaaatcctgtggccaccaacagctgcaagtctgagaagctgcctgaggacctgactgtgaagtctgagaaggacaagagctttgagggcggcgtgaatgacagcacctgcctgctgtgtgatgactgccctggggacatcaatgccctgcctgagctgaagcactatgacctgaagcagcccacccagcccccacccctgcctgctgctgaggccgagaagccagagagctctgtgtcctctgccactggagatggcaacctgagccccagccagccccccctgaagaacctgctgagcctgctgaaggcctactatgccctgaatgcccagcccagcgctgaggagctgagcaagattgctgacagcgtgaacctgcccctggatgtggtgaagaagtggtttgagaagatgcaggccggccagatctctgtgcagagcagcgagcccagcagccctgagcccgggaaggtgaacatcccagccaagaacaatgaccagccccagagcgccaatgccaatgagccccaggacagcacagtgaacctgcagagccccctgaagatgaccaacagccctgtgctgcctgtgggcagcaccaccaacggcagccgcagcagcacccccagccccagccccctgaacctgagcagcagcaggaacacccagggctacctgtacacagctgagggcgcccaggaggagccccaggtggagcccctggacctgagcctgcccaagcagcagggcgagctgctggagaggagcaccatcacctctgtgtaccagaacagcgtgtacagcgtgcaggaggagcccctgaacctgagctgtgccaagaaggagccccagaaggacagctgtgtgacagacagcgagcctgtggtgaatgtcatcccccccagcgccaaccccatcaacatcgccatccccaccgtgacagcccagctgcccaccatcgtggccatcgctgaccagaacagcgtgccctgcctgcgggccctggccgccaacaagcagaccatcctgatcccccaggtggcctacacctacagcaccaccgtgtccccagctgtgcaggagccccccctgaaggtgatccagcccaacggcaaccaggatgagcggcaggacaccagcagcgagggcgtgtccaatgtggaggaccagaatgacagcgacagcaccccacccaagaagaagatgaggaagacagaaaatggcatgtatgcctgtgacctgtgtgacaagatcttccagaagagcagcagcctgctgcggcacaagtatgagcacacaggcaagaggcctcatgaatgtggcatctgcaagaaggccttcaagcacaagcaccacctgattgagcacatgaggctgcacagcggggagaagccctaccagtgtgacaagtgtgggaagcgcttcagccacagcggcagctacagccagcacatgaaccaccgctacagctactgcaagcgggaggccgaggagcgggacagcacagagcaggaggaggccggccctgagatcctgagcaatgagcacgtgggcgcccgggccagccccagccagggcgacagtgatgagcgggagagcctgacccgggaggaggatgaggacagcgagaaggaggaggaggaggaggacaaggagatggaggagctgcaggaggagaaggaatgtgagaagccccagggagatgaggaggaggaggaggaggaggaggaggtggaggaggaggaggtggaggaggctgaaaatgaaggagaggaggccaagacagagggcctgatgaaggatgacagagctgagagccaggccagcagcctgggccagaaggtgggggagagcagcgagcaggtgtctgaggagaagaccaatgaggcctag

SEQ ID NO: 22640 - DNA, 3645 bp, synthetic construct
  misc_feature 1..3645: note = Description of Artificial Sequence: Synthetic coding sequence
  source 1..3645: mol_type = other DNA
atgaagcagcccatcatggctgatggcccccgctgcaagaggaggaagcaggccaaccccaggaggaagaatgtggtgaactatgacaacgtggtggacaccggcagcgagacagatgaggaggacaagctgcacatcgccgaggatgatggcatcgccaaccccctggaccaggagaccagccctgcctctgtgcccaaccacgagagcagcccccacgtgtcccaggccctgctgccccgggaggaggaggaggatgagatccgggagggcggcgtggagcacccctggcacaacaatgagatcctgcaggcctctgtggatggccctgaggagatgaaggaggactatgacaccatgggccctgaggccaccatccagacagccatcaacaacggcaccgtgaagaatgccaactgcaccagtgactttgaggagtactttgccaagaggaagctggaggagagagatggccatgctgtgtccattgaggagtacctgcagaggagtgacacagccatcatctacccagaggcccctgaggagctgagccggctgggcaccccagaggccaacggccaggaggagaatgacctgcccccaggcaccccagatgcctttgcccagctgctgacctgcccctactgtgaccggggctacaagaggctgaccagcctgaaggagcacatcaagtacagacatgagaagaatgaggagaacttcagctgccccctgtgcagctacacctttgcctaccgcacccagctggagcggcacatggtgacccacaagccaggcacagaccagcaccagatgctgacccagggcgccggcaacaggaagttcaagtgcacagaatgtgggaaggccttcaagtacaagcaccacctgaaggagcacctgcgcatccacagcggggagaagccctatgaatgtcccaactgcaagaagcgcttcagccacagcggcagctacagcagccacatcagcagcaagaagtgcatcggcctcatctctgtgaatggaaggatgaggaacaacatcaagacaggcagcagccccaacagcgtgagcagcagccccaccaacagcgccatcacccagctgaggaacaagctggagaatggcaagcccctgtccatgtctgagcagacaggcctgctgaagatcaagacagagcccctggacttcaatgactacaaggtgctgatggccacccacggcttcagcggcaccagccccttcatgaatggaggcctgggcgccaccagccccctgggcgtgcaccccagcgcccagagccccatgcagcacctgggcgtgggcatggaggcccccctgctgggcttccccaccatgaacagcaacctgtctgaggtgcagaaggtgctgcagatcgtggacaacacagtgtcccggcagaagatggactgcaaggccgaggagatcagcaagctgaagggctaccacatgaaggacccctgcagccagcctgaggagcagggcgtgaccagccccaacatcccccctgtgggcctgcctgtggtgagccacaatggagccaccaagagcatcatcgactacaccctggagaaggtgaatgaggccaaggcctgcctgcagagcctgaccacagacagccggcggcagatcagcaacatcaagaaggagaagctgcggaccctgattgacctggtgacagatgacaagatgattgagaaccacaacatcagcacccccttcagctgccagttctgcaaggagagcttccctggccccatccccctgcaccagcacgagcgctacctgtgcaagatgaatgaggagatcaaggctgtgctgcagccccatgagaacatcgtgcccaacaaggccggcgtgtttgtggacaacaaggccctgctgctgagctctgtgctgtctgagaagggcatgaccagccccatcaacccctacaaggaccacatgtctgtgctgaaggcctactatgccatgaacatggagcccaacagtgatgagctgctgaagatcagcattgctgtgggcctgccccaggagtttgtgaaggagtggtttgagcagaggaaggtgtaccagtacagcaacagccgcagccccagcctggagaggagcagcaagcccctggcccccaacagcaacccccccaccaaggacagcctgctgcccaggagccctgtgaagcccatggacagcatcaccagccccagcattgctgagctgcacaacagcgtgaccaactgtgacccccccctgcggctgaccaagcccagccacttcaccaacatcaagcctgtggagaagctggaccacagccgcagcaacacccccagccccctgaacctgagcagcaccagcagcaagaacagccacagcagcagctacacccccaacagcttcagcagcgaggagctgcaggccgagcccctggacctgagcctgcccaagcagatgaaggagcccaagagcatcatcgccaccaagaacaagaccaaggccagcagcatcagcctggaccacaacagcgtgagcagcagcagcgagaacagtgatgagcccctgaacctgaccttcatcaagaaggagttcagcaacagcaacaacctggacaacaagagcaccaaccctgtgttctccatgaaccccttcagcgccaagcccctgtacacagccctgcccccccagagcgccttccccccagccaccttcatgcctcctgtgcagaccagcatccctggcctgcggccctacccaggcctggaccagatgtccttcctgccccacatggcctacacctaccccactggagctgccacctttgctgacatgcagcagaggaggaagtaccagaggaagcagggcttccagggcgagctgctggatggagcccaggactacatgagcggcctggatgacatgacagacagcgacagctgcctgagcaggaagaagatcaagaagacagagagcggcatgtatgcctgtgacctgtgtgacaagaccttccagaagagcagcagcctgctgcggcacaagtatgagcacacaggcaagaggccccaccagtgccagatctgcaagaaggccttcaagcacaagcaccacctgattgagcacagccggctgcacagcggggagaagccctaccagtgtgacaagtgtgggaagcgcttcagccacagcggcagctacagccagcacatgaaccaccgctacagctactgcaagcgggaggccgaggagcgggaggccgctgagcgggaggcccgggagaagggccacctggagcccacagagctgctgatgaacagagcctacctgcagagcatcaccccccagggctacagcgacagcgaggagcgggagagcatgcccagagatggagagagcgagaaggagcacgagaaggagggagaagatggctacggcaagctgggccggcaggatggagatgaggagtttgaggaggaggaggaggagagcgagaacaagtccatggacacagatcctgagaccatcagagatgaggaggagactggagaccacagcatggatgacagcagtgaagatggcaagatggagaccaagagtgaccacgaggaggacaacatggaggatggcatgtag

SEQ ID NO: 22641 - DNA, 1275 bp, synthetic construct
  misc_feature 1..1275: note = Description of Artificial Sequence: Synthetic coding sequence
  source 1..1275: mol_type = other DNA
atggctgatggcccccgctgcaagaggaggaagcaggccaaccccaggaggaagaatgtggtgaactatgacaacgtggtggacaccggcagcgagacagatgaggaggacaagctgcacatcgcagaagatgatggcatcgccaaccccctggaccaggagaccagccctgcctctgtgcccaaccacgagagcagcccccacgtgtcccaggccctgctgccccgggaggaggaggaggatgagatccgggagggcggcgtggagcacccctggcacaacaatgagatcctgcaggcctctgtggatggccctgaggagatgaaggaggactatgacaccatgggccctgaggccaccatccagacagccatcaacaatggaacagtgaagaatgccaactgcaccagtgactttgaggagtactttgccaagaggaagctggaggagagagatggccatgctgtgtccattgaggagtacctgcagaggagtgacacagccatcatctacccagaggcccctgaggagctgagccggctgggcaccccagaggccaacggccaggaggagaatgacctgcccccaggcaccccagatgcctttgcccagctgctgacctgcccctactgtgaccggggctacaagaggctgaccagcctgaaggagcacatcaagtacagacatgagaagaatgaggagaacttcagctgccccctgtgcagctacacctttgcctaccgcacccagctggagcggcacatggtgacccacaagccaggcacagaccagcaccagatgctgacccagggcgccggcaacaggaagttcaagtgcacagaatgtgggaaggccttcaagtacaagcaccacctgaaggagcacctgcgcatccacagcggggagaagccctatgagtgccccaactgcaagaagcgcttcagccacagcggcagctacagcagccacatcagcagcaagaagtgcatcggcctcatctctgtgaatggccgcatgaggaacaacatcaagacaggcagcagccccaacagcgtgagcagcagccccaccaacagcgccatcacccagctgaggaacaagctggagaatggcaagcccctgtccatgtctgagcagacaggcctgctgaagagcggccgggcccagtggctgacccccctcatcccagccctgctggaggccgaggtgggccgcagccggggccagaagattgagaccctgctggccaacatggtggagccccggctgtactag

SEQ ID NO: 22642 - DNA, 1320 bp, synthetic construct
  misc_feature 1..1320: note = Description of Artificial Sequence: Synthetic coding sequence
  source 1..1320: mol_type = other DNA
atgaagcagcccatcatggctgatggcccccgctgcaagaggaggaagcaggccaaccccaggaggaagaatgtggtgaactatgacaacgtggtggacaccggcagcgagacagatgaggaggacaagctgcacatcgccgaggatgatggcatcgccaaccccctggaccaggagaccagccctgcctctgtgcccaaccacgagagcagcccccacgtgtcccaggccctgctgccccgggaggaggaggaggatgagatccgggagggcggcgtggagcacccctggcacaacaatgagatcctgcaggcctctgtggatggccctgaggagatgaaggaggactatgacaccatgggccctgaggccaccatccagacagccatcaacaacggcaccgtgaagaatgccaactgcaccagtgactttgaggagtactttgccaagaggaagctggaggagagagatggccatgctgtgtccattgaggagtacctgcagaggagtgacacagccatcatctacccagaggcccctgaggagctgagccggctgggcaccccagaggccaacggccaggaggagaatgacctgcccccaggcaccccagatgcctttgcccagctgctgacctgcccctactgtgaccggggctacaagaggctgaccagcctgaaggagcacatcaagtacagacatgagaagaatgaggagaacttcagctgccccctgtgcagctacacctttgcctaccgcacccagctggagcggcacatggtgacccacaagccaggcacagaccagcaccagatgctgacccagggcgccggcaacaggaagttcaagtgcacagaatgtgggaaggccttcaagtacaagcaccacctgaaggagcacctgcgcatccacagcggggagaagccctatgaatgtcccaactgcaagaagcgcttcagccacagcggcagctacagcagccacatcagcagcaagaagtgcatcggcctcatctctgtgaatggaaggatgaggaacaacatcaagacaggcagcagccccaacagcgtgagcagcagccccaccaacagcgccatcacccagctgaggaacaagctggagaatggcaagcccctgtccatgtctgagcagacaggcctgctgaagatcaagacagagcccctggacttcaatgactacaaggtgctgatggccacccacggcttcagcggcaccagccccttcatgaatggaggcctgggcgccaccagccccctgggcgtgcaccccagcgcccagagccccatgcagcacctgtag

SEQ ID NO: 22643 - DNA, 408 bp, synthetic construct
  misc_feature 1..408: note = Description of Artificial Sequence: Synthetic coding sequence
  source 1..408: mol_type = other DNA
atgaagcagcccatcatggctgatggcccccgctgcaagaggaggaagcaggccaaccccaggaggaagaatgtggtgaactatgacaacgtggtggacaccggcagcgagacagatgaggaggacaagctgcacatcgccgaggatgatggcatcgccaaccccctggaccaggagaccagccctgcctctgtgcccaaccacgagagcagcccccacgtgtcccaggccctgctgccccgggaggaggaggaggatgagatccgggagggcggcgtggagcacccctggcacaacaatgagatcctgcaggcctctgtggatggccctgaggagatgaaggaggactatgacaccatgggccctgaggccaccatccagacagccatcaacaacggcaccggctag

SEQ ID NO: 22644 - DNA, 3645 bp, synthetic construct; identical to SEQ ID NO: 22640
  misc_feature 1..3645: note = Description of Artificial Sequence: Synthetic coding sequence
  source 1..3645: mol_type = other DNA

SEQ ID NO: 22645 - DNA, 2109 bp, synthetic construct
  misc_feature 1..2109: note = Description of Artificial Sequence: Synthetic coding sequence
  source 1..2109: mol_type = other DNA
atgaagcagcccatcatggctgatggcccccgctgcaagaggaggaagcaggccaaccccaggaggaagaatgtggtgaactatgacaacgtggtggacaccggcagcgagacagatgaggaggacaagctgcacatcgccgaggatgatggcatcgccaaccccctggaccaggagaccagccctgcctctgtgcccaaccacgagagcagcccccacgtgtcccaggccctgctgccccgggaggaggaggaggatgagatccgggagggcggcgtggagcacccctggcacaacaatgagatcctgcaggcctctgtggatggccctgaggagatgaaggaggactatgacaccatgggccctgaggccaccatccagacagccatcaacaacggcaccgtgaagaatgccaactgcaccagtgactttgaggagtactttgccaagaggaagctggaggagagagatggccatgctgtgtccattgaggagtacctgcagaggagtgacacagccatcatctacccagaggcccctgaggagctgagccggctgggcaccccagaggccaacggccaggaggagaatgacctgcccccaggcaccccagatgcctttgcccagctgctgacctgcccctactgtgaccggggctacaagaggctgaccagcctgaaggagcacatcaagtacagacatgagaagaatgaggagaacttcagctgccccctgtgcagctacacctttgcctaccgcacccagctggagcggcacatggtgacccacaagccaggcacagaccagcaccagatgctgacccagggcgccggcaacaggaagttcaagtgcacagaatgtgggaaggccttcaagtacaagcaccacctgaaggagcacctgcgcatccacagcggggagaagccctatgaatgtcccaactgcaagaagcgcttcagccacagcggcagctacagcagccacatcagcagcaagaagtgcatcggcctcatctctgtgaatggaaggatgaggaacaacatcaagacaggcagcagccccaacagcgtgagcagcagccccaccaacagcgccatcacccagctgaggaacaagctggagaatggcaagcccctgtccatgtctgagcagacaggcctgctgaagatcaagacagagcccctggacttcaatgactacaaggtgctgatggccacccacggcttcagcggcaccagccccttcatgaatggaggcctgggcgccaccagccccctgggcgtgcaccccagcgcccagagccccatgcagcacctgggcgtgggcatggaggcccccctgctgggcttccccaccatgaacagcaacctgtctgaggtgcagaaggtgctgcagatcgtggacaacacagtgtcccggcagaagatggactgcaaggccgaggagatcagcaagctgaagggctaccacatgaaggacccctgcagccagcctgaggagcagggcgtgaccagccccaacatcccccctgtgggcctgcctgtggtgagccacaatggagccaccaagagcatcatcgactacaccctggagaaggtgaatgaggccaaggcctgcctgcagagcctgaccacagacagccggcggcagatcagcaacatcaagaaggagaagctgcggaccctgattgacctggtgacagatgacaagatgattgagaaccacaacatcagcacccccttcagctgccagttctgcaaggagagcttccctggccccatccccctgcaccagcacgagcgctacctgtgcaagatgaatgaggagatcaaggctgtgctgcagccccatgagaacatcgtgcccaacaaggccggcgtgtttgtggacaacaaggccctgctgctgagctctgtgctgtctgagaagggcatgaccagccccatcaacccctacaaggaccacatgtctgtgctgaaggcctactatgccatgaacatggagcccaacagtgatgagctgctgaagatcagcattgctgtgggcctgccccaggagtttgtgaaggagtggtttgagcagaggaaggtgtaccagtacagcaactag

SEQ ID NO: 22646 - DNA, 276 bp, synthetic construct
  misc_feature 1..276: note = Description of Artificial Sequence: Synthetic coding sequence
  source 1..276: mol_type = other DNA
atgaagcagcccatcatggctgatggcccccgctgcaagaggaggaagcaggccaaccccaggaggaagaatgtggtgaactatgacaacgtggtggacaccggcagcgagacagatgaggaggacaagctgcacatcgccgaggatgatggcatcgccaaccccctggaccaggagaccagccctgcctctgtgcccaaccacgagagcagcccccacgtgtcccaggccctgctgccccgggaggaggaggaggatgagatccgggagggctag

SEQ ID NO: 22647 - DNA, 192 bp, synthetic construct
  misc_feature 1..192: note = Description of Artificial Sequence: Synthetic coding sequence
  source 1..192: mol_type = other DNA
atgaagcagcccatcatggctgatggcccccgctgcaagaggaggaagcaggccaaccccaggaggaagaatgtggtgaactatgacaacgtggtggacaccggcagcgagacagatgaggaggacaagctgcacatcgccgaggatgatggcatcgccaaccccctggaccaggagaccagccctgcctag

SEQ ID NO: 22648 - DNA, 3573 bp, synthetic construct
  misc_feature 1..3573: note = Description of Artificial Sequence: Synthetic coding sequence
  source 1..3573: mol_type = other DNA
atgaagcagcccatcatggctgatggcccccgctgcaagaggaggaagcaggccaaccccaggaggaagaatgtggtgaactatgacaacgtggtggacaccggcagcgagacagatgaggaggacaagctgcacatcgccgaggatgatggcatcgccaaccccctggaccaggagaccagccctgcctctgtgcccaaccacgagagcagcccccacgtgtcccaggccctgctgccccgggaggaggaggaggatgagatccgggagggcggcgtggagcacccctggcacaacaatgagatcctgcaggcctctgtggatggccctgtgaagaatgccaactgcaccagtgactttgaggagtactttgccaagaggaagctggaggagagagatggccatgctgtgtccattgaggagtacctgcagaggagtgacacagccatcatctacccagaggcccctgaggagctgagccggctgggcaccccagaggccaacggccaggaggagaatgacctgcccccaggcaccccagatgcctttgcccagctgctgacctgcccctactgtgaccggggctacaagaggctgaccagcctgaaggagcacatcaagtacagacatgagaagaatgaggagaacttcagctgccccctgtgcagctacacctttgcctaccgcacccagctggagcggcacatggtgacccacaagccaggcacagaccagcaccagatgctgacccagggcgccggcaacaggaagttcaagtgcacagaatgtgggaaggccttcaagtacaagcaccacctgaaggagcacctgcgcatccacagcggggagaagccctatgaatgtcccaactgcaagaagcgcttcagccacagcggcagctacagcagccacatcagcagcaagaagtgcatcggcctcatctctgtgaatggaaggatgaggaacaacatcaagacaggcagcagccccaacagcgtgagcagcagccccaccaacagcgccatcacccagctgaggaacaagctggagaatggcaagcccctgtccatgtctgagcagacaggcctgctgaagatcaagacagagcccctggacttcaatgactacaaggtgctgatggccacccacggcttcagcggcaccagccccttcatgaatggaggcctgggcgccaccagccccctgggcgtgcaccccagcgcccagagccccatgcagcacctgggcgtgggcatggaggcccccctgctgggcttccccaccatgaacagcaacctgtctgaggtgcagaaggtgctgcagatcgtggacaacacagtgtcccggcagaagatggactgcaaggccgaggagatcagcaagctgaagggctaccacatgaaggacccctgcagccagcctgaggagcagggcgtgaccagccccaacatcccccctgtgggcctgcctgtggtgagccacaatggagccaccaagagcatcatcgactacaccctggagaaggtgaatgaggccaaggcctgcctgcagagcctgaccacagacagccggcggcagatcagcaacatcaagaaggagaagctgcggaccctgattgacctggtgacagatgacaagatgattgagaaccacaacatcagcacccccttcagctgccagttctgcaaggagagcttccctggccccatccccctgcaccagcacgagcgctacctgtgcaagatgaatgaggagatcaaggctgtgctgcagccccatgagaacatcgtgcccaacaaggccggcgtgtttgtggacaacaaggccctgctgctgagctctgtgctgtctgagaagggcatgaccagccccatcaacccctacaaggaccacatgtctgtgctgaaggcctactatgccatgaacatggagcccaacagtgatgagctgctgaagatcagcattgctgtgggcctgccccaggagtttgtgaaggagtggtttgagcagaggaaggtgtaccagtacagcaacagccgcagccccagcctggagaggagcagcaagcccctggcccccaacagcaacccccccaccaaggacagcctgctgcccaggagccctgtgaagcccatggacagcatcaccagccccagcattgctgagctgcacaacagcgtgaccaactgtgacccccccctgcggctgaccaagcccagccacttcaccaacatcaagcctgtggagaagctggaccacagccgcagcaacacccccagccccctgaacctgagcagcaccagcagcaagaacagccacagcagcagctacacccccaacagcttcagcagcgaggagctgcaggccgagcccctggacctgagcctgcccaagcagatgaaggagcccaagagcatcatcgccaccaagaacaagaccaaggccagcagcatcagcctggaccacaacagcgtgagcagcagcagcgagaacagtgatgagcccctgaacctgaccttcatcaagaaggagttcagcaacagcaacaacctggacaacaagagcaccaaccctgtgttctccatgaaccccttcagcgccaagcccctgtacacagccctgcccccccagagcgccttccccccagccaccttcatgcctcctgtgcagaccagcatccctggcctgcggccctacccaggcctggaccagatgtccttcctgccccacatggcctacacctaccccactggagctgccacctttgctgacatgcagcagaggaggaagtaccagaggaagcagggcttccagggcgagctgctggatggagcccaggactacatgagcggcctggatgacatgacagacagcgacagctgcctgagcaggaagaagatcaagaagacagagagcggcatgtatgcctgtgacctgtgtgacaagaccttccagaagagcagcagcctgctgcggcacaagtatgagcacacaggcaagaggccccaccagtgccagatctgcaagaaggccttcaagcacaagcaccacctgattgagcacagccggctgcacagcggggagaagccctaccagtgtgacaagtgtgggaagcgcttcagccacagcggcagctacagccagcacatgaaccaccgctacagctactgcaagcgggaggccgaggagcgggaggccgctgagcgggaggcccgggagaagggccacctggagcccacagagctgctgatgaacagagcctacctgcagagcatcaccccccagggctacagcgacagcgaggagcgggagagcatgcccagagatggagagagcgagaaggagcacgagaaggagggagaagatggctacggcaagctgggccggcaggatggagatgaggagtttgaggaggaggaggaggagagcgagaacaagtccatggacacagatcctgagaccatcagagatgaggaggagactggagaccacagcatggatgacagcagtgaagatggcaagatggagaccaagagtgaccacgaggaggacaacatggaggatggcatgtag

SEQ ID NO: 22649 - DNA, 3645 bp, synthetic construct; identical to SEQ ID NO: 22640
  misc_feature 1..3645: note = Description of Artificial Sequence: Synthetic coding sequence
  source 1..3645: mol_type = other DNA

SEQ ID NO: 22650 - DNA, 1893 bp, synthetic construct
  misc_feature 1..1893: note = Description of Artificial Sequence: Synthetic coding sequence
  source 1..1893: mol_type = other DNA
atgagcatcagcgccctgggcggccgcaccaagggcaagcccctgcccccaggagaggaggagaggaacaacgtgctgaagcagatgaaggtgaggaccaccctgaagggggacaagtcctggatcaccaagcaggatgagagcgagggccgcaccatcgagctgcccagcggccgcagccgggccaccagcttcagcagcgctggggaggtgcccaagccccggccccccagcacccgggcccccaccggctacatcatccggggcgtcttcaccaagcccatcgacagcagcagccagccccagcagcagttccccaaggccaacggcacccccaagtctgctgccagcctggtgaggacagccaatgccggccccccccggcccagcagcagcggctacaagatgaccacagaggactacaagaagctggccccctacaacatccgccgcagcagcaccagcggggacacagaggaggaggaggaggaggaggtggtgcccttcagcagtgatgagcagaagagaagaagtgaggccgccagcggcgtgctgcggaggacagccccccgggagcacagctatgtgctgtctgctgccaagaagagcacaggccccacccaggagacccaggcccccttcatcgccaagagggtggaggtggtggaggaggatggccccagcgagaagagccaggaccccccagccctggcccggagcaccccaggcagcaacagaagcagccctggcaacaaggacaaggaggccccctgcagccgggagctgcagagggacctggccggggaggaggccttccgggcccccaacacagatgctgcccggagcagcgcccagctgagtgatggaaatgtgggcagcggggccaccggcagcaggcctgagggcctggccgctgtggacatcggcagcgagcggggcagcagcagcgccacctctgtgtctgctgtgcctgctgacaggaagagcaacagcacagctgcccaggaggatgccaaggctgaccccaagggggccctggccgactatgagggcaaggatgtggccaccagggtgggggaggcctggcaggagaggcctggggccccccggggcggccagggcgaccctgctgtgcctgcccagcagcctgctgaccccagcaccccagagcggcagagcagccccagcggcagcgagcagctggtgagaagagagagctgtggcagctctgtgctgacagactttgagggcaaggatgtggccaccaaggtgggggaggcctggcaggacaggcctggggccccccggggcggccagggcgaccctgctgtgcccacccagcagcctgctgaccccagcaccccagagcagcagaacagccccagcggcagcgagcagtttgtgagaagagagagctgcaccagccgggtgcgcagccccagcagctgcatggtgacagtgacagtgacagccaccagcgagcagccccacatctacatcccagccccagccagcgagctggacagcagcagcaccaccaagggcatcctgtttgtgaaggagtatgtgaatgccagcgaggtgagcagcggcaagcctgtgtctgcccgctacagcaatgtgagcagcattgaagattcttttgccatggagaagaagccaccctgtggcagcaccccctacagcgagaggaccaccggcggcatctgcacctactgcaaccgggagatccgggactgccccaagatcaccctggagcacctgggcatctgctgccacgagtactgcttcaagtgtggcatctgcagcaagcccatgggagacctgctggaccagatcttcatccaccgggacaccatccactgtgggaagtgctatgagaagctgttctag

SEQ ID NO: 22651 - DNA, 1407 bp, synthetic construct
  misc_feature 1..1407: note = Description of Artificial Sequence: Synthetic coding sequence
  source 1..1407: mol_type = other DNA
atgaccacagaggactacaagaagctggccccctacaacatcagaagaagcagcaccagcggggacacagaggaggaggaggaggaggaggtggtgcccttcagcagtgatgagcagaagaggagcagccccacccaggagacccaggcccccttcatcgccaagagggtggaggtggtggaggaggatggccccagcgagaagagccaggaccccccagccctggcccggagcaccccaggcagcaacagaagcagccctggcaacaaggacaaggaggccccctgcagccgggagctgcagagggacctggccggggaggaggccttccgggcccccaacacagatgctgcccggagcagcgcccagctgagtgatggaaatgtgggcagcggggccaccggcagcaggcctgagggcctggccgctgtggacatcggcagcgagcggggcagcagcagcgccacctctgtgtctgctgtgcctgctgacaggaagagcaacagcacagctgcccaggaggatgccaaggctgaccccaagggggccctggccgactatgagggcaaggatgtggccaccagggtgggggaggcctggcaggagaggcctggggccccccggggcggccagggcgaccctgctgtgcctgcccagcagcctgctgaccccagcaccccagagcggcagagcagccccagcggcagcgagcagctggtgagaagagagagctgtggcagctctgtgctgacagactttgagggcaaggatgtggccaccaaggtgggggaggcctggcaggacaggcctggggccccccggggcggccagggcgaccctgctgtgcccacccagcagcctgctgaccccagcaccccagagcagcagaacagccccagcggcagcgagcagtttgtgagaagagagagctgcaccagccgggtgcgcagccccagcagctgcatggtgacagtgacagtgacagccaccagcgagcagccccacatctacatcccagccccagccagcgagctggacagcagcagcaccaccaagggcatcctgtttgtgaaggagtatgtgaatgccagcgaggtgagcagcggcaagcctgtgtctgcccgctacagcaatgtgagcagcattgaagattcttttgccatggagaagaagccaccctgtggcagcaccccctacagcgagaggaccaccggcggcatctgcacctactgcaaccgggagatccgggactgccccaagatcaccctggagcacctgggcatctgctgccacgagtactgcttcaagtgtggcatctgcagcaagcccatgggagacctgctggaccagatcttcatccaccgggacaccatccactgtgggaagtgctatgagaagctgttctag

SEQ ID NO: 22652 - DNA, 1374 bp, synthetic construct
  misc_feature 1..1374: note = Description of Artificial Sequence: Synthetic coding sequence
  source 1..1374: mol_type = other DNA
atgaccacagaggactacaagaagctggccccctacaacatcagaagaagcagcaccagcggggacacagaggaggaggaggaggaggaggtggtgcccttcagcagtgatgagcagaagagaagaagtgaagctgccagcggcgtgctgcggaggacagccccccgggagcacagctatgtgctgtctgctgccaagaagagcacaggcagccccacccaggagacccaggcccccttcatcgccaagagggtggaggtggtggaggaggatggccccagcgagaagagccaggaccccccagccctggcccggagcaccccaggcagcaacagcagcagaggagaggagatcgtgcggctgcagatcctgaccccccgggccggcctgcggctggtggccccagatgtggagggcatgagcagcagcgccacctctgtgtctgctgtgcctgctgacaggaagagcaacagcacagctgcccaggaggatgccaaggctgaccccaagggggccctggccgactatgagggcaaggatgtggccaccagggtgggggaggcctggcaggagaggcctggggccccccggggcggccagggcgaccctgctgtgcctgcccagcagcctgctgaccccagcaccccagagcggcagagcagccccagcggcagcgagcagctggtgcggcgggagagctgtggcagctctgtgctgacagactttgagggcaaggatgtggccaccaaggtgggggaggcctggcaggacaggcctggggccccccggggcggccagggcgaccctgctgtgcccacccagcagcctgctgaccccagcaccccagagcagcagaacagccccagcggcagcgagcagtttgtgcggcgggagagctgcaccagccgggtgcgcagccccagcagctgcatggtgacagtgacagtgacagccaccagcgagcagccccacatctacatcccagccccagccagcgagctggacagcagcagcaccaccaagggcatcctgtttgtgaaggagtatgtgaatgccagcgaggtgtcctctgggaagcctgtgtctgcccgctacagcaatgtgagcagcattgaggacagctttgccatggagaagaagccaccctgtggcagcaccccctacagcgagaggaccactggaggcatctgcacctactgcaaccgggagatccgggactgccccaagatcaccctggagcacctgggcatctgctgccacgagtactgcttcaagtgtggcatctgcagcaagcccatgggagacctgctggaccagatcttcatccaccgggacaccatccactgtgggaaatgttatgagaagctgttctag

SEQ ID NO: 22653 - DNA, 2070 bp, synthetic construct
  misc_feature 1..2070: note = Description of Artificial Sequence: Synthetic coding sequence
  source 1..2070: mol_type = other DNA
atgagcatcagcgccctgggcggccgcaccaagggcaagcccctgcccccaggagaggaggagaggaacaacgtgctgaagcagatgaaggtgaggaccaccctgaagggggacaagtcctggatcaccaagcaggatgagagcgagggccgcaccatcgagctgcccagcggccgcagccgggccaccagcttcagcagcgctggggaggtgcccaagccccggccccccagcacccgggcccccaccggctacatcatccggggcgtcttcaccaagcccatcgacagcagcagccagccccagcagcagttccccaaggccaacggcacccccaagtctgctgccagcctggtgaggacagccaatgccggccccccccggcccagcagcagcggctacaagatgaccacagaggactacaagaagctggccccctacaacatccgccgcagcagcaccagcggggacacagaggaggaggaggaggaggaggtggtgcccttcagcagtgatgagcagaagagaagaagtgaggccgccagcggcgtgctgcggaggacagccccccgggagcacagctatgtgctgtctgctgccaagaagagcacaggccccacccaggagacccaggcccccttcatcgccaagagggtggaggtggtggaggaggatggccccagcgagaagagccaggaccccccagccctggcccggagcaccccaggcagcaacagcgcagatggcggccgcaccaaggccagccgggccatctggattgaatgtctgcccagcatgcccagccctgctggcagccaggagctgagcagcagaggagaggagatcgtgcggctgcagatcctgaccccccgggccggcctgcggctggtggccccagatgtggagggcatgaggagcagccctggcaacaaggacaaggaggccccctgcagccgggagctgcagagggacctggccggggaggaggccttccgggcccccaacacagatgctgcccggagcagcgcccagctgagtgatggaaatgtgggcagcggggccaccggcagcaggcctgagggcctggccgctgtggacatcggcagcgagcggggcagcagcagcgccacctctgtgtctgctgtgcctgctgacaggaagagcaacagcacagctgcccaggaggatgccaaggctgaccccaagggggccctggccgactatgagggcaaggatgtggccaccagggtgggggaggcctggcaggagaggcctggggccccccggggcggccagggcgaccctgctgtgcctgcccagcagcctgctgaccccagcaccccagagcggcagagcagccccagcggcagcgagcagctggtgcggcgggagagctgtggcagctctgtgctgacagactttgagggcaaggatgtggccaccaaggtgggggaggcctggcaggacaggcctggggccccccggggcggccagggcgaccctgctgtgcccacccagcagcctgctgaccccagcaccccagagcagcagaacagccccagcggcagcgagcagtttgtgcggcgggagagctgcaccagccgggtgcgcagccccagcagctgcatggtgacagtgacagtgacagccaccagcgagcagccccacatctacatcccagccccagccagcgagctggacagcagcagcaccaccaagggcatcctgtttgtgaaggagtatgtgaatgccagcgaggtgtcctctgggaagcctgtgtctgcccgctacagcaatgtgagcagcattgaggacagctttgccatggagaagaagccaccctgtggcagcaccccctacagcgagaggaccactggaggcatctgcacctactgcaaccgggagatccgggactgccccaagatcaccctggagcacctgggcatctgctgccacgagtactgcttcaagtgtggcatctgcagcaagcccatgggagacctgctggaccagatcttcatccaccgggacaccatccactgtgggaaatgttatgagaagctgttctag

SEQ ID NO: 22654 - DNA, 1359 bp, synthetic construct
  misc_feature 1..1359: note = Description of Artificial Sequence: Synthetic coding sequence
  source 1..1359: mol_type = other DNA
atgcagaggcaggccccctacaacatccgccgcagcagcaccagcggggacacagaggaggaggaggaggaggaggtggtgcccttcagcagtgatgagcagaagagaagaagtgaggccgccagcggcgtgctgcggaggacagccccccgggagcacagctatgtgctgtctgctgccaagaagagcacaggcagccccacccaggagacccaggcccccttcatcgccaagagggtggaggtggtggaggaggatggccccagcgagaagagccaggaccccccagccctggcccggagcaccccaggcagcaacagcagcagaggagaggagatcgtgcggctgcagatcctgacccccagggctggcctgcggctggtggccccagatgtggagggcatgagcagcagcgccacctctgtgtctgctgtgcctgctgacaggaagagcaacagcacagctgcccaggaggatgccaaggctgaccccaagggggccctggccgactatgagggcaaggatgtggccaccagggtgggggaggcctggcaggagaggcctggggccccccggggcggccagggcgaccctgctgtgcctgcccagcagcctgctgaccccagcaccccagagcggcagagcagccccagcggcagcgagcagctggtgagaagagagagctgtggcagctctgtgctgacagactttgagggcaaggatgtggccaccaaggtgggggaggcctggcaggacaggcctggggccccccggggcggccagggcgaccctgctgtgcccacccagcagcctgctgaccccagcaccccagagcagcagaacagccccagcggcagcgagcagtttgtgagaagagagagctgcaccagccgggtgcgcagccccagcagctgcatggtgacagtgacagtgacagccaccagcgagcagccccacatctacatcccagccccagccagcgagctggacagcagcagcaccaccaagggcatcctgtttgtgaaggagtatgtgaatgccagcgaggtgagcagcggcaagcctgtgtctgcccgctacagcaatgtgagcagcattgaagattcttttgccatggagaagaagccaccctgtggcagcaccccctacagcgagaggaccaccggcggcatctgcacctactgcaaccgggagatccgggactgccccaagatcaccctggagcacctgggcatctgctgccacgagtactgcttcaagtgtggcatctgcagcaagcccatgggagacctgctggaccagatcttcatccaccgggacaccatccactgtgggaagtgctatgagaagctgttctag

SEQ ID NO: 22655 - DNA, 1428 bp, synthetic construct
  misc_feature 1..1428: note = Description of Artificial Sequence: Synthetic coding sequence
  source 1..1428: mol_type = other DNA
tgaagaagcagcaccagcggggacacagaggaggaggaggaggaggaggtggtgcccttcagcagtgatgagcagaagaggagcctgcggaggacagccccccgggagcacagctatgtgctgtctgctgccaagaagagcacaggcagccccacccaggagacccaggcccccttcatcgccaagagggtggaggtggtggaggaggatggccccagcgagaagagccaggaccccccagccctggcccggagcaccccaggcagcaacagaagcagccctggcaacaaggacaaggaggccccctgcagccgggagctgcagagggacctggccggggaggaggccttccgggcccccaacacagatgctgcccggagcagcgcccagctgagtgatggaaatgtgggcagcggggccaccggcagcaggcctgagggcctggccgctgtggacatcggcagcgagcggggcagcagcagcgccacctctgtgtctgctgtgcctgctgacaggaagagcaacagcacagctgcccaggaggatgccaaggctgaccccaagggggccctggccgactatgagggcaaggatgtggccaccagggtgggggaggcctggcaggagaggcctggggccccccggggcggccagggcgaccctgctgtgcctgcccagcagcctgctgaccccagcaccccagagcggcagagcagccccagcggcagcgagcagctggtgcggcgggagagctgtggcagctctgtgctgacagactttgagggcaaggatgtggccaccaaggtgggggaggcctggcaggacaggcctggggccccccggggcggccagggcgaccctgctgtgcccacccagcagcctgctgaccccagcaccccagagcagcagaacagccccagcggcagcgagcagtttgtgcggcgggagagctgcaccagccgggtgcgcagccccagcagctgcatggtgacagtgacagtgacagccaccagcgagcagccccacatctacatcccagccccagccagcgagctggacagcagcagcaccaccaagggcatcctgtttgtgaaggagtatgtgaatgccagcgaggtgtcctctgggaagcctgtgtctgcccgctacagcaatgtgagcagcattgaggacagctttgccatggagaagaagccaccctgtggcagcaccccctacagcgagaggaccactggaggcatctgcacctactgcaaccgggagatccgggactgccccaagatcaccctggagcacctgggcatctgctgccacgagtactgcttcaagtgtggcatctgcagcaagcccatgggagacctgctggaccagatcttcatccaccgggacaccatccactgtgggaaatgttatgagaagctgttctag

SEQ ID NO: 22656 - DNA, 1146 bp, synthetic construct
  misc_feature 1..1146: note = Description of Artificial Sequence: Synthetic coding sequence
  source 1..1146: mol_type = other DNA
atgaccacagaggactacaagaagctggccccctacaacatcagaagaagcagcaccagcggggacacagaggaggaggaggaggaggaggtggtgcccttcagcagtgatgagcagaagagaagaagtgaagctgccagcggcgtgctgcggaggacagccccccgggagcacagctatgtgctgtctgctgccaagaagagcacaggcagccccacccaggagacccaggcccccttcatcgccaagagggtggaggtggtggaggaggatggccccagcgagaagagccaggaccccccagccctggcccggagcaccccaggcagcaacagcgcagatggcggccgcaccaaggccagccgggccatctggattgaatgtctgcccagcatgcccagccctgctggcagccaggagctgagcagcagaggagaggagatcgtgcggctgcagatcctgaccccccgggccggcctgcggctggtggccccagatgtggagggcatgaggagcagccctggcaacaaggacaaggaggccccctgcagccgggagctgcagagggacctggccggggaggaggccttccgggcccccaacacagatgctgcccggagcagcgcccagctgagtgatggaaatgtgggcagcggggccaccggcagcaggcctgagggcctggccgctgtggacatcggcagcgagcggggcagcagcagcgccacctctgtgtctgctgtgcctgctgacaggaagagcaacagcacagctgcccaggaggatgccaaggctgaccccaagggggccctggccgactatgagggcaaggatgtggccaccagggtgggggaggcctggcaggagaggcctggggccccccggggcggccagggcgaccctgctgtgcctgcccagcagcctgctgaccccagcaccccagagcggcagagcagccccagcggcagcgagcagctggtgcggcgggagagctgtggcagctctgtgctgacagactttgagggcaaggatgtggccaccaaggtgggggaggcctggcaggacaggcctggccccagctgcacccacagcgccacctgccgcagccagtaccccaggacagctgagcagccccagaggatctag

SEQ ID NO: 22657 - DNA, 636 bp, synthetic construct
  misc_feature 1..636: note = Description of Artificial Sequence: Synthetic coding sequence
  source 1..636: mol_type = other DNA
gaggaggccttccgggcccccaacacagatgctgcccggagcagcgcccagctgagtgatggaaatgtgggcagcggggccaccggcagcaggcctgagggcctggccgctgtggacatcggcagcgagcggggccgcctgtgtgccgccgccagctttgccagcttcctggaggaccaggacggccacagcgccaacagccagagctgcaagcccaggcctgctgccatcagcagcagcgccacctctgtgtctgctgtgcctgctgacaggaagagcaacagcacagctgcccaggaggatgccaaggctgaccccaagggggccctggccgactatgagggcaaggatgtggccaccagggtgggggaggcctggcaggagaggcctggggccccccggggcggccagggcgaccctgctgtgcctgcccagcagcctgctgaccccagcaccccagagcggcagagcagccccagcggcagcgagcagctggtgagaagagagagctgtggcagctctgtgctgacagactttgagggcaaggatgtggccaccaaggtgggggaggcctggcaggacaggcctggggccccccggggcggccagggcgaccctgctgtgcccacccagtag

SEQ ID NO: 22658 - DNA, 666 bp, synthetic construct
  misc_feature 1..666: note = Description of Artificial Sequence: Synthetic coding sequence
  source 1..666: mol_type = other DNA
tgactgcggaggacagccccccgggagcacagctatgtgctgtctgctgccaagaagagcacaggcagccccacccaggagacccaggcccccttcatcgccaagagggtggaggtggtggaggaggatggccccagcgagaagagccaggaccccccagccctggcccggagcaccccaggcagcaacagcgcagatggcggccgcaccaaggccagccgggccatctggattgaatgtctgcccagcatgcccagccctgctggcagccaggagctgagcagcagaggagaggagatcgtgcggctgcagatcctgaccccccgggccggcctgcggctggtggccccagatgtggagggcatgaggagcagccctggcaacaaggacaaggaggccccctgcagccgggagctgcagagggacctggccggggaggaggccttccgggcccccaacacagatgctgcccggagcagcgcccagctgagtgatggaaatgtgggcagcggggccaccggcagcaggcctgagggcctggccgctgtggacatcggcagcgagcggggcagcagcagcgccacctctgtgtctgctgtgcctgctgacaggaagagcaacagcacagctgcccaggaggatgccaaggctgaccccaagggctag

SEQ ID NO: 22659 - DNA, 414 bp, synthetic construct
  misc_feature 1..414: note = Description of Artificial Sequence: Synthetic coding sequence
  source 1..414: mol_type = other DNA
tgagtgctgcccaggaggcaccgccaccggctgagcagaagaggctggcgctggtggaagaggacaggcctgctgcggcgggcccggacccacctgctgtggcaggaccccctgctggcccagacagtgaggatggaggccggccccaagaggctgggccagtttggcagcagcgcctgccaggtgtgcctggcccccctgggcgcccggagcagcggcctgccccaggccaccaagacccggcggcccccagcccctgagagcagccggggcacctggctggtgcggcggctgagcggcccccccacccagatgctgcaggcccctgtgcccctgcagagcctgctgagcctgctgattggccgggccacagcccagcagcccaggaggatgcagaggcagacccagaggtag

SEQ ID NO: 22660 - DNA, 2073 bp, synthetic construct
  misc_feature 1..2073: note = Description of Artificial Sequence: Synthetic coding sequence
  source 1..2073: mol_type = other DNA
atgagcatcagcgccctgggcggccgcaccaagggcaagcccctgcccccaggagaggaggagaggaacaacgtgctgaagcagatgaaggtgaggaccaccctgaagggggacaagtcctggatcaccaagcaggatgagagcgagggccgcaccatcgagctgcccagcggccgcagccgggccaccagcttcagcagcgctggggaggtgcccaagccccggccccccagcacccgggcccccaccggctacatcatccggggcgtcttcaccaagcccatcgacagcagcagccagccccagcagcagttccccaaggccaacggcacccccaagtctgctgccagcctggtgaggacagccaatgccggccccccccggcccagcagcagcggctacaagatgaccacagaggactacaagaagctggccccctacaacatccgccgcagcagcaccagcggggacacagaggaggaggaggaggaggaggtggtgcccttcagcagtgatgagcagaagagaagaagtgaggccgccagcggcgtgctgcggaggacagccccccgggagcacagctatgtgctgtctgctgccaagaagagcacaggcagccccacccaggagacccaggcccccttcatcgccaagagggtggaggtggtggaggaggatggccccagcgagaagagccaggaccccccagccctggcccggagcaccccaggcagcaacagcgcagatggcggccgcaccaaggccagccgggccatctggattgagtgcctgcccagcatgcccagccctgctggcagccaggagctgagcagcagaggagaggagatcgtgcggctgcagatcctgacccccagggctggcctgcggctggtggccccagatgtggagggcatgaggagcagccctggcaacaaggacaaggaggccccctgcagccgggagctgcagagggacctggccggggaggaggccttccgggcccccaacacagatgctgcccggagcagcgcccagctgagtgatggaaatgtgggcagcggggccaccggcagcaggcctgagggcctggccgctgtggacatcggcagcgagcggggcagcagcagcgccacctctgtgtctgctgtgcctgctgacaggaagagcaacagcacagctgcccaggaggatgccaaggctgaccccaagggggccctggccgactatgagggcaaggatgtggccaccagggtgggggaggcctggcaggagaggcctggggccccccggggcggccagggcgaccctgctgtgcctgcccagcagcctgctgaccccagcaccccagagcggcagagcagccccagcggcagcgagcagctggtgagaagagagagctgtggcagctctgtgctgacagactttgagggcaaggatgtggccaccaaggtgggggaggcctggcaggacaggcctggggccccccggggcggccagggcgaccctgctgtgcccacccagcagcctgctgaccccagcaccccagagcagcagaacagccccagcggcagcgagcagtttgtgagaagagagagctgcaccagccgggtgcgcagccccagcagctgcatggtgacagtgacagtgacagccaccagcgagcagccccacatctacatcccagccccagccagcgagctggacagcagcagcaccaccaagggcatcctgtttgtgaaggagtatgtgaatgccagcgaggtgagcagcggcaagcctgtgtctgcccgctacagcaatgtgagcagcattgaagattcttttgccatggagaagaagccaccctgtggcagcaccccctacagcgagaggaccaccggcggcatctgcacctactgcaaccgggagatccgggactgccccaagatcaccctggagcacctgggcatctgctgccacgagtactgcttcaagtgtggcatctgcagcaagcccatgggagacctgctggaccagatcttcatccaccgggacaccatccactgtgggaagtgctatgagaagctgttctag

SEQ ID NO: 22661 - DNA, 993 bp, synthetic construct
  misc_feature 1..993: note = Description of Artificial Sequence: Synthetic coding sequence
  source 1..993: mol_type = other DNA
tgaagtgagatggccgccagagatgagctgggcctgggcggggacagcctggaggccatgcctgtgcctgctgcccggggccggccccgcatcaccaatggacctgaggagctggccgcccccagccctgctgccctggccgactatgagggcaaggatgtggccaccagggtgggggaggcctggcaggagaggcctggggccccccggggcggccagggcgaccctgctgtgcctgcccagcagcctgctgaccccagcaccccagagcggcagagcagccccagcggcagcgagcagctggtgagaagagagagctgtggcagctctgtgctgacagactttgagggcaaggatgtggccaccaaggtgggggaggcctggcaggacaggcctggggccccccggggcggccagggcgaccctgctgtgcccacccagcagcctgctgaccccagcaccccagagcagcagaacagccccagcggcagcgagcagtttgtgagaagagagagctgcaccagccgggtgcgcagccccagcagctgcatggtgacagtgacagtgacagccaccagcgagcagccccacatctacatcccagccccagccagcgagctggacagcagcagcaccaccaagggcatcctgtttgtgaaggagtatgtgaatgccagcgaggtgagcagcggcaagcctgtgtctgcccgctacagcaatgtgagcagcattgaagattcttttgccatggagaagaagccaccctgtggcagcaccccctacagcgagaggaccaccggcggcatctgcacctactgcaaccgggagatccgggactgccccaagatcaccctggagcacctgggcatctgctgccacgagtactgcttcaagtgtggcatctgcagcaagcccatgggagacctgctggaccagatcttcatccaccgggacaccatccactgtgggaagtgctatgagaagctgttctag

SEQ ID NO: 22662 - DNA, 1575 bp, synthetic construct
  misc_feature 1..1575: note = Description of Artificial Sequence: Synthetic coding sequence
  source 1..1575: mol_type = other DNA
atgaccacagaggactacaagaagctggccccctacaacatcagaagaagcagcaccagcggggacacagaggaggaggaggaggaggaggtggtgcccttcagcagtgatgagcagaagagaagaagtgaagctgccagcggcgtgctgcggaggacagccccccgggagcacagctatgtgctgtctgctgccaagaagagcacaggccccacccaggagacccaggcccccttcatcgccaagagggtggaggtggtggaggaggatggccccagcgagaagagccaggaccccccagccctggcccggagcaccccaggcagcaacagcagcagaggagaggagatcgtgcggctgcagatcctgacccccagggctggcctgcggctggtggccccagatgtggagggcatgaggagcagccctggcaacaaggacaaggaggccccctgcagccgggagctgcagagggacctggccggggaggaggccttccgggcccccaacacagatgctgcccggagcagcgcccagctgagtgatggaaatgtgggcagcggggccaccggcagcaggcctgagggcctggccgctgtggacatcggcagcgagcggggcagcagcagcgccacctctgtgtctgctgtgcctgctgacaggaagagcaacagcacagctgcccaggaggatgccaaggctgaccccaagggggccctggccgactatgagggcaaggatgtggccaccagggtgggggaggcctggcaggagaggcctggggccccccggggcggccagggcgaccctgctgtgcctgcccagcagcctgctgaccccagcaccccagagcggcagagcagccccagcggcagcgagcagctggtgagaagagagagctgtggcagctctgtgctgacagactttgagggcaaggatgtggccaccaaggtgggggaggcctggcaggacaggcctggggccccccggggcggccagggcgaccctgctgtgcccacccagcagcctgctgaccccagcaccccagagcagcagaacagccccagcggcagcgagcagtttgtgagaagagagagctgcaccagccgggtgcgcagccccagcagctgcatggtgacagtgacagtgacagccaccagcgagcagccccacatctacatcccagccccagccagcgagctggacagcagcagcaccaccaagggcatcctgtttgtgaaggagtatgtgaatgccagcgaggtgagcagcggcaagcctgtgtctgcccgctacagcaatgtgagcagcattgaagattcttttgccatggagaagaagccaccctgtggcagcaccccctacagcgagaggaccaccggcggcatctgcacctactgcaaccgggagatccgggactgccccaagatcaccctggagcacctgggcatctgctgccacgagtactgcttcaagtgtggcatctgcagcaagcccatgggagacctgctggaccagatcttcatccaccgggacaccatccactgtgggaagtgctatgagaagctgttctag

SEQ ID NO: 22663 - DNA, 2166 bp, synthetic construct
  misc_feature 1..2166: note = Description of Artificial Sequence: Synthetic coding sequence
  source 1..2166: mol_type = other DNA
atgagcatcagcgccctgggcggccgcaccaagggcaagcccctgcccccaggagaggaggagaggaacaacgtgctgaagcagatgaaggtgaggaccaccctgaagggggacaagtcctggatcaccaagcaggatgagagcgagggccgcaccatcgagctgcccagcggccgcagccgggccaccagcttcagcagcgctggggaggtgcccaagccccggccccccagcacccgggcccccaccggctacatcatccggggcgtcttcaccaagcccatcgacagcagcagccagccccagcagcagttccccaaggccaacggcacccccaagtctgctgccagcctggtgaggacagccaatgccggccccccccggcccagcagcagcggctacaagatgaccacagaggactacaagaagctggccccctacaacatccgccgcagcagcaccagcggggacacagaggaggaggaggaggaggaggtggtgcccttcagcagtgatgagcagaagagaagaagtgaggccgccagcggcgtgctgcggaggacagccccccgggagcacagctatgtgctgtctgctgccaagaagagcacaggccccacccaggagacccaggcccccttcatcgccaagagggtggaggtggtggaggaggatggccccagcgagaagagccaggaccccccagccctggcccggagcaccccaggcagcaacagcgcagatggcggccgcaccaaggccagccgggccatctggattgaatgtctgcccagcatgcccagccctgctggcagccaggagctgagcagcagaggagaggagatcgtgcggctgcagatcctgaccccccgggccggcctgcggctggtggccccagatgtggagggcatgaggagcagccctggcaacaaggacaaggaggccccctgcagccgggagctgcagagggacctggccggggaggaggccttccgggcccccaacacagatgctgcccggagcagcgcccagctgagtgatggaaatgtgggcagcggggccaccggcagcaggcctgagggcctggccgctgtggacatcggcagcgagcggggccgcctgtgtgccgccgccagctttgccagcttcctggaggaccaggacggccacagcgccaacagccagagctgcaagcccaggcctgctgccatcagcagcagcgccacctctgtgtctgctgtgcctgctgacaggaagagcaacagcacagctgcccaggaggatgccaaggctgaccccaagggggccctggccgactatgagggcaaggatgtggccaccagggtgggggaggcctggcaggagaggcctggggccccccggggcggccagggcgaccctgctgtgcctgcccagcagcctgctgaccccagcaccccagagcggcagagcagccccagcggcagcgagcagctggtgcggcgggagagctgtggcagctctgtgctgacagactttgagggcaaggatgtggccaccaaggtgggggaggcctggcaggacaggcctggggccccccggggcggccagggcgaccctgctgtgcccacccagcagcctgctgaccccagcaccccagagcagcagaacagccccagcggcagcgagcagtttgtgcggcgggagagctgcaccagccgggtgcgcagccccagcagctgcatggtgacagtgacagtgacagccaccagcgagcagccccacatctacatcccagccccagccagcgagctggacagcagcagcaccaccaagggcatcctgtttgtgaaggagtatgtgaatgccagcgaggtgtcctctgggaagcctgtgtctgcccgctacagcaatgtgagcagcattgaggacagctttgccatggagaagaagccaccctgtggcagcaccccctacagcgagaggaccactggaggcatctgcacctactgcaaccgggagatccgggactgccccaagatcaccctggagcacctgggcatctgctgccacgagtactgcttcaagtgtggcatctgcagcaagcccatgggagacctgctggaccagatcttcatccaccgggacaccatccactgtgggaaatgttatgagaagctgttctag

SEQ ID NO: 22664 - DNA, 2079 bp, synthetic construct
  misc_feature 1..2079: note = Description of Artificial Sequence: Synthetic coding sequence
  source 1..2079: mol_type = other DNA
atgagcatcagcgccctgggcggccgcaccaagggcaagcccctgcccccaggagaggaggagaggaacaacgtgctgaagcagatgaaggtgaggaccaccctgaagggggacaagtcctggatcaccaagcaggatgagagcgagggccgcaccatcgagctgcccagcggccgcagccgggccaccagcttcagcagcgctggggaggtgcccaagccccggccccccagcacccgggcccccaccggctacatcatccggggcgtcttcaccaagcccatcgacagcagcagccagccccagcagcagttccccaaggccaacggcacccccaagtctgctgccagcctggtgaggacagccaatgccggccccccccggcccagcagcagcggctacaagatgaccacagaggactacaagaagctggccccctacaacatccgccgcagcagcaccagcggggacacagaggaggaggaggaggaggaggtggtgcccttcagcagtgatgagcagaagagaagaagtgaggccgccagcggcgtgctgcggaggacagccccccgggagcacagctatgtgctgtctgctgccaagaagagcacaggccccacccaggagacccaggcccccttcatcgccaagagggtggaggtggtggaggaggatggccccagcgagaagagccaggaccccccagccctggcccggagcaccccaggcagcaacagcgcagatggcggccgcaccaaggccagccgggccatctggattgaatgtctgcccagcatgcccagccctgctggcagccaggagctgcggagcagccctggcaacaaggacaaggaggccccctgcagccgggagctgcagagggacctggccggggaggaggccttccgggcccccaacacagatgctgcccggagcagcgcccagctgagtgatggaaatgtgggcagcggggccaccggcagcaggcctgagggcctggccgctgtggacatcggcagcgagcggggccgcctgtgtgccgccgccagctttgccagcttcctggaggaccaggacggccacagcgccaacagccagagctgcaagcccaggcctgctgccatcagcagcagcgccacctctgtgtctgctgtgcctgctgacaggaagagcaacagcacagctgcccaggaggatgccaaggctgaccccaagggggccctggccgactatgagggcaaggatgtggccaccagggtgggggaggcctggcaggagaggcctggggccccccggggcggccagggcgaccctgctgtgcctgcccagcagcctgctgaccccagcaccccagagcggcagagcagccccagcggcagcgagcagctggtgagaagagagagctgtggcagctctgtgctgacagactttgagggcaaggatgtggccaccaaggtgggggaggcctggcaggacaggcctggggccccccggggcggccagggcgaccctgctgtgcccacccagcagcctgctgaccccagcaccccagagcagcagaacagccccagcggcagcgagcagtttgtgagaagagagagctgcaccagccgggtgcgcagccccagcagctgcatggtgacagtgacagtgacagccaccagcgagcagccccacatctacatcccagccccagccagcgagctggacagcagcagcaccaccaagggcatcctgtttgtgaaggagtatgtgaatgccagcgaggtgagcagcggcaagcctgtgtctgcccgctacagcaatgtgagcagcattgaagattcttttgccatggagaagaagccaccctgtggcagcaccccctacagcgagaggaccaccggcggcatctgcacctactgcaaccgggagatccgggactgccccaagatcaccctggagcacctgggcatctgctgccacgagtactgcttcaagtgtggcatctgcagcaagcccatgggagacctgctggaccagatcttcatccaccgggacaccatccactgtgggaagtgctatgagaagctgttctag

SEQ ID NO: 22665 - DNA, 1899 bp, synthetic construct
  misc_feature 1..1899: note = Description of Artificial Sequence: Synthetic coding sequence
  source 1..1899: mol_type = other DNA
atgcagcgggaggagggcttcaacaccaagatggctgatggcccagatgaatatgacacagaggccggctgtgtgcccctgctgcaccctgaggagatcaagccccagagccactacaaccacggctatggagagcccctgggcaggaagacccacattgatgactacagcacctgggacatcgtgaaggccacccagtatggcatctatgagcgctgccgggagctggtggaggccggctatgatgtgcggcagcctgacaaggaaaatgtgaccctgctgcactgggccgccatcaacaacagaattgacctggtgaagtactacatcagcaagggggccatcgtggaccagctgggcggggacctgaacagcacccccctgcactgggccacccggcagggccacctgtccatggtggtgcagctgatgaagtacggggctgaccccagcctgattgatggagagggctgcagctgcatccacctggccgcccagtttggccacaccagcatcgtggcctacctgattgccaagggccaggatgtggacatgatggaccagaatggcatgacccccctgatgtgggccgcctaccgcacccacagcgtggaccccacccggctgctgctgaccttcaacgtgtctgtgaacctgggggacaagtaccacaagaacacagccctgcactgggccgtgctggccggcaacaccaccgtcatcagcctgctgctggaggccggggccaacgtggatgcccagaacatcaagggggagagcgccctggacctggccaagcagaggaagaatgtgtggatgatcaaccacctgcaggaggcccggcaggccaagggctatgacaaccccagcttcctgaggaagctgaaggctgacaaggagttccggcagaaggtgatgctgggcacccccttcctggtgatctggctggtgggcttcatcgctgacctgaacatcgacagctggctgatcaagggcctgatgtatggaggagtgtgggccaccgtgcagttcctgagcaagagcttctttgaccacagcatgcacagcgccctgcccctgggcatctacctggccaccaagttctggatgtatgtgacctggttcttctggttctggaatgacctgaacttcctgttcatccacctgcccttcctggccaacagcgtggccctcttctacaactttgggaagtcctggaagagtgaccccggcatcatcaaggccacagaggagcagaagaagaagaccatcgtggagctggccgagaccggcagcctggacctgagcatcttctgcagcacctgcctgatcaggaagcctgtgcgcagcaagcactgcggcgtgtgcaaccgctgcatcgccaagtttgaccaccactgcccctgggtgggcaactgtgtgggcgccggcaaccaccgctacttcatgggctacctgttcttcctgctcttcatgatctgctggatgatctacggctgcatctcctactggggcctgcactgtgagaccacctacaccaaggatggcttctggacctacatcacccagatcgccacctgcagcccctggatgttctggatgttcctgaacagcgtcttccacttcatgtgggtggccgtgctgctgatgtgccagatgtaccagatcagctgcctgggcatcaccaccaatgaaagaatgaatgcccggcgctacaagcacttcaaggtgaccaccaccagcattgagagccccttcaaccacggctgtgtgaggaacatcatcgacttctttgagttccgctgctgcggcctcttccggcctgtgattgtggactggacccggcagtacaccattgaatatgaccagatcagcggcagcggctaccagctggtgtag

SEQ ID NO: 22666 - DNA, 651 bp, synthetic construct
  misc_feature 1..651: note = Description of Artificial Sequence: Synthetic coding sequence
  source 1..651: mol_type = other DNA
atgagcaccatccccaagagagctgtgtgccccttcagcacccagagatatggcatctatgagcgctgccgggagctggtggaggccggctatgatgtgcggcagcctgacaaggaaaatgtgaccctgctgcactgggccgccatcaacaacagaattgacctggtgaagtactacatcagcaagggggccatcgtggaccagctgggcggggacctgaacagcacccccctgcactgggccacccggcagggccacctgtccatggtggtgcagctgatgaagtacggggctgaccccagcctgattgatggagagggctgcagctgcatccacctggccgcccagtttggccacaccagcatcgtggcctacctgattgccaagggccaggatgtggacatgatggaccagaatggcatgacccccctgatgtgggccgcctaccgcacccacagcgtggaccccacccggctgctgctgaccttcaacgtgtctgtgaacctgggggacaagtaccacaagaacacagccctgcactgggccgtgctggccggcaacaccaccgtcatcagcctgctgctggaggccggggccaacgtggatgcccagaacatcaaggccatcctgcgctgccacatggccctgtag

SEQ ID NO: 22667 - DNA, 1899 bp, synthetic construct; identical to SEQ ID NO: 22665
  misc_feature 1..1899: note = Description of Artificial Sequence: Synthetic coding sequence
  source 1..1899: mol_type = other DNA

SEQ ID NO: 22668 - DNA, 2667 bp, synthetic construct
  misc_feature 1..2667: note = Description of Artificial Sequence: Synthetic coding sequence
  source 1..2667: mol_type = other DNA
atgctgagccggctgttccggatgcacggcctgttcgtggccagccacccgtgggaagttattgtgggaacagtcacgcttacaatctgtatgatgagcatgaacatgtttaccggcaataataagatctgcgggtggaattacgagtgccccaaatttgaagaggacgtgctgtccagtgatatcattatcctgacgattacaaggtgtatcgctattctatatatttatttccaattccagaacctcagacagcttggcagcaaatatatcctgggaatcgccggcttattcaccatattttcatcattcgtgttttcaactgtagtaatccacttcctagacaaagaactcaccggacttaatgaggccctgcccttcttcctgctgctgatcgacctgtcccgagcaagcactcttgctaaattcgcactttcatccaactcacaggacgaagtacgggaaaacatcgcgagaggcatggccatcctggggcctacatttactctggatgccctggtggagtgcctggtaattggcgtggggacgatgtcgggggttaggcagctggagatcatgtgttgttttgggtgtatgtcagtgctggccaactactttgtgttcatgaccttctttcccgcctgtgtttcattagtcctcgagttatccagagagtcacgcgaaggaaggcccatctggcagctgagtcacttcgctcgggttttggaagaggaagagaacaaacctaaccctgtcacacagcgtgtgaagatgatcatgagccttggcttggtactggtccacgcccactctcgatggatcgccgacccaagtccacagaacagcacagccgacacttccaaggtgtcattgggactagacgaaaatgtcagtaaacgtatagaaccatctgtctctctctggcagttttacctcagtaagatgatttcaatggatattgagcaagtgattacccttagcctcgcgttgctgctcgcggtgaagtacatcttttttgagcagacagagactgagtccacccttagcctgaaaaaccctattactagtcctgtggtgacccagaaaaaggtgccagacaattgctgtcgcagagaacccatgctcgtgcgaaacaaccagaagtgcgacagtgtggaagaagagaccgggatcaaccgtgagagaaaggttgaggtgattaaaccacttgtggccgaaaccgacactccgaatcgagctactttcgtggtgggcaactcctcattactggatacctcttccgtcctagtgacacaggaacccgagatcgagctccccagggaacctcgcccaaatgaagaatgccttcagatccttgggaatgcggagaaaggtgctaagtttctgtcagacgctgaaataatccagcttgtgaatgccaagcacatccccgcatacaagctagaaacgctgatggagacccatgaaagaggagtgtccatccgcagacaactgctcagtaaaaagctctctgaaccctcatccctgcaatatcttccctacagggactataattactccttggtcatgggcgcttgctgtgagaatgtgattggctacatgcctatccccgtgggagttgccggtccattgtgccttgacgagaaggaattccaagtgcccatggccaccactgaagggtgccttgttgcttccactaatcgcgggtgtcgcgcaattggtcttgggggcggtgcttcttctcgggtcctcgccgatggtatgacccgcggtccagtcgttcggcttccaagggcttgtgacagcgcggaggtgaaggcatggctggaaacgagtgaagggttcgccgtcataaaagaggccttcgactccaccagccggttcgctagactacagaaactgcacacaagcatcgccggacggaacctttacattaggttccagtcccggtcaggggacgcgatggggatgaacatgatttcaaaaggaacagagaaagctctgtctaagctccacgaatactttccagaaatgcagattctggcagtgagtggcaattactgcaccgataaaaaacccgctgccattaattggattgagggtcgcggaaagtccgtggtgtgcgaggctgtgatccctgccaaggttgtcagagaggtccttaaaaccaccactgaggcaatgatcgaagtgaatatcaacaagaacttggttggaagcgcaatggccggatccatcggtggctacaacgcccacgccgccaacattgtgacggccatctatatcgcctgcggtcaggacgcagcccagaacgtcgggtccagcaattgcattacactgatggaggcaagtgggcccactaatgaagatctctatattagctgtaccatgccatctattgagatcgggaccgttggtggggggacaaacctgcttcctcagcaagcctgcctccagatgctgggggtgcaaggggcctgcaaggacaatccaggggagaacgctaggcagctggcacgtattgtgtgcgggaccgttatggccggagaactgagcctgatggcagcgctagccgcgggccacctagtgaaaagccacatgattcataacagaagcaaaatcaacctgcaagaccttcaaggggcttgtaccaagaaaacggcctag

SEQ ID NO: 22669 - DNA, 2508 bp, synthetic construct
  misc_feature 1..2508: note = Description of Artificial Sequence: Synthetic coding sequence
  source 1..2508: mol_type = other DNA
atgctgagccggctgttccggatgcacggcctgttcgtggccagccacccttgggaggtcatcgtggggaccgtaaccctcacaatttgcatgatgtcaatgaacatgtttaccggcaacaataaaatttgcggctggaattatgaatgtcctaaattcgaagaagacgtcctttcctcagatattatcatcttaactatcacacggtgtatcgccatactgtacatctactttcagtttcagaatttaaggcagctcggatccaaatacatcctcggaattgccggcctctttacaatatttagcagcttcgtgttcagcaccgtggtaattcatttcctggataaggaactaacaggcctgaatgaggccttgcccttctttctgcttttaatagatctaagtcgagccagtaccctggctaaattcgcactgtcatcaaatagtcaggacgaagtgagggagaatattgccagaggtatggctattctggggccaactttcacactcgacgccctggtggaatgcttagtaattggagttggcaccatgagtggtgtaaggcagcttgagatcatgtgttgcttcggttgtatgtctgtcttagcaaattattttgttttcatgacatttttccctgcctgtgtgtcactcgttctcgaactgagcagagagtcacgcgagggcaggcccatctggcagctatcccacttcgccagagtcttggaggaggaagaaaataaaccaaatcccgtgacacaacgcgtaaaaatgataatgagtctcgggctcgtgctggtccacgcccacagtagatggatcgcggatccaagccctcaaaactctaccgccgatacatccaaggtctctctcggcctcgatgagaacgtgagcaagagaatcgaaccatccgtttccctatggcagttctatctgtctaagatgatttcaatggacatcgagcaggtaataactctgagccttgccctcctgctggctgtcaaatacatcttcttcgagcagacggaaactgagtccacacttagcctcaagaaccccatcacctcgccagtcgtgacccagaagaaagtacctgataactgctgcagaagagagccaatgctggtcagaaacaatcaaaaatgtgactccgtggaagaggaaactgggattaaccgggaaagaaaagtcgaggtgatcaaaccgctcgtcgccgaaactgacacccctaatagagcaacttttgtggtcggcaacagttctcttctggatacctctagcgttcttgtcactcaggagcccgagatagaattacccagggagccgcggcctaatgaggaatgcctgcaaatattgggcaatgccgagaaaggggccaaatttcttagtgacgcggaaattattcagttagtgaacgcgaagcatattccagcctataagcttgaaaccctgatggagacccatgagcggggtgtttctattcgccgccagcttctgagcaaaaaattgagcgaacccagcagcctgcagtatcttccttatagagattataactacagcttgttgggcgggggagcgtcaagtagagtactggcggatggcatgacaagaggacccgtcgtcaggcttccccgcgcatgtgattcagcagaggtcaaagcatggctagagacgtccgagggatttgccgtgatcaaggaggcctttgactcaacctcccgctttgctagactccagaaactgcacaccagtatcgccggtcgcaatctgtatataagattccagtctcggtctggggacgctatggggatgaatatgatttctaagggcacagagaaagccctctcgaagttacacgaatacttcccagaaatgcagattctggccgtctccgggaactattgtacagataagaaacccgcagccataaactggatcgaaggccgtggaaagtcagtagtctgcgaggcagtgattccggccaaggtcgtacgtgaagtgttgaagaccactactgaggcaatgattgaagtgaacataaataagaatctggtcggtagcgctatggcgggctcaatcggcgggtataacgcgcatgccgccaacatcgtgactgcaatctacatagcctgcggccaggatgcggcacaaaacgtgggttcatcgaactgcataaccttgatggaagccagcggacccaccaacgaggatctatatatctcatgtaccatgccctccattgagattggcactgtcggaggcgggaccaatctgcttccacagcaagcatgcctgcagatgctcggggtccagggagcatgcaaggataacccaggggagaatgccaggcaactcgctagaatcgtctgtggcacagtaatggcaggcgagttgagtctaatggcggccctcgctgcaggccacctcgtgaaatcccacatgatacacaacagatctaaaatcaatctccaagatctccagggtgcttgtacaaagaaaaccgcctag

SEQ ID NO: 22670 - DNA, 798 bp, synthetic construct
  misc_feature 1..798: note = Description of Artificial Sequence: Synthetic coding sequence
  source 1..798: mol_type = other DNA
atgctgagccggctgttccggatgcacggcctgttcgtggccagccatccgtgggaggtgatcgtcggtaccgtcacactcaccatctgcatgatgagcatgaatatgtttacagagggcaccgagaaagccctgagtaaactccacgaatattttccagagatgcagatcttggctgtgtcaggaaattactgtactgataaaaaacctgcggctattaactggatcgagggccggggtaagtcagttgtctgcgaagcggtgatccccgccaaagtagttcgggaagtactgaaaactacaaccgaggctatgatagaggttaacatcaacaagaacctggtgggatccgcaatggccggcagcattggaggttataacgcacatgccgcaaatatcgtaactgctatttatattgcgtgtggtcaggatgcagcgcaaaacgtgggatcttctaattgcatcacattgatggaagctagcgggccgactaatgaggatctctatatttcctgtacgatgcccagcatcgaaataggtacagtgggaggtggcactaatctgctccctcaacaggcatgtttgcaaatgctgggggtgcagggggcgtgtaaggataaccccggagagaacgctaggcagcttgctaggatagtgtgtgggaccgtgatggccggagaattgagtctgatggccgccctcgcggctgggcacttggtaaagagtcatatgatacacaaccgctcaaagatcaacctgcaagaccttcagggtgcctgcacaaaaaagacagcatag

SEQ ID NO: 22671 - DNA, 57 bp, synthetic construct
  misc_feature 1..57: note = Description of Artificial Sequence: Synthetic coding sequence
  source 1..57: mol_type = other DNA
atgctgagccggctgttccggatgcacggcctgttcgtggccagccacccttggtag

SEQ ID NO: 22672 - DNA, 336 bp, synthetic construct
  misc_feature 1..336: note = Description of Artificial Sequence: Synthetic coding sequence
  source 1..336: mol_type = other DNA
atgctgagccggctgttccggatgcacggcctgttcgtggccagccatccgtgggaagtgatcgtggggacagtaaccctcacaatctgtatgatgtcaatgaatatgttcaccgggaacaataagatatgcggctggaattatgagtgtccaaagtttgaggaggatgtgctcagttcagatatcatcatcttgacaatcacccgctgcatcgctattctgtatatatatttccaattccagaacctccgccagttaggttccaaatacatcctggggatcgcaggactgttcacaattttttcctcattcgtgttctctacagtcgttatatag

SEQ ID NO: 22673 - DNA, 2667 bp, synthetic construct
  misc_feature 1..2667: note = Description of Artificial Sequence: Synthetic coding sequence
  source 1..2667: mol_type = other DNA
atgctgagccggctgttccggatgcacggcctgttcgtggccagccatccgtgggaggtgattgtcggtacagtcactctcacaatatgcatgatgtctatgaatatgttcaccggaaataacaaaatctgcggctggaattacgagtgtccaaagttcgaggaggatgtattgagcagcgatattattatcctcacaatcactcgatgcatcgcaattttatacatttattttcagttccagaatttgcggcagttgggatccaagtacattctgggtatcgcgggcctgtttacgattttttcctctttcgtgttctcaactgtggtgattcatttcctggataaggaactgactggcctgaacgaggccttaccattttttttgctactcatcgacctgtctagggcgagcaccttggcaaaatttgccctctcaagtaatagccaggacgaagttagagagaatatcgcaaggggtatggccattctgggtcccacattcacactggatgcactcgttgagtgtctggtcataggagttggtaccatgagcggagtccggcagcttgagataatgtgttgttttggatgtatgtcggttctagcaaactacttcgtgtttatgacttttttcccagcctgcgtcagcttggttctggagttgtctcgggagtccagggaaggccgtccaatttggcagctgtcacattttgctagggttctcgaagaagaagagaacaaacccaaccctgttacacagcgggttaaaatgattatgtccctgggccttgtgcttgtccatgcacatagccgctggatcgctgacccttccccccagaacagtactgctgacaccagtaaggtttcgctggggctggacgaaaacgtgtcaaagcgaatcgagccatctgtcagcctttggcaattttatcttagtaagatgatctcaatggatatcgaacaagtgattactctgtcattggccctcctcttagccgttaaatacattttctttgaacaaacagaaacagagtcaaccctctcactgaagaaccctattaccagtccagtggtcactcaaaagaaagtccctgacaactgctgcaggcgcgagcctatgcttgttcgcaataatcagaaatgcgacagtgtagaagaagagacaggtattaaccgagagcggaaagtcgaggtgatcaaacccctcgtcgctgagactgatacccctaacagagctaccttcgtggtgggaaactcttcgctcctcgacacctcctccgtgctagtcacacaggagcctgagatcgaactcccccgtgagccaaggccgaatgaagaatgcttgcagattctaggcaacgccgaaaaaggcgccaagtttctcagtgacgctgagatcatccagctggtaaatgccaagcacatcccggcctacaaactggaaacactaatggaaacccacgagcggggagtatccatacgtcggcagctcctaagtaaaaaattatcagagcctagtagcctgcaatacctcccttacagagactataactactctttggtgatgggtgcatgctgtgaaaatgttattggctacatgccaatccccgtgggtgtcgcgggacctctgtgtttggatgagaaggagttccaggttccgatggcgacgacagagggttgcttggtagctagtaccaataggggctgtcgtgctattggtttggggggcggtgcctcttctcgcgtgctggcagatggcatgactagaggcccagtggtccggctccctcgggcctgtgacagtgccgaagttaaagcctggctggaaacctccgagggcttcgcagtaatcaaggaggccttcgactcaactagcaggtttgcacgccttcaaaagttgcacacaagcatcgctggtcggaacctctatatcaggtttcagtccagaagtggtgacgcaatggggatgaatatgataagcaaaggcacagagaaggccctgtctaaactgcacgagtacttcccagagatgcagatcctcgcggtgtctggcaactactgcactgacaaaaagccagcggcaatcaattggatcgaaggccgcggaaaatcagtggtctgcgaggctgtgattccagctaaggtcgtgagggaggtgctgaagactacaacagaggctatgatcgaagtaaatattaataaaaacctagttggcagtgcaatggccggaagtatcgggggttacaacgcgcacgctgcaaacattgttacggcgatttatattgcatgcgggcaggacgctgcacaaaacgtaggtagttcgaactgcatcactcttatggaggccagtggacccacaaacgaggacctgtacatcagttgtaccatgccttccatagagataggcacagtgggcggaggcacaaacttgcttccgcagcaggcctgtttacaaatgcttggggtacaaggggcctgtaaagataacccaggagaaaacgcgcgacagttggctcggattgtgtgcggcactgtcatggccggggaattatctctaatggctgcgctggcagccggccacttggttaagtcccatatgatccacaataggagcaagattaacctgcaagacctgcaaggagcctgcactaagaagactgcatag

SEQ ID NO: 22674 - DNA, 2460 bp, synthetic construct
  misc_feature 1..2460: note = Description of Artificial Sequence: Synthetic coding sequence
  source 1..2460: mol_type = other DNA
atgcacagccaccccgtgtacctgctgcccgtgcccgagttcaccagcacttggattaaaatctatttcggttactgttggccattccataacttcttaaagttttgtatccagtactcctgtcactctttgctgagacagagaatcgacagacttgaggaagccttaccttttttcctccttctgattgatttgtcacgcgcttccaccctggccaagttcgctttgagctcaaactcccaggatgaggtgcgagaaaatatagctagaggtatggcaatcctggggcccaccttcaccctggatgcactggtagagtgcctggtaatcggcgttggaacaatgtcgggcgtgcggcagctcgaaattatgtgttgtttcggttgcatgtctgtcctggcaaattactttgtgttcatgactttttttccagcatgcgttagtctcgtgctcgaactgtctcgagaatccagggagggtcgccccatctggcagctcagccatttcgctcgggtgttagaggaagaggaaaacaagcctaacccggtcacacaacgggtgaagatgataatgagcctcggtctggtgctagtgcatgcccactctagatggattgccgacccctctccacagaactccactgcagacacatctaaagtgtctcttgggcttgatgaaaacgttagcaagcgaattgagccatctgtaagcttatggcaattctacctgagcaagatgattagcatggacatcgaacaggttattacgctcagcctggccctcttactcgcagtgaagtacattttcttcgagcagaccgagaccgagtccactctttccctcaagaatccgattacatctcccgtggttacacaaaagaaggtgccagataactgctgcaggagagagccaatgctagttcgtaacaaccagaagtgcgacagtgtggaagaagaaactggaatcaatcgagagcgaaaggtggaggtcataaagcccctggtggctgagactgacactccaaatagggctaccttcgtggtcggtaactcgagccttctcgacacgtcctctgtgctggtgacgcaggagcccgaaatcgagctccctagagagcccaggcccaacgaggagtgtctacagatcctgggcaacgccgaaaagggagcgaaatttttgtctgacgccgaaatcatccagttggtgaatgccaaacacatccctgcctataaactggaaaccctgatggagacacacgagagaggagtgtcgattcggcggcagctgctatccaaaaaactctcggagccatcctccctgcagtatcttccataccgcgattacaactattcattggtcatgggggcatgttgtgagaacgtcattgggtacatgcctatccctgttggcgtggcggggcctctgtgccttgatgaaaaagagttccaggttcccatggccacaaccgagggctgcctggtagctagcaccaatagggggtgtcgggcaattggtctgggaggcggcgcttccagccgagttcttgctgacggaatgacacgaggccctgtcgtccgtcttcccagggcttgtgactctgcggaagtgaaagcttggctcgaaacttcggagggattcgctgttatcaaggaggctttcgactccacaagtcgcttcgcaaggctgcaaaagcttcatacatctatagctggcagaaacctgtacatcagatttcaaagccggagtggggatgccatgggaatgaatatgatatctaagggaacagaaaaggctctgagcaaacttcacgagtactttccagagatgcaaatcctggccgtttctggcaactactgtaccgataaaaagccagcagcaataaactggattgagggccggggaaaatctgtagtttgtgaggccgtaatccctgcaaaagtggttcgggaggtactgaagactacaactgaagctatgatcgaagtcaatatcaataaaaacctggtggggagcgcgatggcaggaagtatcggcgggtataacgcgcacgcagctaatattgtcactgctatttatatcgcttgtgggcaagacgctgcccagaacgttggttccagcaactgtataactcttatggaagcatctggtccgactaacgaagacctctacatatcgtgcacaatgccatccattgaaattggcactgtagggggtggaactaatcttctcccgcagcaggcctgtctgcagatgctgggggttcaaggcgcgtgcaaagacaatcccggcgaaaacgctagacagctcgccagaatcgtctgtggcactgtgatggcgggagagctgagcctaatggccgctctggctgctggccatttggtgaaatcccacatgatacataataggtctaaaatcaatctccaagatttacagggagcctgtaccaaaaagaccgcttag

SEQ ID NO: 22675 - DNA, 1671 bp, synthetic construct
  misc_feature 1..1671: note = Description of Artificial Sequence: Synthetic coding sequence
  source 1..1671: mol_type = other DNA
atggcccggaccaccagccagctgtacgacgccgtgcccatccagtcttcggttgtgctgtgctcatgcccttctccaagtatggtgcggacccagaccgagtcttccacaccacccggaattcccggtgggtctagacaaggccccgcaatggatgggaccgcggctgaacccaggcctggagccgggtctttacagcacgcccagccccctccccaaccacgtaaaaagcggccagaggattttaagttcggcaaaatactgggagagggtagtttcagcacagtggtcttagcacgagagctggcaacttccagagaatacgctattaagatcctagagaagcggcatattattaaagagaataaagtgccatacgttacccgcgaaagagatgtgatgagccgtctggatcaccccttctttgttaagctgtacttcaccttccaggatgatgagaaactgtacttcggactgtcgtacgctaaaaatggtgaactgctgaagtatataaggaagattggcagtttcgacgaaacttgcactagattttataccgccgaaatcgtttcagccctggagtaccttcatgggaaaggcatcattcacagggatctgaagcccgaaaacatcctgctaaacgaagatatgcacatccagattacggatttcggcaccgctaaggtgctgtcgcctgaatccaaacaggcacgggctaactcatttgtgggtacagcccaatatgtcagccccgaactgctgaccgagaagagcgcttgtaagtctagcgatctgtgggccctgggttgcattatttatcagctggtggcaggactacctccatttcgcgcaggaaatgagtatctgatcttccagaagattattaagctcgagtatgacttccctgaaaagttttttcctaaggcccgggatttagttgaaaagctccttgtgctcgacgccaccaaaaggctggggtgtgaggagatggaagggtatgggccgctgaaggctcacccattctttgagagcgtgacctgggagaatcttcaccagcagacaccgcccaagctgaccgcctatctgcccgccatgtctgaagacgatgaagactgttacggcaattatgataacctgctatcacagtttgggtgcatgcaagtgtcatcatcttctagcagccacagcttatctgcctccgacactgggctgcctcagagatctggatccaacatcgagcagtacattcacgacctggattcaaacagtttcgaactcgacctgcagttcagcgaggacgaaaagcgccttctcctcgaaaagcaggcagggggcaacccttggcatcaattcgttgagaataacctcattctgaagatgggccccgtggacaaaagaaaaggtttgttcgcacgccgcagacagctgctgctcactgagggccctcacttatactatgtggaccctgtcaataaagtcctgaagggcgaaattccctggagtcaggaactaagacccgaggcaaaaaatttcaaaacattttttgtgcacactccaaatcgcacttactacttgatggacccatcgggaaatgcacacaaatggtgtagaaaaatccaagaagtctggaggcaaagataccagtcccatcccgacgcagccgttcaatag

SEQ ID NO: 22676 - DNA, 1599 bp, synthetic construct
  misc_feature 1..1599: note = Description of Artificial Sequence: Synthetic coding sequence
  source 1..1599: mol_type = other DNA
atggcccggaccaccagccagctgtacgacgccgtgcccatccagtcctctgttgtcctgtgctcctgtccaagcccgagcatggtcaggactcagactgaaagtagcactccacctggtatccctggcggtagcaggcagggtcccgccatggatgggacggcggctgaacctcgcccaggtgctggctcactgcaacacgcccagccccctcctcagccacgcaagaaacgccctgaagacttcaagtttggcaaaatcctcggggagggaagctttagcacagtggtgttagcacgcgaattagcaacgagccgggagtacgccataaaaatcttagagaagaggcatattattaaggagaataaggttccttacgtgactcgggagcgagatgtcatgtcccgtctggatcacccatttttcgtgaaactctacttcaccttccaagatgacgagaagctatacttcggactgagttacgcaaagaacggcgagctgttgaaatacatccggaagatcggctcattcgacgagacatgtacccgcttctataccgccgagattgttagcgctctggagtaccttcacggcaaagggataatccaccgagacctgaaacctgagaatatcttactcaatgaggacatgcacatccaaatcaccgacttcggcactgccaaagtgctctcgcccgaaagcaagcagggcgtttccgacctgtgggcactcggctgcattatttaccagctggtggctggcctgcccccgttccgtgccggaaatgaatatctgatcttccagaaaattataaaattggagtatgatttccctgaaaagttttttccaaaagctagggatctggtcgagaagctacttgtactggatgctactaagcggcttggttgcgaagaaatggaaggatacggcccactaaaggctcacccatttttcgagtccgtgacatgggaaaacctccatcaacagaccccccccaagctcactgcatatctgccagcaatgagcgaggacgatgaggattgctacggaaactacgataacctcctgtcccagtttggctgtatgcaggtgagttccagcagttcctctcattctttgagcgctagcgacactggcctcccacagagatccggctcaaatatcgagcagtacatccatgatctggatagcaatagctttgaactcgatctacagttctcagaggacgaaaaaaggctgcttctggagaaacaagctggcggtaatccctggcaccaatttgtggaaaacaacctcatcctcaagatggggcctgtggacaagcgcaaaggtctctttgctaggaggcgacagctgctccttaccgaagggcctcatctgtattacgttgatcctgtgaacaaggttttgaagggggaaattccttggagtcaggagttgcgacctgaagctaagaacttcaagaccttctttgtgcatacccccaacaggacatattaccttatggatccctcaggaaatgcccacaagtggtgtcggaagattcaggaggtgtggcgccaaaggtatcaatcgcatcccgacgctgcagtacaatag

SEQ ID NO: 22677 - DNA, 1479 bp, synthetic construct
  misc_feature 1..1479: note = Description of Artificial Sequence: Synthetic coding sequence
  source 1..1479: mol_type = other DNA
cgggcccaggacgagggcggccactgctggggcagcgccagcggccgtcggacactgagaaggaggcgcgcggcgcagcgatgcggcggcggcgcacgggctgacgcaggccctatggcacgcactactagtcagctctacgacgccgtgccaatacagtcttcagtggttctgtgttcctgtcccagccccagtatggtgagaacacagacggagtctagcacgcccccagggattcctgggggctcacggcaagggcccgctatggacggaacagctgctgaaccccggcctggcgctggttctctgcagcacgcccagcctccccctcagcctaggaaaaaacggcctgaagacttcaagttcggcaagatcttaggggagggatctttctccaccgtcgtgctagccagagaactagccacgagtagagagtacgccatcaagatactcgagaaacgccacattattaaggaaaataaggtgccttatgtgacacgcgaacgcgacgtgatgagcagattggaccaccccttttttgttaaactctatttcacattccaagacgatgagaagctgtacttcggcctatcttacgccaagaacggcgagttgctgaaatacattagaaagataggttctttcgacgaaacttgtactcggttttacacagccgagatcgtatctgccctggaatacctacatggtaagggaataattcacagagatttgaaacctgaaaatatattgctcaatgaagatatgcacatccagatcaccgactttggcacggctaaagtgctatcccctgagtcaaagcaggcccgagccaatagcttcgtcggcacagcccagtatgtttcccctgagctgttgactgagaagtctgcctgcaagagttccgatctctgggccttagggtgcatcatctaccaattggtggccggcttgccccctttccgcgcaggaaacgaatacttgatctttcagaagataatcaaactggagtacgactttcctgaaaagttctttcctaaagcacgggaccttgttgagaagttgctggtacttgacgcaacaaaacggctgggttgtgaggaaatggaagggtatggaccactgaaagcccatccttttttcgagagtgtgacatgggaaaaccttcatcagcagactcctccaaagttgactgcttacctgcccgccatgagcgaggacgacgaagactgttacgggaactatgacaatctgctgagccaatttggatgtatgcaagtgtcatccagttcttcttctcattcactgtccgcaagtgacaccggactgccacagcggtctggtagcaatatcgaacagtatatccacgacctcgacagcaattccttcgaactggatctgcagttttccgaggacgaaaagagactgttactggaaaagcaagccggcggcaatccatgcttgacgggtcggataatttag

SEQ ID NO: 22678 - DNA, 1290 bp, synthetic construct
  misc_feature 1..1290: note = Description of Artificial Sequence: Synthetic coding sequence
  source 1..1290: mol_type = other DNA
atggcccggaccaccagccagctgtacgacgccgtgcccatccagtcgagcgtagttctatgctcttgtccatcgccctcaatggtgcggacccaaactgaatcatcgactccacctgggattccgggtggttccagacagggccccgcaatggatggcacggccgctgaaccccgccctggagcgggctcgctccagcatgcacagccccctcctcaacccaggaaaaaacgcccggaagactttaagttcggaaagatcttaggagaaggcagtttctcaaccgtagtactcgcgagggaactggcaacttctcgcgagtacgccactcgcgcaaattccttcgtgggaaccgctcagtatgtcagtcccgagctcttgacagagaaatctgcctgtaaatcctcagacctctgggccctgggctgcatcatttatcagctcgttgctggcctgccaccattccgggccggaaacgagtatctcatttttcagaaaataataaaactggagtatgactttcccgagaagttcttcccaaaggcccgcgacctggtcgaaaagctgttggttctcgatgcaaccaaaagattgggctgcgaggagatggaggggtacgggcctctgaaggcccatcctttctttgaatccgttacatgggaaaatctgcatcagcaaacaccccccaagttaacagcatatctccctgcgatgtctgaggacgatgaagattgctatggcaactacgacaacttgctgtcccagttcggttgtatgcaggtcagctcctcctcatctagccatagcctctccgcaagcgacaccggcctgcctcagcggtcaggttcaaatatagagcagtacatacacgacctggattctaactcttttgaactcgatctacagttctcggaagatgaaaagaggctgctcctggaaaaacaggctggtgggaacccatggcatcagtttgttgagaacaaccttattctcaagatgggacccgtggataagcgcaaagggctgtttgcccggcgacgacagctactgctgacggaggggccccatctgtattatgttgacccagtgaacaaagtgctgaaaggagaaatcccatggagccaggagctaagaccagaggccaagaattttaaaacattctttgtgcacacaccgaataggacatattaccttatggacccctccggaaatgcgcacaagtggtgtcggaagatacaggaggtctggcgtcagcggtaccaaagccaccctgatgcagccgttcagtag

SEQ ID NO: 22679 - DNA, 5121 bp, synthetic construct
  misc_feature 1..5121: note = Description of Artificial Sequence: Synthetic coding sequence
  source 1..5121: mol_type = other DNA
atgggcgtgcccaagttctaccggtggatcagcgagcggtacccctgcttatctgaagtggtgaaagagcatcagatccctgagttcgataatttgtaccttgatatgaacggaattatacatcagtgttctcatcctaacgatgacgacgtccattttcggatcagcgatgataagatcttcactgacatcttccactacttggaggtactctttaggatcattaagccaagaaaggtgtttttcatggcagtagatggcgttgccccgagagcaaaaatgaaccagcaaaggggccggcgcttccgttccgcaaaggaagcagaagacaagattaaaaaggctattgagaagggagagacacttcctaccgaagcacgttttgactccaactgtataacccctggaaccgagttcatggcacggttgcatgagcatctgaaatatttcgtcaatatgaagattagcaccgacaagtcctggcagggagtcacaatctatttctcaggacacgagacgccaggtgagggggaacacaaaatcatggagttcattaggtctgagaaggccaaacctgaccacgatcctaatactcgacattgtttgtatggccttgatgctgatctgattatgcttggcctcaccagccatgaggctcacttctctctgcttcgtgaggaggtccgcttcgggggtaagaaaactcagcgcgtgtgcgctcccgaggaaactacgttccacctcctccatttgagcttgatgagagagtatattgattacgaattctcagtccttaaagagaagataacattcaagtacgacatcgagcgtattatagacgattggattcttatggggtttctggtgggaaatgacttcatcccacatctccctcacctgcatatcaaccacgatgcccttccactgctttatgggacatatgttaccattttgcctgaactcggcggatacattaatgagtcgggccacttgaatctcccaagatttgaaaagtacctggtaaagttgagtgatttcgacagagagcacttcagcgaggtgttcgtggacctgaagtggtttgagtctaaggtaggtaacaaatatctgaatgaagccgcaggcgtggcagccgaggaggcccgcaactataaggagaagaaaaaacttaaagggcaggagaatagtctttgctggaccgcgctggataagaacgaaggggagatgatcacttccaaggataatctggaagatgagacagaggatgatgatctgttcgaaacagaattcaggcagtacaagagaacatactacatgactaagatgggtgtggacgtggtaagcgatgatttcctggctgatcaggcagcttgctatgtacaggctatacaatggatccttcattattactaccacggcgttcagagttggtcctggtactacccttatcattacgccccttttttatccgatatacataatatttctacgctgaaaatccattttgagcttggcaagcccttcaaaccattcgagcagctcttggctgtgttacccgccgcatcgaagaacctgctcccggcctgctaccagcacctgatgaccaatgaagactctcccatcatcgaatattaccccccagattttaaaaccgatctcaatggtaaacagcaagaatgggaagccgtggtgctcataccgttcatagacgagaaacgcctcctggaggcgatggaaacatgtaaccacagtctcaagaaggaagaacgaaagcggaatcagcattcagaatgtctgatgtgctggtacgaccgcgacacggaattcatctacccatccccctggccagaaaagttccctgccatcgagaggtgctgtactcggtacaagattatttctctcgatgcctggcgcgtggatatcaacaaaaacaaaatcacacggattgatcaaaaagctttatatttttgtggattcccaacactgaaacatattcggcacaaattttttctaaaaaaatccggcgtccaggttttccagcagtcatcccggggtgaaaacatgatgttagaaattcttgtagatgccgaaagcgacgagttaactgttgagaatgtggcctcaagcgtcctggggaaatctgtctttgtgaactggccacacttggaggaagcccgggtcgtagcggtgagcgacggcgaaacgaaattctacctcgaggaaccacccggtacccaaaagctgtactccggaaggaccgcccccccaagtaaagtcgtgcacttgggcgataaagaacagtctaattgggccaaggaggtgcagggcatcagcgaacactatctgaggcggaaaggcattatcatcaacgagacatctgccgtagtctatgctcagctcctgaccggtagaaagtaccagattaaccagaatggagaggtcaggctcgagaagcaatggagcaagcaggtcgtccctttcgtgtaccagaccattgtcaaggacatccgagccttcgacagccgcttttccaacatcaagacgcttgacgatctcttcccattaaggtccatggtttttatgctgggcaccccatactatggctgtaccggagaagtgcaggactctggggacgtcatcaccgaggggagaatccgcgtgatcttctcaatcccctgcgagccgaatctcgacgccctgatacaaaaccaacacaaatattccatcaaatataacccagggtacgtcctggcgtctaggctaggcgtgtcaggctacttggtgtctaggttcactgggagcattttcatcgggcgaggttcccgtaggaatccccacggtgatcacaaggcaaacgtcggcctgaatttgaaatttaacaagaagaacgaggaggtacctggctacacgaagaaggttgggtctgagtggatgtactcctcagcagctgaacaactgttggcagagtatcttgagcgcgccccagaattattctcctatatagctaaaaactcccaggaagacgtgttttacgaggatgacatttggccaggcgagaacgagaatggggccgagaaggtccaggagattatcacctggctgaaaggacatcccgtgagcacgctgagccgaagctcctgtgacttgcagattctcgatgcagctatcgtcgagaaaattgaggaggaagtggagaagtgtaagcagcggaagaacaataaaaaagtgagagtcaccgtgaagcctcatctcctttacagaccactcgaacagcaacacggcgtgatccccgatagggatgctgaattctgcctcttcgatcgtgtagtgaatgttagggagaactttagtgtgccagtgggccttcgcggaaccattatagggatcaagggagccaaccgcgaggccgatgtgctgtttgaggtgttgtttgacgaagagtttccgggaggtttaacgattcgttgtagcccaggccgtgggtaccgcctccccacaagtgctttggtaaatctctcacacggcagtcgttctgagacagggaaccaaaaattgacagccatcgtgaagcctcagcctgctgtgcaccagcatagcagctcatccagcgtctcttcaggacacctgggagccctgaaccactccccacagtccttattcgtccccacgcaggtgccaacaaaagacgatgatgagttttgcaatatttggcagtccctgcagggatcaggaaagatgcagtactttcagcctacgatacaggagaagggggctgtactgccacaggagatctcacaggtgaaccagcaccataagtccggcttcaacgacaactcagtcaagtaccagcagcggaaacacgatcctcataggaagttcaaggaggaatgcaagagccctaaagctgagtgttggtctcagaagatgtccaataagcagcccaattcaggcatcgagaatttcctggcaagtctgaatatcagcaaggaaaatgaagttcaatcctctcaccatggagagccccccagcgaagagcacctgtctccccagagcttcgccatgggaacgaggatgttaaaagaaattctgaagatcgacggcagtaatacagtcgaccataaaaatgagatcaaacagatcgccaacgagattccggtgtcttctaatcggcgtgacgaatacgggctgccctctcagccgaaacagaataaaaaattggcttcctacatgaataagccacattcagccaacgaataccacaacgtccaaagcatggataatatgtgctggcctgcaccatcccaaattccacccgtaagcacaccagtgacagagctctcaaggatctgcagcctggtcggaatgccgcagcccgatttctcctttctgagaatgccgcagacgatgacagtgtgccaggtgaagctctccaacggactccttgtgcatggaccccagtgccattctgaaaatgaagcaaaggagaaagccgcccttttcgcgctgcagcaactgggctctttaggtatgaattttccactgccgagtcaggtgttcgctaactacccctcagccgtgcccccaggaacaatcccccccgctttccccccacccaccggttgggaccattacggctccaactacgccctgggtgccgccaacatcatgccctcaagcagccatttattcgggtccatgccctggggcccaagtgtgccagtaccaggcaagccctttcatcatacattgtattccggaacaatgcccatggccggaggtatccccggcggagttcacaaccagttcatccctttacaggtcaccaaaaagagagtagcgaataaaaagaatttcgaaaacaaggaagcgcagtcatcccaggcaacgccggtgcagacttcccagcccgacagctctaacattgtcaaggtgtcaccgcgggagagctccagcgcgtctctgaagtccagtcctatcgcccaaccagcaagcagtttccaggttgaaaccgcctcacagggccattctatctctcaccacaaatcaacccccatctcaagtagccgaagaaaatcacgcaaactcgccgtcaatttcggcgtgtcgaagccttcagagtag

SEQ ID NO: 22680 - DNA, 5085 bp, synthetic construct
  misc_feature 1..5085: note = Description of Artificial Sequence: Synthetic coding sequence
  source 1..5085: mol_type = other DNA
atgggcgtgcccaagttctaccggtggatcagcgagcggtacccctgcttgagcgaggttgttaaggagcatcagatccccgagtttgacaacctgtacttggacatgaatgggattatccaccagtgcagccaccccaacgacgacgacgtgcattttcgaatcagcgacgataagattttcactgatatcttccactatctggaagttttgtttcgcatcataaagccgagaaaagtcttctttatggccgtggatggcgtggcacctagagctaagatgaatcaacaacgtggtcggcgctttagatctgcaaaggaagctgaagacaaaatcaaaaaggccattgagaaaggtgaaacattgcccacggaggctaggtttgatagcaattgtataacccccgggaccgagttcatggcgcgcttacacgagcacctgaagtacttcgtgaacatgaagataagtactgacaaaagctggcaaggcgtgaccatttatttttctggtcatgagacacctggagagggcgagcacaaaatcatggagtttatccggtcagagaaagcaaaacccgaccatgaccctaataccagacattgcttgtacggtctggatgcagacctcatcatgctaggcttaacatcccacgaggcccatttcagccttctgagagaagaagtgagatttggcggaaagaaaacccaaagagtctgcgccccagaagaaaccactttccacttactacacctaagccttatgcgggaatacattgactacgaattttccgtgttgaaggagaagatcaccttcaagtacgatatagaacgcatcatcgatgattggattctcatgggctttctggtcgggaatgatttcattccgcacctgccccatttgcatatcaatcacgatgctttaccactcctctacggcacttatgtgaccattctgcctgagctgggaggctacatcaatgaaagtggacacctgaatctcccacgtttcgagaagtaccttgtgaagctgagtgacttcgacagagaacatttctctgaggtgttcgtggatttaaagtggtttgaaagtaaagtcggtaataaatacctgaatgaggcggctggagtagcggctgaggaggccagaaactacaaggagaaaaagaaattgaaagggcaggagaactccttgtgctggaccgcgctggacaaaaatgagggcgagatgattacctctaaagataaccttgaggatgagaccgaggacgatgacctttttgaaaccgagtttcggcagtataagagaacgtactacatgaccaaaatgggggtagacgtggtaagcgacgactttttagctgatcaggccgcctgctacgtgcaggcaatccagtggatcttgcactattattatcacggtgtccaatcatggagttggtattacccttatcactacgcacctttcctgtctgatatccacaacatcagcactctcaagatccacttcgagctcggtaagcccttcaaaccttttgagcagctactggccgtgctacctgccgccagcaaaaatttgctcccagcctgctaccagcatctgatgaccaatgaggacagccccatcatcgaatactatccccccgactttaaaacagacctgaatggaaaacagcaggagtgggaggccgtagtgctcattccgttcatcgacgagaagcgcctgctagaggctatggaaacgtgtaatcattccctaaaaaaggaagaaagaaaaaggaatcagcatagcgagtgtctaatgtgttggtatgatcgcgacacagaatttatctaccccagcccttggccggagaagtttccagccatcgaacgctgttgcaccaggtataagatcatctcactagacgcgtggagagtggatattaacaagaataaaatcaccagaatcgaccagaaagcgctgtacttttgcggtttccctacccttaagcacattcgccataaatttttcttaaagaagtccggcgtgcaggtgtttcagcagtcatctaggggtgagaacatgatgctggagattctcgtcgatgctgagtctgacgaactgacagtggagaatgtagccagtagcgtgttgggaaagtccgtatttgtgaattggccccacctcgaggaagctcgagtcgtcgccgtgtccgatggagaaactaagttttatctcgaggagcctccgggcacacagaagctgtactccggaagaactgccccaccctcaaaggtggtgcacctcggagataaagagcagtccaactgggcaaaggaggtccagggaatttctgagcactacctgcgccgaaaaggtatcatcattaatgagactagtgcagtcgtgtacgcccagctgctgaccggcagaaaataccaaatcaaccaaaacggcgaagttcggctcgaaaagcagtggagcaaacaggtggtcccgttcgtctaccagacgattgttaaagatatccgggcgtttgattcgcgattcagtaacatcaagacacttgacgatctgttcccactgcgcagcatggtatttatgctgggcactccttattacgggtgtacaggcgaagtgcaagacagtggggacgtgattaccgagggacgtataagagtgatcttcagcattccttgcgagcccaacctggacgccctcatccagaaccagcacaaatattccatcaagtataatcctggatacgtgcttgcaagccgcctgggggtgtccgggtaccttgtttccagattcactggaagcatttttattgggaggggtagtcgacgaaatcctcacggagatcataaagccaatgtagggctgaaccttaaattcaataagaagaatgaggaagtgccgggatatactaagaaggtgggcagcgaatggatgtattcctcagccgctgagcagctgctggctgaatacctcgaacgtgctcctgagctttttagctatattgcaaagaacagccaggaggatgtgttttacgaagacgacatttggcccggcgagaacgagaatggggccgagaaagtgcaagagattatcacctggctgaaagggcatccagtctctaccttgagtcggtcaagttgtgatctgcaaattcttgacgccgcgattgtggaaaaaatcgaggaggaggttgagaagtgcaagcagagaaagaacaacaagaaagtgagggtgaccgtgaaaccacacttgctgtatcgtcccttagaacagcagcatggggttatccctgacagagatgcggaattctgcctctttgatagggtcgtcaatgtgcgggaaaacttcagtgtcccagttggcctgcggggaacgataatcgggataaagggagcaaaccgagaggccgacgtgctgttcgaggtgttatttgatgaggagtttcctggtggactaaccatccgctgctcccccggaaggggatatcggttacccacctccgcgttagtgaatttgtcccacgggtccaggtcagaaactggcaaccaaaagctgaccgccatcgttaaaccgcaacctgctgtgcaccaacatagttcctcttctagtgtgtccagtggacacctgggagcactgaatcactcccctcagtctctctttgttcccacacaggtacccactaaagatgatgacgaattctgcaatatctggcagtcactgcaggggtctgggaaaatgcagtacttccaaccaacaatacaagagaaaggtgccgtgctgccacaagagatttcgcaagtcaatcagcaccacaaatccgggtttaacgataatagcgtgaagtatcagcaacggaaacatgaccctcatcgcaaatttaaggaggaatgcaagagtcccaaggccgagtgctggtcccagaagatgtccaataaacagcccaacagcggaattgagaactttctcgccagtctgaatatttcgaaggagaacgaggttcaatcaagtcaccatggcgagccgccctcagaagagcacctgagtccccaatcatttgccatgaaagggacaaggatgctgaaagaaattctaaaaattgatggaagtaataccgtggatcacaaaaatgaaataaagcagattgccaatgagattcccgtctcatcaaatagacgggacgagtacggtctcccgtcacagcctaagcagaataaaaagttggcttcctacatgaacaagccacactcggctaacgagtaccataatgtacagtctatggataacatgtgctggcctgccccctcccaaatcccccctgtgtccacacctgttacagagctgagtagaatatgcagccttgtcggtatgccccagcctgacttctcattcctccgtatgccccagacaatgacggtctgccaggtgaagctatccaacggcctgcttgtccacggtccacagtgtcactccgaaaacgaggccaaagaaaaagctgccctttttgcccttcagcagcttggaagtttgggaatgaatttccccctgccatcccaggtgttcgcgaactacccatccgctgttccccctggcaccatcccacctgcttttcctccccccaccgctaacatcatgccatcctctagccacctattcgggtccatgccctggggcccgtcagtaccagtgcctgggaaaccttttcaccacaccttatattccggaaccatgcccatggccgggggtattcccgggggggtccacaatcagtttatccccttacaggtgaccaagaagcgggtcgccaacaaaaagaactttgaaaacaaggaggctcagagttcacaggcgacaccggtgcagacgagccaacccgactccagtaatatcgtaaaggtatccccccgagagtcgtcctcagcctctctgaagtcttcacctattgcacagcctgctagcagcttccaagtggaaaccgcctcacagggacattcaatcagtcaccacaagtccacacccatatcttctagcaggcggaaatcacgtaagctggccgtgaactttggcgtgtcaaagccatcagagtag

SEQ ID NO: 22681 - DNA, 1380 bp, synthetic construct
  misc_feature 1..1380: note = Description of Artificial Sequence: Synthetic coding sequence
  source 1..1380: mol_type = other DNA
atgggcgtgcccaagttctaccggtggatcagcgagcggtacccctgcctgagcgaggtggtcaaggaacaccaaatcccagaatttgataatctgtacttggacatgaacggtataatccatcagtgctcccatccaaatgatgacgatgtgcacttccgcattagtgatgataagatcttcacagacatcttccactacttggaggtgttattcaggatcataaaaccgcgcaaagtgttttttatggccgtcgacggagtggctccccgggccaagatgaatcagcagcggggccgtagattcagaagtgccaaggaggccgaagataagattaagaaagccattgaaaaaggcgaaacactgccaaccgaagctagattcgacagtaattgtatcactcccggtacagagttcatggcacggttacacgaacatttgaagtacttcgtgaatatgaaaatctcaactgacaagtcatggcagggggtgacaatttacttctctggccacgagacacccggggagggggagcataagatcatggaattcattcgttctgaaaaagctaagccagatcatgatcctaatacaagacattgtctgtacggcctggatgccgacctgatcatgttgggattaacatcccacgaggcgcacttttcactcttgcgggaagaagttaggtttggaggaaaaaaaacacagcgggtgtgtgctcctgaggagacaacattccacctactgcatctctctctgatgcgtgaatacattgattacgaattctctgtcttgaaggagaaaataacctttaagtacgacattgaacgtatcattgatgattggatcttgatgggattcctggtgggaaacgatttcatccctcacttgcctcaccttcacattaaccatgatgccctgccactgctgtacggcacgtatgttaccatcctgcccgagttgggtgggtacatcaacgaatccggccaccttaatctgccgaggtttgaaaaatacctcgtaaaactcagtgacttcgaccgagagcacttcagcgaagtgtttgttgacctgaaatggtttgaatctaaggtaggcaacaagtatttaaatgaagcggccggggtagccgccgaggaggctcgcaactacaaggaaaagaagaaactgaaaggccaagaaaattccctctgttggacggcgctagataagaatgagggtgaaatgatcacaagcaaagacaacctcgaggatgagactgaggatgacgatctgtttgaaacagagtttaggcaatataagcgcacatattacatgaccaagatgggcgtggatgtggtctccgaatacgtcttcgcaaatgccttcatccttaagtag

SEQ ID NO: 22682 - DNA, 750 bp, synthetic construct
  misc_feature 1..750: note = Description of Artificial Sequence: Synthetic coding sequence
  source 1..750: mol_type = other DNA
atgctgggcctgaccagccacgaggcccacttcagcctgctgcgggaggaggttcgctttggggggaaaaagacccagcgtgtctgcgctccagaggagacgaccttccaccttttacatctctctctgatgcgggagtacatcgattatgaattttcggtgctcaaagaaaaaattaccttcaagtatgacatcgaacgcatcattgacgactggatactgatggggttcctcgtggggaacgattttatcccccacctgcctcatctgcacatcaaccacgatgccctgccactgctgtatggcacctacgtgactattcttccagagttgggcggttacatcaatgaaagcggacacctgaatctgcctcgtttcgagaagtatttggtgaaactgtcggattttgaccgcgaacacttcagcgaagtctttgtggacctgaagtggttcgaatctaaagttggtaataagtatttgaacgaagctgccggcgtcgcagcggaggaggctcgtaactacaaagagaagaaaaagttgaaagggcaagaaaactccctctgttggaccgctctcgataagaatgagggagaaatgattacatctaaagacaacctggaggacgagacggaagacgatgacctttttgaaaccgagttccgccagtataagcggacgtactacatgacaaagatgggcgtggatgtggtctcggaatacgttttcgcgaatgcctttattctgaagtag

SEQ ID NO: 22683 - DNA, 3483 bp, synthetic construct
  misc_feature 1..3483: note = Description of Artificial Sequence: Synthetic coding sequence
  source 1..3483: mol_type = other DNA
tgaaccaacgaggacagccccatcatcgagtactacccccccgactttaaaacagacctaaacggtaaacagcaagaatgggaggcagtggtgctgattcccttcattgacgagcgcctgctagaagctatggaaacctgcaaccacagcctgaagaaagaagaaagaaagcgaaatcagcatagtgagtgcctcatgtgttggtacgaccgtgatacagaatttatttatccttcaccctggccagagaaatttcctgccatagagagatgttgtacgaggtataagattataagcctggatgcatggcgtgtagacattaacaagaacaagattacaaggatagaccagaaggctttgtatttctgcggattccctacgctgaaacatatccggcataaattctttctaaaaaagtctggggtccaggtcttccagcagtcaagtcgcggcgaaaatatgatgctggagattttagttgatgcagagtctgacgagttaactgtagaaaatgtggcttccagcgtactcggtaagtcagtatttgtgaactggccccatctggaagaggccagagtggtggcggtgtctgatggtgaaactaagttctacctggaagaacctccaggcacccagaaactctattctggccgcaccgctccgccaagcaaggtagttcacttgggcgacaaagagcaaagtaattgggcaaaagaagtgcagggcataagcgaacactacctgagaagaaaaggaattataattaacgagacttctgccgtcgtctacgcccagcttcttacaggaagaaagtaccagataaatcagaacggggaagtccgacttgaaaagcaatggtctaaacaggtggttccttttgtataccaaactattgtaaaagatatccgcgcattcgacagccggttctccaacattaaaactctggacgatctgttcccactgcggtctatggtcttcatgctcgggactccctactacggatgcactggagaagtacaagattccggagacgtaatcacagagggccgaatccgagtcattttttctatcccctgcgagcctaatctggacgccttaattcaaaaccagcacaagtatagtatcaagtataatccggggtatgtgctggcatcaagactgggtgtgtctggatacttggtctcccggttcactggctctattttcattggccgaggctctcggaggaacccgcatggagaccacaaggcgaacgttggactgaatctgaagtttaacaagaagaatgaagaagtacccggttataccaagaaagtgggcagcgagtggatgtattcctcagccgccgagcagttgttagctgagtacctggaacgcgcgcccgaacttttctcttacatcgctaaaaattctcaggaagatgtcttctacgaagatgacatttggcccggcgagaacgaaaatggtgcagaaaaggtgcaggagatcatcacctggctgaagggacaccccgtctcgactctcagtcggtcttcatgtgatcttcaaattctggacgcagccattgtcgaaaagatagaggaagaggtggagaagtgtaagcagagaaaaaataacaagaaggtccgggtcaccgtaaaaccacatcttctgtacagaccccttgaacaacaacatggcgtcataccggatagagacgctgagttctgtttgttcgatagagttgtaaacgtccgggagaatttttcggttcccgttggactgaggggaacgatcatcggcatcaaaggcgcgaatcgcgaggctgacgtcctgtttgaagtgctcttcgacgaagagttcccgggcgggctgaccatccgttgcagcccgggccgaggttatcgacttccgaccagcgcactcgtcaatctgtcccacgggtctagaagtgaaacagggaaccagaaactcacagccattgtcaaacctcagccggcagtacaccagcatagttcaagttcatctgtgtccagcggtcacctgggtgccttgaatcacagcccacaaagtttgttcgtgcccacccaagtacctactaaggacgatgacgagttctgcaatatatggcagtctctgcaagggtccggcaagatgcaatatttccagccaacaatccaggagaaaggagctgtgctgccacaggaaatatcacaagtcaatcaacaccacaagagtgggtttaatgataacagtgtgaagtatcaacaacggaaacacgacccacacaggaaatttaaggaagaatgcaagtccccaaaagcagaatgttggtcacagaagatgagcaataagcagcctaattccggaatcgagaacttccttgccagcttaaacatcagcaaggaaaatgaagtgcaatcgtctcaccacggggagcctccttcagaggaacacctgagcccccaatccttcgcaatgaaaggaactcgcatgctgaaggaaatcctcaaaatcgacggctcaaatacagtggaccacaagaacgaaatcaaacagatcgccaatgagatccctgtgtccagtaacagacgcgatgagtatggactgcctagccaaccaaagcagaacaaaaaactggcctcttatatgaacaaaccccactcggctaacgagtatcacaatgtacaatctatggacaatatgtgctggcccgctccgagccagatccctccagtttctacacctgtgactgaactaagtagaatctgctctctggttggtatgcctcagccagacttttcctttttgcggatgccccagaccatgactgtctgtcaagtgaagcttagcaacgggcttctcgtccacgggcctcagtgccacagtgagaatgaagcaaaagagaaggcggccctatttgctctgcagcaattaggttccttgggcatgaattttccgctcccttcacaggtcttcgccaactacccctctgccgtgccgccaggaactataccaccagcctttcctcccccaaccgctaatatcatgccaagttcctcccacttgtttgggtcaatgccatggggaccctccgtccctgtgccaggtaaacccttccaccacacactttatagtgggactatgcccatggccggtgggatcccaggaggcgtacataaccaatttattccgctgcaggtcactaagaagagggtggccaacaagaaaaattttgagaacaaggaggcacaaagcagccaggcaacacccgttcagaccagccagccagacagcagtaacattgtgaaagtgtctccgcgtgaatctagctccgcaagccttaaaagctctcccattgcccaacctgcatcaagctttcaggtggaaactgcctcccaggggcacagcatcagccatcataaatccaccccaatcagctcctctagacgcaaatctcgtaagctggccgtcaacttcggagtatccaagccatccgaatag

SEQ ID NO: 22684 - DNA, 1233 bp, synthetic construct
  misc_feature 1..1233: note = Description of Artificial Sequence: Synthetic coding sequence
  source 1..1233: mol_type = other DNA
atgcccgcccgggccctgctgccccggcggatgggccaccggaccctcgcatccactccagctctctgggcttccataccttgtcccagatccgagctgcgcctagatttagtgcttccttccggtcaatcctttcgatggagggagcagagtcctgcccattggtctggcgtcctggcagaccaggtgtggaccctgacgcagaccgaggagcagctccattgcactgtttataggggggacaaatctcaagcatctcgccctactcctgacgagctggaggctgtgaggaagtattttcagttagacgtgaccttagcacagctatatcaccattggggaagcgtggactcccattttcaggaagtagcccagaagttccaaggagtccgcctgctcaggcaagacccaattgagtgcctattctcctttatctgtagtagtaacaacaatattgctaggattaccggaatggtagagcggctttgccaagcctttggtccacgccttattcaattggacgacgtgacctatcatggctttccctcgttgcaagcactcgcgggacccgaggtcgaagcgcacctccgcaaactgggcttgggttaccgagccaggtacgtgtctgcctccgcaagagccatcctcgaagagcaaggtgggttagcttggctacagcaattacgggagagttcttatgaggaagctcataaagccctctgcattttgccaggagtgggaacaaaagtggccgattgcatctgtctgatggcgctggacaaacctcaggcagttcctgtcgacgttcacatgtggcacatcgcacagagagactacagctggcaccccaccacttcccaagcaaagggcccctcccctcaaacaaacaaagagcttggaaattttttccgttctttgtgggggccatatgcaggctgggcgcaggctacaccgccctcatacagatgttgctctgtgcctacctgcgccaatcccgccatgctgcgttcccaccagcagtccgcagagcgcgtcccaaaagggcggaaagctaggtggggcaccctggacaaagagataccccaggccccctctcctcctttccccacttcactcagtccttctccgccaagcttgatgctcggcagaggtctgcccgttacaaccagtaaggcacgacatccgcaaatcaaacaatcagtgtgtactaccaggtggggcgggggatactag

SEQ ID NO: 22685 - DNA, 1071 bp, synthetic construct
  misc_feature 1..1071: note = Description of Artificial Sequence: Synthetic coding sequence
  source 1..1071: mol_type = other DNA
atgcccgcccgggccctgctgccccggcggatgggccaccggaccctggccagtacaccagctctctgggcctcgattccctgcccgcggtcggagttgcgcctggatctggtgttacccagcgggcagagtttcaggtggcgtgagcagagtcctgcgcattggtcaggtgtgctcgccgatcaggtgtggaccctgactcagaccgaagagcaactgcactgcaccgtatacagaggcgacaagtcacaggccagtaggccaactcccgacgagctggaagctgtccgaaagtactttcagttggatgtcacgctcgcacagttgtatcatcactggggctcagtcgactctcactttcaagaggtcgcacaaaaattccagggggtgaggcttcttcgtcaggacccaatcgagtgcttatttagctttatctgctcgagtaataataacatcgcacggataacgggtatggtcgagcggttgtgccaagcttttggacctcgactgatccagcttgacgacgtcacatatcacggattcccctctctacaggcccttgcgggtccagaggtagaggcacacctgaggaaactcgggttgggttatagggctcggtacgtgtcagctagcgcccgagccatcctcgaggagcaaggcggactggcctggctccagcagttaagggaatcctcatatgaggaagcccacaaggcattatgcatactgccaggtgtgggaaccaaggtagcagattgcatctgtctgatggctcttgataaaccacaagccgtgccagttgacgtgcatatgtggcacattgcccagagagactacagctggcacccaacaactagccaggcaaaaggtccatcccctcagaccaataaggaactgggcaactttttccgcagcctatgggggccttatgctgggtgggctcaagccctgtgtcaggtgatcactaccttcatgaccttcctgggtccccaccgcctggatcagatgcctcccgaggagctgcagacctcgtcctcccgcctgggcggaccgccatggcagtgtatatag

SEQ ID NO: 22686 - DNA, 1275 bp, synthetic construct
  misc_feature 1..1275: note = Description of Artificial Sequence: Synthetic coding sequence
  source 1..1275: mol_type = other DNA
atgcccgcccgggccctgctgccccggcggatgggccaccggaccctggcctcaactcctgccctctgggcctccatcccttgtccacggtccgaactgagactggacttggtgctaccatccggacagtcgttccgctggcgtgagcagtccccggcccactggagcggggtccttgcagatcaggtttggaccctgacacagacagaggaacaactgcattgcactgtctaccgcggagataaaagtcaggcctctagaccaacacccgacgagctcgaggccgtgagaaaatattttcaactggacgtgactctagctcagctttaccatcactggggctctgtagactctcacttccaggaagtggcccaaaaatttcagggggtcaggctactgcgccaagacccaattgagtgcttattttctttcatctgctccagcaacaacaacattgccagaatcactggcatggtggagcgcctgtgccaggcatttggcccacgtctcattcaacttgatgatgttacgtaccacggttttccgagtcttcaggccttagccggacctgaagtggaggcccatcttagaaagctggggcttggttaccgcgcaagatacgtgtcagcctcagcgagagctattctggaggagcagggcggactggcgtggctgcaacagctgagggaaagctcctacgaagaagctcacaaagccctatgcattctcccgggcgtgggtacaaaagtcgccgattgtatctgccttatggcattggacaaaccccaggcagtgcccgtggacgtgcacatgtggcacatcgctcagagggactattcctggcaccccactaccagccaggcgaagggcccgagcccacaaaccaataaggaattggggaatttcttcaggagcttgtggggcccttatgccgggtgggcacaggctggccttctggggaatgcgtttgacggacaccaactgctcagacctctgattttctgccaggaccatttgagagaaggccccccaatcgggcgaggggactcacagggggaggagttggagccccagctgccttccagtttatccagcattccatatggcttctgcgaccattgttggactaaggacgtggatgaccctcctctagtgactcacccttcacctggctctcgcgacggacatatgactcaggcatggcccgtgaaggttgtctcccctctcgccaccgtcatcggacacgtgatgcaggcaagtctcttagcattgtag

SEQ ID NO: 22687 - DNA, 975 bp, synthetic construct
  misc_feature 1..975: note = Description of Artificial Sequence: Synthetic coding sequence
  source 1..975: mol_type = other DNA
atgcccgcccgggccctgctgccccggcggatgggccaccggaccctcgcctctaccccggctttatgggcatccatcccctgtcctaggtccgaactgaggttggatcttgtgctcccatctggtcagtcctttaggtggcgggagcagtctcccgcccactggtctggcgtactggctgaccaggtgtggactttaacacagaccgaggagcagttgcattgtaccgtttaccggggtgacaaaagtcaggctagccgccctaccccagacgagctggaggcagtccgtaagtactttcagctcgacgtgacactggctcagctttatcaccactggggcagtgtggactctcacttccaagaggttgctcagaagtttcagggggtcaggctccttaggcaggatcctattgaatgtcttttttctttcatttgctctagtaataacaacattgctcgcattacaggaatggttgagagactgtgccaggcattcggccctcggttgatccaacttgatgatgtcacctatcacggatttccctctctgcaggccttagctggacctgaagtggaagcccacctgcggaagctcggattaggataccgcgcaagatatgtcagcgcttcagccagggccattctggaggaacaaggtggattagcctggctacaacaactgagggagtcttcttacgaagaggcgcacaaagcactgtgtatcctgcccggggtaggcactaaggtggctgattgcatctgccttatggctcttgataagccacaggccgtgccagtggacgtccacatgtggcacattgctcagagggattactcttggcaccccactacatcccaggctaagggtccatctccccagacaaacaaggagctcggaaacttcttccgttcactgtgggggccttacgctggatgggcacaggctgtctctgtgccccgctgtccaccttag

SEQ ID NO: 22688 - DNA, 594 bp, synthetic construct
  misc_feature 1..594: note = Description of Artificial Sequence: Synthetic coding sequence
  source 1..594: mol_type = other DNA
atggtggagcggctgtgccaggccttcggcccccggctgatccagctagacgatgttacataccacgggttcccctctctccaggctctggctggccccgaggtcgaagcccatttacgcaaactgggactaggatatagagccaggtacgtatccgcttctgcaagagccatcctggaagagcagggagggctggcctggttacaacagctgcgcgaatccagctatgaggaggctcacaaggccctgtgtattctccccggagtgggaaccaaagagactttttcaggcgcttgtggggacttgatgctggcggggcccaagcgatgctgcagtgtgcctacgtgcgcaaatcccgccatgttaagatcccaccagcaatccgcagagagggtcccaaaaggacgcaaagcacgctggggcactctggataaggagataccacaggcgccttctcccccatttccaacatctcttagcccatctccgccctccctgatgcttggacggggattacctgtcactacatctaaggcgagacacccccagatcaaacagagcgtgtgcaccacccgatggggaggagggtactag

SEQ ID NO: 22689 - DNA, 1038 bp, synthetic construct
  misc_feature 1..1038: note = Description of Artificial Sequence: Synthetic coding sequence
  source 1..1038: mol_type = other DNA
atgcccgcccgggccctgctgccccggcggatgggccaccggaccctggcatctactcctgctctgtgggcatctatcccctgtccgagaagtgaactgcgactagacctagtgcttcccagtggccagtcattccgttggcgggagcagtccccagcccattggagtggagtcttggcagatcaggtgtggacgctgactcaaaccgaggaacagctgcattgcacggtgtatcggggtgataagtcgcaggcaagcagaccaactcccgatgagctggaagctgtacgaaaatactttcaattggatgtcacactcgcccagctctaccatcattggggtagtgtggattctcattttcaggaagttgcccagaaattccagggggtgagacttcttagacaggacccaatagagtgcctgttttcgtttatctgttccagtaataacaacatcgcgcggattactggcatggtggagagactgtgtcaggctttcggtccaaggcttattcaattagatgacgtgacctatcatggctttcccagcctccaagcgctcgctggacctgaggtggaggcacatctgagaaagctgggtctaggttaccgggcacgatacgtaagtgcttccgcacgagcaattttagaggagcaaggcggactggcctggctgcagcagcttagagaatcctcatacgaagaggcgcacaaggcactatgcattttgccaggagtcggcacaaaggtggcagattgcatttgtctgatggccttggacaagcctcaggcagtccccgtggatgtccatatgtggcatattgcgcagagggattattcatggcaccccacaaccagccaggcaaaggggccgtcaccacagactaataaggaactgggtaatttcttccgcagtctctggggtccatacgcaggttgggcccaggcagtgctgttttcggctgacctgaggcagtcacgtcatgctcaagagcctcctgccaagcgccggaaagggtctaaggggccggaaggttag

SEQ ID NO: 22690 - DNA, 1074 bp, synthetic construct
  misc_feature 1..1074: note = Description of Artificial Sequence: Synthetic coding sequence
  source 1..1074: mol_type = other DNA
atgcccgcccgggccctgctgccccggcggatgggccaccggaccctggcatctacgcctgctctctgggcctctattccctgtcctcgatccgaactccgccttgaccttgtgctgccatctggacaatcgtttcgatggagagaacagagccccgcacactggagcggggtgctggctgatcaggtttggaccctgactcagacggaagagcagctgcactgtactgtctaccgtggcgataaatctcaggcaagcagacccacaccagacgaactagaagccgttcgcaagtatttccagctggacgtcacactcgctcaattataccaccactggggcagcgtggactctcactttcaggaggtggcacaaaagttccagggtgtacgactattgaggcaggaccctatcgagtgcctgtttagtttcatatgctcctcaaacaacaacattgctcggatcactggcatggttgaacggctgtgccaggcttttgggcctagactaattcagctggatgacgtaacctaccatggcttcccctcattgcaagctctggccggccccgaagtggaggctcatctgcgcaagctggggttgggttacagggccaggtacgtctcggcatcggctcgggcgattcttgaagagcagggcggcctggcctggctgcagcagctacgggaaagctcgtatgaggaggcgcacaaggcattatgcattttgcccggggttggtaccaaaggtctgctcggtaacgcctttgacggacatcaactactccgccccctgatattctgtcaagaccacctgagagagggcccaccaattggcagaggcgactcccaaggcgaggagcttgagccccagctgcccagttccttgtcctcgatcccttatggattttgcgatcattgttggacgaaggacgtagacgatccccccctggttactcacccctctcctggcagcagggatggccacatgacccaggcatggcctgtcaaggttgtcagtccgttggctactgtcataggccatgttatgcaggcgtccctcctggcactgtag

SEQ ID NO: 22691 - DNA, 588 bp, synthetic construct
  misc_feature 1..588: note = Description of Artificial Sequence: Synthetic coding sequence
  source 1..588: mol_type = other DNA
atgcccgcccgggccctgctgccccggcggatgggccaccggacccttgcttcaacgcccgccctctgggcatccattccctgtccacggtcggagcttcggcttgacttggttctgccatcaggccagtcatttcggtggagggaacaatcacccgcccattggagtggagtgctggcagaccaagtgtggacgcttacacagacagaggagcagctgcattgcactgtttaccgcggagataagtcccaggctagtaggcctacacccgacgaactggaagctgtccgaaagtacttccagctcgatgtaaccctggcccaactgtaccaccattgggggagcgtcgatagccactttcaagaagtggctcagaagtttcagggcgttcgactgctccggcaagacccaattgaatgcctgttctccttcatatgttcttccaacaacaacattgcccgtatcacggggatggtggagcgcctctgccaggcattcggaccccggctcattcaactggatgatgtgacctatcacggctttccttctctgcaggctctcgccgggccaccctggcagtgtatctag

SEQ ID NO: 22692 - DNA, 969 bp, synthetic construct
  misc_feature 1..969: note = Description of Artificial Sequence: Synthetic coding sequence
  source 1..969: mol_type = other DNA
atgcccgcccgggccctgctgccccggcggatgggccaccggaccctggcctcaaccccagcgttatgggcctctataccctgtccacgctctgaacttcgcctggatctcgtgctcccttctggtcagagctttagatggcgtgagcaatcaccagctcattggtccggcgtactggcagaccaggtgtggacccttacacagacggaagagcagctccactgcacagtctatcgaggggataagtcccaggcatcccggcccacaccagatgaactggaagctgtccggaaatactttcagctggacgttacactcgctcaattgtatcatcattggggctctgtggacagccacttccaggaggtagcacagaaattccagggagtgagactccttcgtcaggatcctattgaatgccttttttcatttatctgctcttccaacaacaacatcgccagaatcactggcatggtagaacgactttgccaggcctttggcccgcgattaattcagttagacgacgtgacatatcatggtttcccatccttgcaggccctcgctgggcccgaggtggaggcccacctgagaaagcttggacttggctatagagcccggtacgtgagcgcttcagccagggcgatcctggaggagcagggcggcctggcctggctccagcaactgagggagagctcatatgaggaggcacataaagcactgtgcattctgcctggggtcgggacaaaggttgcagattgcatatgtttgatggctctggataagccccaagctgtgccggtggatgtccatatgtggcatatcgcgcagcgcgattacagttggcaccccactacttcccaagccaaggggccttcccctcaaacaaacaaagaactaggaaatttcttccgctccctgtggggtccttatgccggatgggcgcaagctgccgggagcgacgccagttag

SEQ ID NO: 22693 - DNA, 6807 bp, synthetic construct
  misc_feature 1..6807: note = Description of Artificial Sequence: Synthetic coding sequence
  source 1..6807: mol_type = other DNA
atgagcggcctgcacctggtgaagcagggccgggaccggaagaagattgactcacaacgcgattttactgttgcttctcccgctgagttcgtcacgagatttggcggaaacaaagtcatcgaaaaggtcttgatcgcaaataatggcatcgcagccgtaaagtgtatgcgatccatccgtagatggtcatacgagatgttccgaaatgagagggcaattaggttcgtcgtaatggtcacccccgaggatctgaaagctaatgcagaatacataaaaatggcagaccattatgtaccagtgcctggcgggccaaacaataacaactacgcgaacgtggagcttatattagatatcgccaagcgcataccagtgcaagctgtctgggccggctggggccacgcttcagagaatcccaaactacccgagctgctacttaagaacggcatcgctttcatgggtccaccctctcaggcgatgtgggctctcggcgacaagatcgcatccagcattgtggcccagaccgcgggcatccctactctgccgtggagcggtagtggcctccgggtggattggcaggagaatgacttctcaaagagaattctgaacgtgccccaggagctatatgagaaagggtacgtgaaggacgttgacgacggactccaggcagcagaagaggtgggctacccagtaatgataaaggccagcgaaggagggggcggcaagggtattagaaaagtaaacaacgctgatgacttccccaatctgtttaggcaggtacaggcggaggttcccgggagccccatatttgtcatgcgactggccaagcagagccggcatctggaggttcagatcctagccgatcaatacggaaatgctatctccttgttcggccgcgattgtagcgttcagcgaaggcaccagaaaataattgaggaggccccagctactatcgccaccccagcggtctttgagcacatggagcaatgcgccgttaaactggccaagatggtgggatatgtctcagcaggcactgttgaatacctgtacagccaggacggcagcttctacttcttggagctgaacccgcgactgcaggtcgagcacccttgcactgagatggtggcggatgtgaacctacccgcggcacagctgcaaatcgcaatggggattccactgtatcggatcaaagacatcagaatgatgtacggagtcagcccctggggcgattcccccatcgatttcgaagattccgcacatgtgccatgcccaagggggcatgtcattgctgcacgcataactagcgaaaatccagacgagggtttcaagcctagtagcggcaccgtccaggagttgaattttaggtctaataaaaacgtgtggggctatttctccgtggccgctgccggaggcctgcatgagttcgcggattcccaattcggccactgtttcagctggggagagaatagagaagaagcgatcagcaatatggtagtcgctcttaaggaactgagtatacggggggatttcaggacaacggtcgaatacttgatcaagctgctggagaccgagagtttccagatgaacaggatagacaccggttggctggatcgcctaatcgccgaaaaggtccaggccgaaaggccagacacgatgcttggcgttgtgtgcggtgcactgcacgtggctgacgtatccttgagaaactctgtctctaactttcttcattctctggaacgcggccaagtgctgcccgcccatacattgctcaataccgtggacgtcgaattgatttatgagggcgtgaagtatgttcttaaggtgacccgccagagtccaaatagctacgtcgtgattatgaacggttcctgtgtcgaagtcgatgtgcaccgcctgtcagacgggggcttgcttctcagttacgacggcagctcctatacgacatacatgaaagaggaagtggatcgatacaggatcaccattggaaataaaacatgcgtgttcgaaaaggaaaacgatccttctgttatgagatcacccagcgccggtaagctgattcagtacatagtggaggacggaggccacgttttcgctgggcagtgctacgcagagatcgaagtcatgaagatggtgatgacgctgactgccgtcgagtccggatgcatccactacgtgaaaaggccgggagcagccctggatcccggatgcgtgctcgctaaaatgcaactggataacccttccaaagtgcagcaggctgagcttcatacgggctccctgccacgcatacagagcactgccctacggggcgaaaaattacaccgggtcttccactatgttttagacaacctggtgaatgttatgaatggatactgcctaccagatccatttttcagctccaaagtaaaggactgggtggaacggctcatgaaaacattaagagacccctctttgcccctactcgagttgcaagacataatgacttcagtgagcgggcgcattcctccgaatgttgagaagagcataaaaaaggaaatggctcagtacgcctccaatatcacctccgtgctgtgccagtttcccagccaacagatcgccaacattctcgattcccatgccgctacgttaaatcgcaaaagtgagagagaagtgttttttatgaatacccagagtatcgtccagttggtccagcggtaccggagcggtatccgcggccatatgaaggcagtggtaatggacttactgcgacaatacctcagggtggaaacccagtttcaaaacggccactacgataaatgtgtgtttgcactaagggaggaaaacaagtctgatatgaatacagttcttaattacatctttagccacgcccaagtgactaagaagaatctgctggttaccatgttaatcgaccagttgtgcgggagggatcctaccctgactgacgagttacttaacatcctgactgagctcactcagctctctaaaactaccaacgcgaaagttgcactcagagcaaggcaggtgcttattgcttcgcatctcccaagttatgagctcagacacaaccaggttgagtctattttcctgtccgccattgacatgtatggacaccaattctgcatagagaatcttcaaaaattgattttgtcagagacatcaatcttcgacgtgttgcccaatttcttctatcattccaaccaagtggtcagaatggcagctctggaagtctacgtgcggagggcttatatagcatacgaattgaacagtgtccaacaccgtcagctgaaagataacacatgcgtcgtggagtttcagttcatgctgcccactagtcatcccaacaggggtaacatacctaccctcaataggatgtcctttagttcgaacctgaaccactatggcatgacccacgtggctagcgtgtctgacgtacttctggacaactcttttacccctccatgtcaaagaatgggggggatggtgtctttccgcacctttgaagacttcgtcaggatctttgacgaagtcatgggctgcttttccgatagtcctcctcagtctccgacatttcccgaagccgggcacacaagcctttacgacgaagacaaagtgcctagggatgagcctatccacattttgaatgtcgccattaagactgactgcgacatcgaagatgaccgccttgctgctatgtttcgcgagttcacccagcagaataaagctactctggtcgaccacggtattaggaggctcacgttccttgtggcccagaaagatttcagaaaacaggttaactacgaggtggacaggcggttccatagggagtttcctaagttttttactttccgcgcgagggataaatttgaggaggatcggatctatcgtcaccttgagcccgcgctcgccttccagctggaacttaatcgtatgcggaattttgacctgactgcaataccatgtgccaaccacaagatgcatctgtatctgggcgcggctaaagtcgaagtggggacagaggttaccgattaccggttcttcgtcagggccataattaggcattctgatctggtcacaaaggaggcctccttcgagtatctgcagaatgagggcgagcgactacttctggaggccatggatgaactcgaagtcgcctttaataataccaacgtgcgcactgactgtaatcacatcttcttaaactttgttcccaccgttattatggatccgtctaagatcgaagaatctgtgaggtcaatggttatgcgttacgggtctcggctttggaaattaagagtgttgcaggcggagctgaagattaacattcgtctgacacctacaggtaaggctattccgattcgcctgttcctgacaaatgaatctgggtattacctggacatttctctgtacaaagaggttacagactcccgcactgcacagatcatgttccaagcttacggagacaagcaggggccgttacatgggatgctgattaatactccttacgtgaccaaggacctgctccagagcaagcggttccaggcacaatctctcggcacgacctatatctacgatattcctgaaatgtttagacagtcactgatcaaactgtgggagtctatgagtacgcaggctttcctcccgtcccctccacttccgagcgacatgctgacctatactgagctcgttctggacgaccagggccaactggtacatatgaatagactccctggtggaaacgaaatcgggatggtggcctggaagatgacgttcaagagcccagagtatcctgagggccgtgacatcatcgttatcggcaatgacatcacttaccggattggtagcttcgggccacaggaggacctcctatttttgagagcctctgagctggcaagggcagaaggcattcctagaatctacgtctcagcaaactcaggcgcacgaatcgggcttgcggaggagataagacacatgtttcatgtggcgtgggtggatcctgaagacccctataaaggatatcgttatctgtatctgactccacaggactacaaaagggtttcagccctgaacagtgtgcattgcgagcacgttgaagatgaaggagagagtcgatacaagattacagacattattggaaaagaggaaggaatcggtccggagaacctgcgcggctctggaatgattgcgggcgagtctagtcttgcctataatgaaatcatcacgatttccctcgtgacctgccgcgctatcggtatcggagcataccttgttaggctgggccagcgcactatccaagtggagaacagccatctcatcttgactggcgccggtgccttaaacaaggtcctgggaagagaggtgtatacctccaacaaccagctcgggggcattcagattatgcacaacaatggagtcacccactgtaccgtctgtgacgactttgagggagtctttaccgtcctgcactggctgagctacatgccaaagtctgttcactctagcgtgcccctcctcaactctaaagacccaatagatcgcattattgagtttgtaccaacgaagacgccatatgatcctcggtggatgttggcaggtagaccgcacccaactcagaaaggtcagtggctgagcggctttttcgactacgggagtttcagtgaaattatgcagccttgggcccagactgtcgtggtcgggcgagcgaggctcggcggaatccctgttggagttgtggccgtggagactagaacagtggaactatcaatccctgccgaccctgcgaacctggactccgaggcgaagatcatccaacaggccggtcaggtgtggtttcccgacagtgcctttaagacgtaccaagcaattaaagatttcaatcgcgaagggctccctttaatggtttttgctaactggcgcggcttttcaggagggatgaaagatatgtatgatcaggttctgaaattcggcgcgtacatagttgatggcctgagggagtgctgtcagccagtactggtttacatacccccccaggccgagctgaggggcggctcttgggttgtgattgacagctctatcaaccctagacatatggaaatgtacgcagatagggaatcaagaggttccgtgctggagccggagggcactgtggagatcaagttccgcaggaaggatttagttaagaccatgcgcagggttgatccagtgtacattcatctcgccgaacgtttgggaaccccagagttgtccaccgccgagagaaaggagctggagaacaagttgaaggagcgcgaagagttcctgatccccatataccaccaagttgccgtgcagttcgcagatcttcatgatacacccggccgtatgcaggaaaagggtgtcatctctgatatcctcgactggaaaaccagtaggacgttcttctattggcggcttaggagacttctgcttgaagatcttgtcaagaaaaaaattcacaatgctaatccggaactgactgatggtcaaattcaggccatgctccggcggtggtttgtcgaggtggagggaactgttaaggcatacgtctgggataataacaaagaccttgctgagtggctcgagaagcaactgacggaagaagacggtgtgcattctgtcattgaagagaatattaagtgcatctcacgcgattatgtgttgaaacagatacgatctctggtacaggcaaatccggaagtggccatggacagtatcattcacatgacacagcatatttcgcccactcaaagggccgaggtaattcggatcttgtctactatggacagcccgtctacctag

SEQ ID NO: 22694 - DNA, 7152 bp, synthetic construct
  misc_feature 1..7152: note = Description of Artificial Sequence: Synthetic coding sequence
  source 1..7152: mol_type = other DNA
atgtggtggagcaccctgatgagcatcctgcgggcccggagcttctggaaatggataagcacccaaacggtccggattattagggccgttcgggcacactttgggggaatcatggatgaaccatctcccttagctcagcctctggagctgaatcagcattctaggttcattattggcagcgtgagtgaagataactcagaagatgagatctcaaacctggtaaaactggaccttttggaggagaaagaggggagtctatcccctgcttccgtgggatctgacacactcagtgatttgggtatatcatctctgcaggacggcctcgcactgcatatccgttcttcaatgtccggtctgcatctggtgaaacagggccgggatagaaagaaaattgacagccaaagggacttcaccgtggcttcacccgctgaatttgttacccggtttggggggaacaaagtgattgagaaggtcctgatcgcaaacaatggcatcgccgctgtgaagtgcatgcgatcaatcaggagatggagttatgaaatgtttcgtaacgagcgggctatccgcttcgtggtcatggttacacctgaggacttaaaagccaatgccgagtacattaagatggcggaccattacgtgcccgtaccgggaggtccaaataataataattacgcaaacgtagaacttatcctggacattgcgaagcgcataccagtccaggcagtgtgggctggatggggacacgcatcagagaatcctaaactgccagaattgttactaaaaaatggaatcgccttcatgggtccaccgtcacaagccatgtgggctctcggagacaagattgctagttctattgtggcccagaccgcaggcatacccaccctgccctggtctggcagtggactccgggtcgattggcaggaaaacgatttttcaaagcgaatattaaatgttcctcaggagctgtacgagaaggggtacgtgaaagatgttgacgacggactgcaggccgccgaagaggtcgggtaccccgttatgataaaagccagtgagggcggcggaggaaaaggaatcaggaaggttaacaacgctgatgattttcctaatttgtttcgtcaggtgcaggcagaggttccgggaagtccaatatttgtgatgcggctggctaagcagtccaggcatctcgaggtacagatcctggcagatcagtacggcaacgctatcagtctctttggaagggactgctcagtgcagcggagacaccagaagattatagaggaggctcctgctaccatagctacacctgccgtgtttgagcacatggagcaatgtgccgtcaagctggctaaaatggttggatacgtctcggctggaaccgtggaatacctgtactctcaggacggctccttttacttcctggagctgaacccacggcttcaagtcgagcacccatgcacggagatggttgcggacgttaatctacctgccgcccagctgcagatagctatgggtatccccctgtatcggattaaggatataagaatgatgtacggcgtttctccttggggagactccccaattgatttcgaggactctgcccacgtgccctgtccgcgaggacacgtgatcgccgcacgaatcacatcggagaatccagatgaaggtttcaaaccttcctcaggcacagtgcaggagcttaatttccggtcgaataagaacgtgtggggctatttctccgtcgcagccgccggcgggctgcatgagttcgcagattcccagttcggtcattgctttagctggggggagaaccgcgaggaggcaatatccaatatggtagtggctctgaaagagttgtccatccgtggggacttccggacaaccgttgagtatcttataaagcttctagagacagagtcttttcagatgaatcgaatagacaccggttggctcgacaggctgatcgctgaaaaggtgcaggcagagcggcccgacacaatgctgggagttgtttgtggcgccttacacgtggccgatgtctccctgcgaaacagtgtgagcaacttcctgcactcccttgaaagaggtcaagtgctcccggctcacacactgctgaataccgttgacgtcgaactcatctacgagggagttaaatacgttcttaaagttactagacagtcccccaactcatacgtggtgattatgaatgggagctgtgtcgaggtggacgtgcacagactttcggacggggggctgctactctcctacgatggctccagctatacgacttacatgaaggaggaagttgatcgctaccgcattactataggaaacaagacttgcgtctttgaaaaagaaaatgatccatctgtgatgcgaagcccttctgcaggaaagttgatccagtacatcgtagaagatgggggacacgtattcgcaggacaatgctacgccgagattgaagttatgaagatggtgatgacgcttacagcagtcgagagcgggtgcatccactacgtcaagcgccccggcgctgctcttgatcccggctgcgtgcttgccaagatgcaactcgataatccttcaaaggtgcaacaagcagagttacataccgggtcactaccgaggattcagagcacagctctgaggggagagaaattacaccgagtattccattatgtccttgacaatctcgtgaacgtcatgaacggctactgcctccccgatccatttttttcctctaaggtcaaggactgggtggagcggttgatgaagaccctgagggatcccagtctccctctgttagaattgcaagatatcatgaccagtgtcagtggcaggattcccccaaacgtagagaaaagcatcaagaaggaaatggcacagtatgctagcaacatcacttccgttctctgtcagtttccctcccaacagatagctaacattctggattcccatgctgcaaccctaaataggaagtcggagcgggaagtgttcttcatgaatactcagtcaatcgtacagctagtgcagaggtaccgatccgggattagaggccatatgaaagcggtcgtgatggatctgctcaggcagtatctgagagtcgagactcagttccagaacggacactacgacaagtgcgtgttcgcattacgggaggagaacaaaagcgacatgaacactgtcctaaattacatcttttctcacgcacaggttacaaaaaaaaatttgcttgtgaccatgttaatcgaccagctttgtggacgcgacccgactctcaccgacgaactgctgaacattttgacggagctcactcagctcagcaagactacgaacgctaaggttgctctgcgagctcggcaggtcctaatagcctcccatcttcctagctacgaacttaggcacaaccaggtcgagtctatcttcttgagcgcgatcgacatgtatggccaccagttttgcattgagaacctccagaagctgattctcagtgagacaagtattttcgacgtgttgcctaactttttctaccactccaatcaggtggtgcgaatggcggcattagaggtatatgtccgtagggcttatattgcatatgaacttaatagtgtgcaacaccgccagctgaaggataatacatgtgttgtggaattccagttcatgctgcctacctcccatcccaatcgcggcaacattcccacattaaacaggatgagcttttcaagcaatctgaatcactacgggatgacccacgttgcgtccgtaagtgacgttttgctcgacaatagcttcaccccaccttgtcagcgtatgggcggtatggtgtccttccggaccttcgaggactttgtccgtatcttcgatgaagttatgggctgcttttcagactcccctcctcagtctccaacatttccagaagctggccatacgtcattgtacgacgaagacaaggtcccacgggacgagccaattcacatcttaaacgttgcaattaagaccgattgcgatatagaggatgatcgactcgccgcaatgttccgagagtttacgcaacagaataaagctacactcgtggaccatgggatacggaggcttacatttctggtggcacagaaggactttaggaaacaggtgaactacgaggtcgatcgacggtttcacagagagtttccaaaatttttcacgtttcgagcacgagacaagttcgaggaggacaggatttatcggcacctggagcccgcactggcttttcaactagaactgaatcgcatgcggaattttgaccttacggctatcccctgtgctaaccacaagatgcacctctatctgggcgctgcaaaggttgaagtgggaactgaagttaccgattacagatttttcgtcagggctataattcggcatagcgatctcgtgaccaaggaagccagcttcgaatacttgcagaatgaaggggagcggttactgctcgaggcaatggacgaactggaggtggccttcaataatacaaacgtgcgcactgactgtaatcatatcttcctgaacttcgtccccaccgtaatcatggatcctagcaagattgaagaaagcgtcaggtcaatggtgatgagatatggttcaaggttatggaagcttagagtcctccaggccgaactgaagatcaatattagactgacacccacgggcaaggccatccctattaggctgttcctgaccaatgagagcgggtactacttagatatcagtctgtacaaagaggtcacggatagcagaactgctcagatcatgtttcaggcatacggggacaagcaggggcctcttcatgggatgctcatcaacaccccatacgttaccaaggacctcttgcagagcaagagattccaggcacagtcacttggtaccacctacatctacgacatccccgaaatgtttaggcaatcattaatcaaactgtgggaatctatgtcaacgcaggctttcctgccatctcccccccttccctcggatatgctcacctatactgaacttgttctcgacgaccagggccagttagtgcatatgaatcgactgcctgggggcaacgagatcgggatggtggcatggaaaatgacatttaaatcccccgaatatcccgaaggccgagatattattgtcattggcaacgacataacataccgtatcggatcattcggccctcaggaggacttgctttttctacgggccagtgagcttgccagggcagagggaatacctagaatctacgtaagtgcgaacagcggggctaggattggcttagcagaggaaattagacacatgttccatgtggcgtgggtggatcccgaagatccgtacaaagggtatcggtatctatacctaaccccacaggattataagcgggtttctgcattgaacagtgtccactgcgagcacgttgaggacgaaggggaaagccgctataaaataaccgatatcatcggtaaagaggagggaattggccctgagaacctgagaggatccggcatgattgccggcgagtctagccttgcctacaatgagattattacaatctctctggtcacgtgcagagcaattggaataggggcttacctggtccgccttggacagcggacaattcaggtagaaaatagtcacctcatcctgacgggcgccggggctcttaacaaagttttggggagagaagtgtataccagcaataatcagctgggtgggatccagattatgcacaataatggagtgacgcactgcaccgtgtgtgatgactttgagggggtcttcacggtcctgcattggctttcctacatgccaaaatccgtccactcttctgtgcctctccttaacagcaaagatcctatcgaccgtatcattgagtttgtgccaacaaagactccttatgaccctcgatggatgctggccgggagaccccaccctacgcagaaaggtcagtggttgtccgggttctttgattatgggagcttttctgagattatgcaaccctgggcgcagacggtcgtggtcggtagggcccgactgggcggtattcctgtgggcgtggtcgccgtggaaacccgaactgtagaattaagcatacctgctgacccagccaacctcgacagtgaggcaaagataatccagcaggccggtcaggtctggttccccgacagcgctttcaagacctatcaggccattaaggattttaaccgagaagggctgccactgatggtgttcgcaaattggcgtggctttagtggtggaatgaaagatatgtatgaccaggtacttaagtttggagcttacatagtggacggcttgagggagtgctgtcagccggtgctcgtctacattcctcctcaggccgagttacgcggcggaagctgggtggtaatcgatagtagcataaacccaaggcacatggagatgtatgctgatagagagagcagagggtccgtcctcgagcctgaaggtacagttgagattaagttcagaaggaaagacctggtgaagactatgcggcgagttgaccctgtctacatccatctggccgaacgcttggggacccccgaactgagcaccgccgaacgaaaagagctggagaacaaactgaaggagagggaagagtttttaattcctatataccaccaggtggcggtacagttcgctgacttacatgataccccagggcgaatgcaggagaaaggtgtcattagcgacattcttgattggaaaacgtctagaacctttttctactggcggctgagacggcttctcttagaggatctcgttaaaaagaagattcataacgccaatcccgagctgacagatgggcagatccaggccatgctgcgaagatggttcgtcgaagtggaagggactgtgaaagcgtatgtctgggataataacaaagacctggcagagtggctcgaaaagcagcttaccgaggaagacggagtgcatagtgtaattgaggagaatatcaaatgtattagcagggactacgtccttaaacaaattcgaagcctggtgcaggcaaacccagaggtcgccatggacagcatcattcatatgacccagcatatttctccaacccagcgagcggaggttattaggatcctatcaactatggactctccgtctacctag

SEQ ID NO: 22695 - DNA, 6867 bp, synthetic construct
  misc_feature 1..6867: note = Description of Artificial Sequence: Synthetic coding sequence
  source 1..6867: mol_type = other DNA
atggagggcagccccgaggagaacaaggagatgcggtactacatgttgcaacgaagctctatgagtggactacacctggtaaaacaaggccgcgatagaaaaaaaatcgactcccagagagatttcactgttgcttcgcccgcagaattcgtcactcggttcggaggcaacaaagttatcgagaaagtgctgatcgcaaataatggaatcgcagctgtgaaatgtatgaggagtattcgccgctggtcatatgaaatgtttcggaatgagagagccattcgcttcgtggtaatggtgacacctgaggacctcaaggcaaacgcagagtacatcaagatggcggaccactatgtacctgtgcctggtgggccaaataataacaattacgctaacgtggagctgatattggacatcgccaagcgcataccagtccaggctgtctgggctgggtggggccatgcttccgagaatccaaagctccctgagctccttctgaaaaacggcatcgcattcatgggcccaccatcacaggcaatgtgggccctgggagacaaaatcgctagctcgattgtagcgcagaccgccggtattccaacgctgccctggagtggatctggtttacgggtagattggcaggagaatgatttttccaagaggatcctgaatgtcccacaagaactgtacgaaaaagggtatgtaaaggacgttgatgatgggctgcaagcagctgaggaggtaggctacccggtcatgattaaagcctcagagggtggtggcggcaaggggattcgcaaggtcaacaatgcagacgactttcccaatctttttaggcaggtgcaggccgaggtacccggatcacctattttcgtgatgcgcctggcaaaacagtcccgccatcttgaagtgcaaatcttggccgaccagtacggtaatgcgataagcctgttcggccgggattgctccgttcagagacggcaccagaaaatcatcgaagaagcccccgctaccatcgcaacacccgctgtgttcgaacatatggagcagtgtgccgttaagcttgccaaaatggtaggctacgtgtctgccggcactgtcgaatatctttattctcaagatggcagcttttatttcctggagctcaaccctagactgcaggttgagcacccttgcacagagatggtggccgatgttaatttgcctgctgcccaacttcaaatcgccatgggcattcctctatatcggatcaaagacatccgcatgatgtatggcgtctccccatggggggactctccaattgatttcgaggactctgcgcacgtgccctgccccagagggcacgtgattgcagcaaggatcactagcgagaatcccgacgaagggttcaagcctagcagtggaacagtgcaggaactgaattttaggtcaaacaagaatgtttggggatatttctctgtggccgctgccggtggccttcacgagttcgcggattcacagtttggtcactgtttctcctggggcgaaaaccgtgaggaagcaattagcaacatggtagttgccctgaaggagctgagtattcgcggggactttaggactacagtggaatatttaattaagctgctggaaactgagtcttttcaaatgaaccggatagacaccgggtggcttgatcgccttatcgcagagaaggtgcaggccgaacggccggacacgatgcttggggtggtttgcggcgctttgcatgtcgccgacgtaagcctgagaaactctgtgtccaacttcctgcatagtctggagcgtggccaagtgctgcccgcccacaccttacttaatacagttgacgtcgagcttatctacgaaggggtgaagtacgttcttaaggtgacacgccagtctccaaattcctatgtcgtgatcatgaacggcagttgcgtggaagttgatgtacacaggcttagcgatggcggattgctcctttcctatgatggcagctcctatacgacatacatgaaagaagaagtggaccggtatcgtataaccattgggaataagacatgtgtgttcgaaaaagagaacgaccctagtgtgatgagatctccctcagcaggcaaactgatccagtatattgttgaagatggaggacatgtgttcgccggacagtgctatgctgagattgaggttatgaaaatggtgatgactctcaccgccgtggagtccggctgtatacactatgtgaagaggccaggagctgctcttgatcccggctgcgttctggcaaagatgcagctggataatccatccaaagttcagcaggcagagctccataccgggtccctgccccgcatacagagtacagccctccgcggtgagaaactgcatcgagtctttcattacgtgctggataatctggtcaatgtgatgaacggatattgcctgcccgatccattcttctcctccaaagtgaaggattgggtcgagcgcctcatgaagactctgagagaccccagcctgcccctgttggagctgcaagatatcatgacttctgtgtccggaagaatcccaccaaacgttgagaagtccattaagaaagaaatggcccagtacgcaagcaacatcacttccgtgttgtgtcagtttccgagccagcagatcgccaacattctggactctcatgcagccacactcaatcggaaaagtgagagggaggtgtttttcatgaatacccagtctatcgttcagctagttcagcgatatagaagcggaattagaggccatatgaaagctgtggtgatggatctcctccggcagtacctaagagtggaaacacagttccagaatggacactacgacaagtgcgtctttgccttgagagaggaaaacaaatccgacatgaacaccgttcttaattacatctttagtcatgcacaggtcactaaaaagaacctcctagtcaccatgctcatcgatcagctgtgtggtagggacccgacactgactgatgagctgttaaacatactcactgaactgacccaactgtctaagaccaccaatgccaaggtcgctttgcgcgcaaggcaggtgcttatcgcctcccacctgccaagttatgagctgaggcacaaccaggtggagagcatttttctctccgctatcgatatgtacggtcaccaattctgtattgaaaacctgcagaagctaatcctgagtgaaacatccatttttgatgttctgcccaatttcttttaccatagcaaccaagttgtgcgtatggccgctctcgaggtgtacgtgaggagagcatacatcgcatatgaattgaacagtgtccagcatagacagttgaaggataacacatgcgtcgttgaatttcaattcatgctgccaaccagtcatcctaaccgtgggaacatccccacactcaaccgcatgagcttctcgagtaatctgaaccattatggaatgacacacgtggcgtcagttagcgatgttctccttgataactcttttacacctccttgccagcgcatgggaggtatggtgagctttaggactttcgaagacttcgtgaggatctttgatgaggtcatgggatgcttttccgattcgccaccccagagtccaactttccccgaggcaggtcacacatccctgtatgacgaggataaagtccctagggacgagccaatccatattctgaatgtcgcaatcaaaaccgattgtgatattgaggatgacagactcgccgctatgttccgagagtttacgcaacagaacaaagccactctggtggaccacggcatccggcgcctgacctttttggtggcacagaaggactttcgtaaacaagttaattatgaagtggaccggcggttccaccgcgagttccctaagtttttcaccttccgggctcgtgataagttcgaagaggatcggatctatcggcacctggagcctgcactggccttccagctggagttaaatcggatgagaaattttgatctcaccgctataccatgcgctaatcacaaaatgcatctgtacctaggggccgcaaaagtggaggttgggactgaggtcaccgactacagattcttcgtacgagccatcatacgccattccgacctcgtcaccaaggaagcaagctttgagtatctgcagaatgagggtgaaaggctgcttctggaggccatggacgaacttgaggtggcattcaacaatacgaatgttcgaacagactgtaatcacatttttctgaattttgtgccgaccgtcattatggacccatcaaagattgaagagagtgttcgctctatggtgatgcgctacggcagccgtctgtggaaacttcgcgtcttgcaggcagaactaaagattaacattagactcacacctaccggaaaggctatccccattaggctgttcttgacaaacgaatcagggtactacctggacatttccctgtacaaagaagttacagattctaggaccgcgcagatcatgtttcaggcatatggcgataagcagggcccgctccatgggatgttgattaacacaccctatgtaaccaaggacctccttcaatccaagaggttccaagcccagtccctgggaaccacctacatctacgacatacccgagatgtttcgacagtcactgatcaaactgtgggaatcaatgtctacacaggccttcctgccgtccccgcccctcccctcggacatgctgacttacacggagctggtgctggacgaccagggccagctcgtgcacatgaatcgcctgccaggcggtaacgaaatcggcatggttgcttggaaaatgacatttaagtctccagagtacccagaggggcgtgatatcatcgtgatcggcaatgacattacttatcggataggctcgttcggtcctcaagaggatttgctctttctgagagcgtccgaactggccagagccgaggggattccacgcatatacgtgtctgccaatagtggagcaaggatcgggcttgcagaggagattagacacatgttccacgtcgcgtgggtggatcctgaagacccatacaagggataccggtacctttacttgacccctcaagattacaagcgtgtctcagcgcttaatagcgtacattgtgaacacgtcgaggacgagggcgagtcgcgttacaagatcaccgacatcattgggaaggaagaaggcataggccccgagaacctccgcgggagcgggatgatcgccggcgaatccagcctagcgtataacgagatcatcaccataagtctggtcacctgtcgagctataggaatcggagcgtatttggttcgcctaggacagcggaccatccaggtggaaaactctcacctgattctgactggggcgggggctctcaacaaggttctcggacgggaagtgtatactagtaataatcagctcggcggtatccagatcatgcacaataacggtgttacacactgcaccgtatgcgatgattttgagggggttttcaccgtcctgcactggctgagctacatgccaaagtctgtgcatagtagtgtgcccctgctaaattctaaggatccaatcgaccgcatcatcgaattcgtccccaccaaaaccccctacgacccccgatggatgcttgcagggagacctcacccaacccagaaggggcaatggctctccggcttcttcgattacggatcattcagcgaaatcatgcagccctgggcccagactgtagttgtgggaagagcacggctgggtggtatccccgtcggagttgtcgccgtagaaaccaggacagttgaactgtccatcccagctgacccagccaacctggacagtgaggctaaaatcatccagcaggcgggacaggtttggttccctgattctgcttttaagacctaccaggcaattaaggacttcaaccgggaggggctgccgctgatggtgttcgccaactggagggggttcagtgggggcatgaaggacatgtacgaccaggtgctcaagttcggagcctacatcgtcgatggtctgcgggaatgctgccagcctgtcctggtgtacattcccccccaggccgaactgaggggtggatcatgggtggtgattgactcttcgataaacccgcggcatatggaaatgtacgccgatcgggagtcaaggggcagcgtcctggaacccgaaggcacagtcgagataaagttccgacggaaggatttggtcaaaactatgcgccgcgtagatccagtctatattcacctcgccgagcggctcggaaccccagagctctccactgctgaaagaaaagaactggagaacaagcttaaggagcgcgaagagtttctcatcccaatctaccaccaggtcgctgtgcagttcgccgatcttcacgatacacccggacgcatgcaggaaaagggggtgatctctgatatactcgactggaaaacaagcaggacatttttttattggcggctgcgacgtctgctgctcgaggaccttgtgaagaagaagattcacaacgcaaacccggagcttacagatgggcagatccaagcgatgctgcggcggtggttcgtcgaagttgaagggactgtgaaagcttacgtctgggataataataaagacctagcggaatggctggagaagcagttaacggaggaagatggtgtccactctgttattgaggagaacattaaatgcatcagcagggactacgtgctgaaacaaataaggagcttggtgcaggccaatccagaagtggcgatggacagtatcatccacatgactcagcacatttctcccacgcagagggccgaggttatccggatcttgtcgactatggatagcccttctacatag

SEQ ID NO: 22696 - DNA, 1419 bp, synthetic construct
  misc_feature 1..1419: note = Description of Artificial Sequence: Synthetic coding sequence
  source 1..1419: mol_type = other DNA
atgcacaacaacggcgtgacccactgcaccgtgtgcgacgacttcgagggcgtattcacagtgctccactggcttagctatatgcccaagagcgtacacagttccgtgcctctgcttaacagtaaagatccaatcgaccgcataattgagtttgtgccaactaaaacaccatacgatccccggtggatgctggccggtaggccccatcctacacagaaggggcaatggctttctggattctttgactacggatctttcagcgagatcatgcagccctgggctcaaacggttgtggtcgggcgggctaggctgggcgggatcccggtgggcgtcgtagcggtggaaaccaggaccgtggagctatcgatcccagctgacccggcaaatctcgactcggaggccaagattattcaacaggcgggacaggtttggttccccgattcagcattcaagacttaccaagccatcaaagactttaaccgggagggcttgccactcatggtattcgccaattggaggggctttagcgggggcatgaaagacatgtacgaccaggtactgaaatttggggcatacattgtggacgggcttcgagagtgctgtcagccagtgctcgtgtatatccctccccaggccgagctacgcggagggtcatgggtcgtcatagattcatctattaacccaaggcacatggagatgtacgccgacagagagtcccgaggatctgtgttagagcctgaggggacagtggagatcaagttccggagaaaagaccttgtgaaaacaatgcgcagagttgatccagtgtatatccacttggcagaaagactggggacccctgagctgagcactgccgaacgcaaggagctggagaataaacttaaggaacgagaagaattcttgattcccatctatcatcaagtagctgttcaattcgccgacctgcacgacactcccggccggatgcaagagaaaggcgtgattagtgacattctggactggaagaccagcagaaccttcttttactggaggttgcgccggttgctcctggaggacctggtgaaaaagaaaattcacaacgccaatcctgagctaacggacggacagatccaggctatgctgcggcggtggtttgtggaagtggaagggaccgttaaagcatatgtctgggacaacaacaaggacctagccgagtggcttgaaaagcagctgacagaagaggatggcgtgcactcagtgatagaggagaatatcaaatgcattagtagggattacgtcctcaaacagatccgctcattggtacaggcaaatcctgaggtggccatggactctatcatacatatgacacaacatatttcccccactcaaagggcagaagtgattcgtatattgagcacaatggactcccctagcacctag

SEQ ID NO: 22697 - DNA, 129 bp, synthetic construct
  misc_feature 1..129: note = Description of Artificial Sequence: Synthetic coding sequence
  source 1..129: mol_type = other DNA
atgagcggcctgcacctggtgaagcagggccgggaccggaagaagattgacagtcagcgggattttaccgtggcttccccggctgaatttgtgactagattcggagggaacaaggtgatagagaagtag

SEQ ID NO: 22698 - DNA, 7041 bp, synthetic construct
  misc_feature 1..7041: note = Description of Artificial Sequence: Synthetic coding sequence
  source 1..7041: mol_type = other DNA
atggacgagcccagccccctggcccagcccctggagctgaaccagcactcgcgctttatcatcgggtccgttagcgaggataactccgaagacgagatttctaacctcgtgaaacttgatttgctcgaagagaaagagggatccctgagccctgctagtgtgggctctgataccttgtcagacttgggcatctccagcctccaggatgggttggccctgcacatccgcagtagtatgtccggactccacctggtcaaacagggcagagatcgaaaaaaaatcgattcccagcgggattttacagttgcttcgccagctgagtttgtcacgcgattcggtggcaataaggttatcgagaaggtgctgattgccaataacggcatcgccgccgtgaagtgcatgcggtccatccgacgatggtcatacgagatgttcaggaacgagcgggcaatccggtttgttgttatggtgacgcccgaagacctgaaagctaatgcagagtatatcaagatggctgaccactacgtcccagtgccaggtggacccaacaacaataactacgccaacgttgagctaattctagatattgcgaaacgcatccccgtacaggccgtgtgggctggttgggggcacgcaagcgagaaccccaagctccctgagctcttgctgaaaaatggaatcgcctttatgggtcctccttcacaagccatgtgggcgctgggcgacaagattgcatcttccatcgttgcgcagacggctggcatccctaccctcccatggtccgggagcggtctaagagtggattggcaagaaaatgatttcagcaaaagaattctgaacgtgccccaggaactgtacgagaagggctacgtcaaggatgttgatgacggtctccaggctgcagaggaggtgggctaccccgtgatgattaaagcaagtgagggcggcgggggcaagggtatcaggaaggtgaataacgcagatgactttcccaacctgttcaggcaggtacaggccgaggtgccggggagcccaatctttgtgatgagactggcaaagcagagcagacatctggaggttcaaattctggcggaccagtacggcaacgccatttcactctttggtcgcgactgctccgtgcaaagacggcaccagaaaatcattgaagaggcgcctgcaacaattgccacacccgctgtgttcgagcacatggaacagtgcgcggttaagctggccaagatggtcggctacgtgtctgctggaactgtggagtacctttacagtcaagacggctccttttacttcctggaactgaacccaaggctccaggtagagcacccttgtaccgaaatggtggctgacgttaatctgcctgcagcacaactgcaaatcgctatgggtatccctctataccgaattaaggacataaggatgatgtacggggtgtccccctggggtgattctcccatcgacttcgaggattctgcacacgttccctgccccagagggcacgtgattgccgcaaggattacatccgagaaccctgatgagggcttcaaaccatcgagtggcaccgtccaggagttaaatttccgtagcaataagaatgtctgggggtatttcagcgtcgctgccgcggggggtctacatgagttcgctgattcacagttcggacactgtttcagctggggagagaaccgggaagaagctatctcaaatatggtcgtagctctgaaggaactgagcatccgtggcgactttcgtaccacggtggagtaccttatcaagctgctggagaccgaaagtttccaaatgaaccgcattgatacaggctggcttgaccgcctgatcgcagaaaaagtgcaggccgaacgccccgacacaatgctgggggtagtgtgcggcgctctccatgtggcagacgtgtctcttagaaattcagtgtctaacttcctgcactccttggagcggggtcaagtgctcccggcccacaccctgttaaacaccgtcgatgtggaactgatctacgagggcgtgaaatacgtcctgaaagtcacaaggcaaagccccaacagttacgtagttataatgaacggttcctgcgtggaggtagacgtgcaccggctctctgatggtggtcttttactgagctatgatggatcatcctatactacgtacatgaaagaggaggtcgatcggtaccgtattacgatcggaaacaagacctgtgtattcgagaaggaaaatgatccttcggtcatgcgcagcccatccgccggaaagttaatacagtatatcgttgaggacggaggccacgtgttcgcaggccagtgttacgccgagatcgaagtaatgaagatggtgatgacactcaccgctgttgaatctggatgcattcactatgtaaagcgccccggagccgccctggatccagggtgtgtcttggccaaaatgcagctcgacaacccttccaaagtgcagcaagcggagctgcacacaggctctttgccccggatccagagcaccgccctaagaggcgagaaactgcaccgcgtattccactacgtactcgacaacctagtgaacgtcatgaacgggtactgcctgccagacccttttttttcctccaaggtgaaagactgggtagagaggctgatgaaaaccctgagagacccgtctctgcctcttctggagcttcaggacataatgacgtcagtttcagggcgcattcccccgaatgtggagaaatccattaagaaggagatggctcagtacgcgtcaaatatcaccagcgtgctgtgccaattcccatcccagcagatcgccaacatacttgacagccatgctgcaacactcaatcgtaagagtgaaagggaagttttctttatgaatacgcagtccatcgtccagttggtgcagcgttatcgtagcgggatcaggggacacatgaaagccgtggttatggatctgctgaggcagtacctgcgcgttgagacacaatttcaaaatgggcactatgacaagtgcgtgttcgcccttcgcgaggagaacaaaagcgatatgaataccgtgctgaattatatctttagccatgcccaggtaacaaagaagaacttgctggtaacaatgctgattgaccagctttgtggccgcgatcccacgctcaccgatgagctgctgaacatcctgaccgagctgactcagttatctaagacaaccaacgcgaaagtggcactccgggctcgacaggtcctgattgccagccacctgccttcctacgagttgcgccacaatcaagtggaatcaatcttcctgagtgcaatcgacatgtatgggcaccagttttgcatagagaacctgcaaaagttaatcttgagtgaaacgtcgatattcgacgtgctgccaaactttttttaccacagtaatcaggtggtgcgaatggcagccttagaagtttacgttcgtcgtgcctatattgcctacgagcttaatagcgtccaacacagacagctcaaggacaacacctgtgtggtcgaatttcagtttatgctgccgacctcccacccgaacagaggcaacattcctactctgaacaggatgtccttctcatcaaatctgaaccactacggcatgacacacgtcgcgtccgtgagtgatgtcctactcgataatagtttcacaccgccctgccagcgaatgggagggatggtgtcttttagaaccttcgaggactttgttcggatcttcgacgaggttatgggttgtttctccgatagccccccccagtcccctacgttcccggaagcaggacataccagcctctacgatgaagacaaagttccaagagatgagcctattcacatcctgaacgtcgcaattaagacggactgcgatatcgaagatgataggctcgcggctatgtttcgtgagtttacacaacagaacaaggccacactggttgatcacgggattcgaagactgacctttctagtagcacagaaagattttcgaaaacaggtgaactacgaggtcgaccgccgttttcaccgggaattccctaagttcttcacgtttcgcgccagagataaatttgaggaggaccggatttaccgtcatttagagcccgcactcgcatttcagttagagttgaacagaatgcgaaattttgatttaacagcaataccgtgcgccaatcacaaaatgcatttatacctcggagcagctaaagtagaagtggggaccgaggtcactgattatcgctttttcgtacgggctatcataagacacagcgacctggtcaccaaggaggccagcttcgagtacttgcaaaacgaaggggaacgcctgctcctggaggcaatggacgagcttgaggtcgcattcaataacaccaacgtccgcacagactgtaaccatattttcctcaatttcgtgcctactgttattatggatccatctaagattgaggagtctgtgcggtctatggtcatgaggtatggatcacgcctctggaagctaagggtcttgcaggctgaattgaaaattaacattagactgaccccaacagggaaagccatcccaattcggctgttcctaacaaacgaatcaggatattacctcgatatcagcttgtacaaggaagtcaccgatagccgtacagcgcagattatgttccaagcgtatggagataagcagggccctctgcatggcatgctgatcaatacaccctatgttaccaaagacctgcttcagtctaaaaggttccaggcacaatccttgggaaccacctacatctatgacattcccgagatgttccgtcagtctctcataaagttatgggagagcatgtctacacaggcattcctgcctagcccccctttgccatccgacatgctcacctatacagagctcgtgctcgacgaccaaggccagctggtgcacatgaaccgtctcccagggggcaatgaaattggtatggtcgcgtggaagatgaccttcaagtcaccggaatatcccgaggggcgggacattatcgtcatcgggaacgacatcacctatagaatcgggagtttcggaccccaggaagacctgttgtttttacgcgcttcagagttagctagggcagaggggatcccccggatctatgtgtccgccaatagtggtgcaagaatcggcctggctgaggagataagacatatgtttcacgttgcgtgggtggatcctgaagatccctataagggttatcgctacctatatctaaccccgcaggactataaaagagtgagtgctctcaactctgttcactgcgagcatgtggaagacgaaggcgaaagcaggtataagatcaccgatatcatcggcaaggaggaaggtattggccccgagaaccttagaggtagcgggatgatcgcgggggaatctagtttggcctataatgagatcatcacaatctcccttgttacttgtcgtgccatcggaattggagcgtatctggtccgtctcggccagaggaccattcaggttgagaactctcacctgattctgaccggtgctggagcccttaacaaggttctgggtagggaggtgtacacatcaaacaaccagctaggagggatacagatcatgcataataatggcgtgacacattgtacagtctgcgatgattttgagggcgtgtttaccgtgctgcattggctgtcttacatgccaaaatcagttcacagtagcgttcccctcctgaattccaaggaccccatcgataggatcattgagtttgtgcctacaaagactccttacgacccacggtggatgctcgcaggccgcccccacccaactcagaagggacagtggctgtcgggtttttttgattatgggagcttttccgagatcatgcagccatgggcccaaacagtggtggtggggcgggcacgcctgggaggaatacccgtcggggtcgtggctgtggagacaagaacggtcgaactcagtatacccgcagacccggcaaaccttgattccgaagctaaaattattcaacaggccgggcaggtctggttcccagacagcgcctttaaaacctaccaggccattaaggatttcaatagagaagggttgcctctgatggtgtttgccaattggcggggattttccggcggtatgaaggacatgtacgaccaggtgttgaaatttggggcatatatagtggacggtctgagagagtgttgtcaacccgtccttgtctatatcccgcctcaggctgagctacgtggcggatcttgggtcgttatcgacagctccatcaatcctaggcacatggaaatgtatgctgatcgcgagagcagaggctccgtattggagcccgaagggaccgtcgaaatcaagtttaggcgcaaagatctagtcaagactatgcgccgggtggacccggtctatattcatttggccgagagactgggcacgcctgagttatcaactgctgaacgtaaagaactggagaataagctgaaggaaagagaggaatttctgattccaatctatcaccaggtggcagttcagtttgctgatctgcacgatacacctgggaggatgcaggaaaaaggagtgatctcggatatcctggattggaagacttccagaacatttttctattggcgacttcgccgcctgcttctcgaagatctcgtgaagaaaaagatacataatgcgaatcccgagctaacagatggacaaatccaggcaatgctgagaaggtggttcgtggaggtggaggggacagtgaaggcttatgtgtgggacaacaacaaggacctggctgaatggctcgagaagcagctaaccgaagaagatggggtgcattcagttatcgaggagaacattaagtgtattagtagagattatgtcttaaagcagattcgcagtttagtacaggcaaacccagaggtagccatggattccatcatccatatgacccaacatatttctcctacccagcgggccgaagttattcgtatactgtcaacaatggactcgcctagcacgtag

SEQ ID NO: 22699 - DNA, 129 bp, synthetic construct
  misc_feature 1..129: note = Description of Artificial Sequence: Synthetic coding sequence
  source 1..129: mol_type = other DNA
atgagcggcctgcacctggtgaagcagggccgggaccggaagaagatcgatagtcaacgggacttcacagtagcaagcccagccgagtttgtcactagatttggtggaaacaaagtgattgaaaaatag

SEQ ID NO: 22700 - DNA, 234 bp, synthetic construct
  misc_feature 1..234: note = Description of Artificial Sequence: Synthetic coding sequence
  source 1..234: mol_type = other DNA
atggacgagcccagccccctggcccagcccctggagctgaaccagcactcacggtttattatcgggtccgtgtctgaggacaactccgaggatgagatctctaacctggtcaaactcgatctgcttgaggaaaaggaggggagtctcagtcccgcctcagtgggctccgatactctgtctgatctgggcatctcttcccttcaggatggactagctctgcacattcgtctgtag

SEQ ID NO: 22701 - DNA, 3138 bp, synthetic construct
  misc_feature 1..3138: note = Description of Artificial Sequence: Synthetic coding sequence
  source 1..3138: mol_type = other DNA
atgggctgcttcagcgacagccccccccagagccccaccttccccgaggcgggccacacttctctgtacgatgaagacaaggttcctagggacgaacccattcacattttgaatgttgctataaaaacagattgtgacatagaggatgaccgcctcgctgctatgttcagagagtttacccagcagaacaaagcaaccctggtcgatcatggcattcgaagactgacctttctggtcgcccaaaaagattttagaaagcaggttaactacgaagtggacaggaggttccatagggagttccctaagttctttacatttcgcgcccgggataaatttgaggaagaccgaatatatcgacatcttgaacctgctttggcctttcagttggagctgaacagaatgcggaatttcgatctaaccgccataccttgcgctaatcataagatgcacctatacctcggcgccgctaaggttgaagtgggcaccgaggttacagattaccgcttcttcgtgcgggccatcatcagacacagcgatctcgttacgaaggaggcttcattcgagtacctgcagaatgaaggcgagcggctacttctcgaagccatggatgagctggaagtagcctttaacaacactaacgtccggactgactgcaaccacattttcttaaacttcgtaccaacagtgattatggacccttctaaaattgaggaatctgtgcgttcaatggtgatgcgctatggctcgaggctttggaagctgagggtgttgcaagctgaactgaagattaacatccgccttactccaactggcaaggctatccctatccgactcttcttgactaacgaatcaggctattaccttgacatttccctgtacaaggaagtgaccgacagccgcacagcccagatcatgtttcaggcttacggggataagcagggcccgctccatggtatgctgatcaatacaccctatgtcaccaaggatctgttacagtccaagaggttccaggcacaaagcttgggaactacctatatatacgacatcccagaaatgttcaggcagatcggaatggtggcctggaaaatgacctttaaaagcccagaataccctgaagggagagacattatagtcatcggcaatgatatcacataccggataggctcatttggaccacaggaggacctcctgttcctgcgcgcgtctgaattggcccgggctgagggaataccccgcatctacgtctctgctaactcaggggcccgcattggcctggcggaggaaataagacatatgttccacgtggcttgggtcgaccctgaagatccctataagggataccggtacctttatctgactccacaggactacaaaagagtgtccgccttaaatagcgtgcattgtgagcacgtggaagatgagggcgagtctagatataagataacggacatcatcggaaaggaggagggcataggacctgagaatttgcgtggttcaggcatgattgccggagaaagctcacttgcttataatgagataatcacgatctcgcttgtgacttgcagagccatcgggattggagcctacctcgtaagacttggtcaacgtacaatacaggttgaaaactctcatcttatcctcactggtgcaggagcacttaacaaggtcctcggaagggaggtttacaccagtaataaccagttgggtggaattcagattatgcacaataatggcgtgacccactgcactgtctgtgacgacttcgagggggtctttaccgtcctacactggctgtcttacatgcctaaatccgttcacagcagcgtgcctctgctgaactctaaagaccctatagaccgcattatcgagtttgtacctactaagaccccctatgatccacggtggatgcttgctggccgccctcaccctacacagaaaggccagtggctgtcaggatttttcgactacgggagcttcagcgaaatcatgcagccgtgggctcagacagtcgttgttggccgcgcgaggctgggaggcatccccgtgggcgtggtggctgttgaaacaagaactgtcgaattgtcgatcccggcagatccagccaatcttgactcggaagcgaagattatccaacaggctggccaagtttggttccctgactccgctttcaagacatatcaagccataaaagactttaaccgggagggtttgcccctcatggtgtttgctaattggaggggattttcaggtggcatgaaagacatgtacgatcaggttttgaaattcggagcatatattgtggatggactacgggaatgctgtcagccagtcttggtgtatattcctcctcaggccgaactgaggggcgggtcctgggtcgtgatcgattcctcaataaacccccgccatatggaaatgtatgccgacagagaatcacgtggcagcgtcctcgagcccgagggcacagtggagattaaattcaggcgcaaggatctggtcaaaacgatgcgaagagttgaccccgtatatatacatctggctgaacggctgggcacgcccgagctgtccaccgctgaacggaaggagttggaaaacaaattgaaggaaagggaagagtttttgataccaatttatcaccaggttgccgtgcagttcgctgatttacacgacacaccagggcgaatgcaggagaagggggttatcagtgatatccttgactggaagacaagtagaacattcttttattggcggctgcggcggctcctcttggaggatttggtgaagaagaaaatccacaacgcgaatcccgaactgaccgacggccagatccaagcaatgctgagacgctggtttgtggaggtggaaggcaccgttaaggcttacgtctgggataacaataaggacctggcagagtggctggagaagcagttgacagaggaagacggtgtgcattctgtgatcgaagagaacataaagtgtatctcccgcgattatgtgttaaaacaaatccggagcctcgtccaagctaatccagaagtggccatggacagcataatccatatgacccagcacatcagcccaacgcagagagctgaggtgatcaggattctgagtacaatggactcacccagtacatag

SEQ ID NO: 22702 - DNA, 363 bp, synthetic construct
  misc_feature 1..363: note = Description of Artificial Sequence: Synthetic coding sequence
  source 1..363: mol_type = other DNA
atggacgagcccagccccctggcccagcccctggagctgaaccagcattcccggttcataatcggcagcgtctctgaggacaacagcgaggacgagatctctaacctagtaaagctcgacctgctggaggaaaaagaaggttctctctcacccgcgagtgttgggtccgatacactctccgacctggggattagctcattacaagatggtttggcgctccatattcggagctccatgtcgggtctgcatttagttaaacaggggcgcgaccggaagaaaattgatagccaacgcgactttaccgtagctagcccagctgaattcgtgactcgcttcgggggaaataaggtgatcgagaaatag

SEQ ID NO: 22703 - DNA, 7113 bp, synthetic construct
  misc_feature 1..7113: note = Description of Artificial Sequence: Synthetic coding sequence
  source 1..7113: mol_type = other DNA
agcttctggaagtggatcagcacccagaccgtgcggatcatccgggccgtgcgcgctcattttggaggcatcatggacgaacctagtccgttggctcagcctttggaactgaaccagcactcccgctttatcattggctcagtgtctgaggacaattccgaagatgaaatctctaatctcgtgaagctagatcttctggaggagaaagaaggcagcctgagcccggcaagcgtgggcagcgatacgctgagcgacctgggaatcagcagtctgcaagatggtctcgccctgcatatacgctcatctatgagcgggctgcaccttgttaagcaaggccgcgaccgcaagaagatcgattctcagagagactttaccgtggccagccccgccgaatttgttacaaggtttgggggaaataaggtgatcgaaaaggtcctcatcgctaacaacggcatcgctgccgtcaaatgcatgagatcgatccgtcggtggtcttacgagatgttccgaaatgagagggctatccggtttgtcgttatggtgacacctgaagatttaaaagctaacgccgagtacatcaaaatggcagatcattatgtgccggtgccaggtggcccaaataataataactacgccaatgtggagctgatccttgatattgcaaagcgcataccagtccaagccgtatgggccggatggggacacgcctccgagaatcctaaactccccgagctcctgctgaagaacggtatcgcatttatggggcctccttctcaggctatgtgggcgctcggggataaaatagctagttctatcgtcgcgcagactgcagggattcccaccctgccctggtccggatctggccttagagtggattggcaagaaaatgatttctccaagcggattctgaacgtgccacaagaattatacgagaaaggctatgttaaggacgtcgacgacggtcttcaggccgccgaggaggtaggctatcccgtgatgattaaggcatccgaaggtggaggtggaaagggcatacgaaaggtgaacaatgccgatgattttccaaacttgttccgtcaggtgcaggccgaggttcccggatcacccatctttgtgatgcggctagcgaaacaaagccggcacctggaagtgcaaatcttggccgatcaatatggtaacgcgatctcgctctttggaagagactgctccgtccagagacgacatcagaaaatcatcgaggaggcaccagccacaatcgctacgccagcagtttttgagcacatggaacagtgtgccgtgaagctggccaagatggtcggatatgtatccgctggaaccgtcgaatacctgtactcccaggatggcagcttctactttctcgaactcaatcctcggctgcaagtcgagcacccttgtacggaaatggttgccgacgtcaatctccccgcagcccagctgcagatagccatgggaattccattgtatagaattaaggacatacggatgatgtatggggtgtccccatggggagactcccctatcgacttcgaggacagcgcccacgtgccttgtcctcgtggccacgtgattgctgcacgcattacaagtgaaaaccctgacgaaggctttaaaccttctagcgggacagtccaggaacttaatttcaggtcgaataaaaatgtatggggatatttctcggtggcggcggcagggggcctacacgagtttgcagactcccagtttggacactgttttagttggggggagaaccgcgaggaagctatctccaatatggtggtcgccttgaaagagttgtctatcaggggcgacttcaggactacggttgagtatcttatcaaactgctcgagaccgagagtttccagatgaaccgcatcgacactggctggctggatcggcttatagccgaaaaggtgcaggcagagaggcccgatacgatgcttggggttgtgtgtggagcattgcacgtagcagacgtgtctttacgtaatagcgtttcgaacttcctccatagcctggagcggggccaagtactacccgcccatacccttctcaacacagttgatgttgaactgatctacgagggcgtgaagtacgtgcttaaggtgactaggcagtcaccaaatagttatgttgtcattatgaacggctcttgtgtggaagtagatgttcacagactcagcgatggcggtctcctcctatcctatgacggatcaagctatacaacatacatgaaagaagaggtcgaccggtatagaattacaatcgggaataagacctgtgtttttgagaaggaaaacgatccatcagtcatgcgatcccccagcgcgggcaagcttatccagtacatcgttgaggatggaggacacgtgttcgccggacagtgttacgctgagatcgaagtcatgaaaatggttatgacattaaccgccgtagagtccggctgtatacactacgtaaaaagacctggagccgccctcgatcctggctgtgttctggccaagatgcaactggataaccctagcaaggtgcagcaggcagaactgcacacgggatccttgccaagaatccagtccacggcccttaggggggaaaagctgcacagggtattccattacgtgttggataacctcgttaatgtgatgaacggctactgcctacccgacccctttttttcaagcaaggtcaaggattgggtggaaaggctgatgaagactctacgagatcctagtttacccctcctggaacttcaagacataatgacttccgttagcggccggattccacccaatgtggaaaaatctatcaagaaggaaatggcccaatatgcttccaatatcacatccgtcctttgccagttcccgtctcaacagatagccaacatactcgacagccacgcagccactttgaatagaaagagtgaacgtgaggtattctttatgaacacgcagtctatagtacagctggtccagcgatatagatctggtattcgcgggcatatgaaggcagtggtaatggacttgctaagacagtatctgcgggtagagacccagttccagaatgggcactatgacaaatgcgtgttcgccctgcgtgaagagaacaaatccgatatgaacacagtgctgaattacatcttctcgcacgctcaggtgacaaagaagaacctgctcgtgacaatgctgattgatcagctttgtggaagagaccccactctaaccgacgaactgctgaatatcctaacggaactgacacaactgagtaaaactactaatgcgaaggtcgctctcagggctagacaggtgttgatagctagccacctccccagctacgagttaagacataatcaggttgagtcgatttttttatctgctattgatatgtatggacaccaattctgcattgaaaaccttcagaaactcatcttgagcgaaacttctatatttgatgtgctgcctaatttcttttaccattctaatcaagtcgtgagaatggctgcgttggaagtgtacgtaaggagagcttacattgcctacgaactgaacagcgtgcagcataggcagttgaaggacaacacttgtgtggtagaattccagtttatgctccctactagccatcccaatcgaggtaatattccaaccctgaatagaatgtccttcagttccaatctaaatcattacggaatgactcacgtcgcttcagtttccgacgtgctattggacaactcctttacacctccgtgtcagcgtatgggtggcatggtgagctttaggaccttcgaggattttgtgcggatctttgatgaggtgatgggatgttttagtgattcaccaccccagagtcccaccttcccagaggccggacacacgagcctgtatgacgaagacaaggtgcctcgtgacgagcccatccatattctgaacgtcgcaatcaagaccgactgcgatattgaggatgatcggcttgcagctatgttccgagaatttacgcagcagaacaaggcaacgctggtggaccacggcatcaggcgcctgactttcctagtggcccagaaagattttagaaagcaggtcaactacgaggtcgaccgcaggttccaccgggagttcccaaaatttttcacatttcgggcacgtgataaatttgaggaggaccggatttaccggcacctggagcccgcactagccttccagctcgaactcaacaggatgaggaacttcgatcttactgcgatcccttgcgccaaccataagatgcatttgtatctcggggctgctaaggtggaggtgggaaccgaagtgaccgactaccgcttttttgtgagagcgataatcaggcacagcgacctggtaactaaggaggccagcttcgaataccttcagaatgagggtgaaaggctcttattggaagcaatggacgagctggaggttgccttcaacaataccaatgtgcggacggattgcaaccacatatttctgaactttgtcccaactgttatcatggatccaagcaagatcgaggaaagcgtcaggagcatggttatgagatatggaagccggctgtggaaacttagggtgctccaggcagaattgaaaattaacatcaggctgacccctacaggtaaagctattccgatccggctgttcctcaccaacgagagcggctactatctggacatttctctctacaaggaagtcactgacagccggactgcgcagataatgtttcaggcttatggggataaacagggccccctgcatgggatgctgatcaatactccctacgtcaccaaggatctgctgcagtccaagcgctttcaagcacagtctctgggaacgacttatatttacgatattcccgaaatgttcaggcagagcttgatcaagctgtgggagtcaatgagtacacaggcttttctgccctccccaccattaccctccgacatgttgacctacacagagctggtactggatgaccaaggccagctggtgcatatgaatagactcccggggggcaatgaaattggaatggtggcctggaagatgacctttaagtccccagaataccccgagggccgtgatataatagtgattggcaatgacatcacctataggattggctcctttgggccacaggaggacctgctgtttctccgtgcgagtgaacttgcgcgcgccgagggcattcctcgcatatacgtcagtgccaattctggcgctaggatagggctcgctgaggaaattaggcacatgtttcatgtcgcctgggtggacccagaggacccttataaagggtaccggtacttgtatcttacccctcaagactacaagagggtcagtgctttgaatagtgtgcactgtgaacacgtggaagacgagggagagtcaagatataagatcaccgacattatcgggaaagaggaaggaattggtccggaaaatctgagaggatccggaatgattgcaggagagagttccttagcctacaacgagatcattacaataagcctagttacgtgccgggcaattggaatcggtgcttatttagtgcgcttagggcagagaactattcaggttgaaaactcgcacctgattcttacaggtgccggggctctgaacaaagtccttggtcgtgaggtctacacttccaataaccagctgggtggaatccagatcatgcacaataatggggtcactcactgcaccgtgtgcgatgatttcgagggggtgtttaccgtgctacactggctgtcgtatatgcctaagtcagtacactctagtgttccactcctcaatagtaaggatccaatcgatagaataatcgaattcgtcccaaccaagacaccctatgacccccgctggatgctcgctgggcggccccatcctacacaaaagggccagtggctctctgggttttttgactacggatctttctccgaaatcatgcagccctgggctcagacagttgtagtgggccgcgctaggctgggtggaattcccgtcggggttgtcgctgttgagacgcgtaccgtggaattgtccatccctgccgaccctgcaaatctggatagcgaagccaaaattatccaacaggccggccaggtgtggttccccgattctgcttttaagacctaccaagccatcaaggactttaatcgagagggtttacccctcatggtctttgctaattggagagggttttctggtggcatgaaggacatgtacgaccaggttcttaagttcggggcatacatcgttgacggtcttagagaatgctgccagcccgtactagtgtacatccctccacaggccgaactgcgcgggggtagttgggtggtgattgactccagcatcaacccgaggcatatggaaatgtacgcagaccgcgaatcccgggggagtgtactcgaaccagaaggcactgtggaaatcaagttccggagaaaagacctggtgaaaacaatgaggagggttgaccctgtctatatacacttggccgaacgactgggcacacctgagttgagcacggccgagagaaaggagttggagaataagcttaaagaaagggaggagtttttgattcctatctaccatcaggtcgctgttcagttcgcggaccttcacgataccccaggccgtatgcaggaaaagggtgttatctctgatatactcgactggaaaaccagtcgtacgttcttctactggagacttcgacggcttctgctggaagacctggttaagaaaaaaattcacaatgcgaaccccgagttgactgatggacaaattcaggccatgctgcgtaggtggtttgtggaggtcgaggggacagttaaggcctacgtctgggataataacaaagatctcgctgaatggctcgagaagcagttaacggaggaagacggcgtgcactccgtgatcgaagaaaatataaaatgcatctctagggattacgttcttaaacaaatccggagtctggttcaggctaatcctgaggttgctatggatagtataatccacatgacccagcacatcagcccaactcaaagggccgaagtcattcggatcctgtcaaccatggatagtcccagtacttag

SEQ ID NO: 22704 - DNA, 777 bp, synthetic construct
  misc_feature 1..777: note = Description of Artificial Sequence: Synthetic coding sequence
  source 1..777: mol_type = other DNA
atgagcggcctgcacctggtgaagcagggccgggaccggaagaagattgactctcagcgcgactttaccgtggcctcccctgcggaattcgtgactagattcgggggtaacaaggtgatagagaaagtgctcatagctaacaacggtattgccgccgttaaatgcatgagaagtataagaaggtggtcttatgaaatgttccgaaacgaaagagccattcgcttcgtggtgatggtaacaccagaggatctgaaagccaacgccgaatatatcaaaatggcagatcactatgttcctgtgccaggcggaccgaataacaacaactatgctaacgtagagctgatcctcgacatagcaaagcgaatacctgtgcaagcagtgtgggccgggtggggtcacgctagcgaaaaccctaaactgccagaacttcttttaaaaaatggcatcgccttcatgggacccccttctcaggcaatgtgggccttgggagacaaaatcgcctctagcatcgtcgcccagaccgccgggatccccacactaccatggagcggttctggtctgcgggtggactggcaagagaacgattttagcaagagaatccttaacgtgcctcaagaactgtacgaaaagggctatgtcaaggatgtcgacgacggcctccaggctgccgaagaggtcggttacccggtgatgattaaagcttctgaaggtggaggtggtaaaggcattcgcaaagtgaataacgcagacgatttccccaacctgtttaggcaatag

SEQ ID NO: 22705 - DNA, 144 bp, synthetic construct
  misc_feature 1..144: note = Description of Artificial Sequence: Synthetic coding sequence
  source 1..144: mol_type = other DNA
atggacgagcccagccccctggcccagcccctggagctgaaccagcattcaaggtttattattggaagcgtgtccgaagataactctgaggatgaaatttctaacctagtgaagctggacctgcttgaagagaaggagggttag

SEQ ID NO: 22706 - DNA, 2679 bp, synthetic construct
  misc_feature 1..2679: note = Description of Artificial Sequence: Synthetic coding sequence
  source 1..2679: mol_type = other DNA
atggaccactacgacagccagcagaccaacgactacatgcagcccgaagaggattgggaccgggacctgctgctagatcctgcttgggagaagcaacaaagaaaaacatttacagcatggtgcaacagccaccttcggaaggccggcacacagatcgaaaacatcgaggaagacttccgagatggactcaaactgatgctgcttcttgaggtcatctcaggcgagagactggccaagcctgagcgagggaaaatgcgagtccataagattagtaatgtcaacaaagcactggacttcatcgcatctaagggagtgaagctggtctctatcggggctgaagagatcgtcgacggtaacgtgaaaatgaccctgggcatgatatggaccataattctcagatttgccatccaggacattagcgtggaagaaactagcgccaaagagggtcttctcttgtggtgccagcgcaaaacagctccctacaagaacgtaaacatccagaacttccacatttcttggaaggacggactcggattctgtgctctcattcacagacataggcccgaactgatcgattatgggaaactgcgcaaggatgaccccctcaccaatctgaataccgccttcgatgtcgctgagaagtacctcgatattccaaaaatgctcgacgccgaggatatcgtgggaacagctcgccccgatgagaaagccataatgacgtacgtaagctctttctaccacgccttcagtggcgcacagaaggctgaaacagccgccaatagaatatgcaaagtcttagcagtcaaccaggaaaacgagcagcttatggaggattatgagaagctggcgtccgacctgctggagtggattcggcgcacaatcccctggctggaaaatagagtgcctgagaacactatgcacgctatgcaacaaaaacttgaagacttcagggattatagacgactgcataagccgcccaaggtgcaggagaaatgtcagcttgagattaattttaacacattacagacaaagctcaggttgtccaatcgccctgcgtttatgccttccgagggcagaatggtttctgatattaacaatgcctgggggtgcctggaacaggtggaaaagggatatgaagagtggctgttgaacgagattcggaggctggagcgacttgatcacctcgcagagaagttccgccagaaggcatccatccatgaggcctggactgatggaaaggaagcgatgttgcgccagaaagattatgaaacagctacacttagcgaaatcaaggcgctacttaaaaaacacgaagccttcgaatccgacttagccgcacaccaggatcgcgttgagcagatcgctgccatcgcgcaggagctgaacgaattggactattatgattcccccagcgtaaatgcacgctgtcagaaaatctgcgatcaatgggacaacctgggtgcgttgacccagaaacgccgcgaggcgttggaaaggaccgagaaactgttggagactatagatcagttgtatcttgagtatgctaaacgcgccgcaccattcaacaattggatggagggtgcgatggaagatctgcaggacactttcatcgtgcacaccatagaggagatccagggattaactacagcacacgagcagttcaaagctacgctgccggacgctgacaaggaaagattggcaatcctgggaatccacaatgaggtgtctaaaatagtccagacttaccacgtcaatatggctgggactaacccttatacaacaataacacctcaggaaatcaacggcaagtgggaccacgtgcgacagctcgttccaagaagggaccaagccctgacagaagagcatgccagacagcaacacaacgagcgattacgcaagcaatttggcgcccaagctaatgtgatcggcccctggatccagacgaagatggaggagattggtcggatatccatcgagatgcatggtactctggaggatcagctgtctcacttacgacagtatgaaaaatccattgtcaactataaacccaaaatcgatcagctggagggtgaccatcagctcatccaggaggccctgatcttcgacaacaagcatactaattacactatggagcacattagggtaggctgggagcagctgttaacaaccatcgcacgaaccatcaatgaggtagagaatcagatcctgacacgcgatgccaagggaatttcacaggaacaaatgaacgagttcagagcttccttcaaccatttcgaccgggaccacagcggcacactcggtccagaggagttcaaagcctgtttaatttcgctcggctatgacataggcaacgatccacagggggaggcagaatttgcaagaataatgtcgatcgttgatcctaatcggttaggggtggttacttttcaggcctttattgattttatgagcagagagacagccgacacggacacagcggaccaggtgatggcgtcttttaaaatcctggctggtgataaaaactacattaccatggatgaactccggcgcgagttgcccccagatcaggcagagtactgcatcgccaggatggccccctacactggacctgattcagtgccaggcgcacttgactacatgagctttagcacagccctttatggggagagtgacctatag

SEQ ID NO: 22707 - DNA, 2745 bp, synthetic construct
  misc_feature 1..2745: note = Description of Artificial Sequence: Synthetic coding sequence
  source 1..2745: mol_type = other DNA
atggaccactacgacagccagcagaccaacgactacatgcagcccgaggaggactgggatcgtgacctgctgttggatcctgcctgggaaaagcagcagcgaaaaacttttaccgcctggtgcaatagtcacttacggaaggctggcacacaaatcgagaatatagaggaggattttcgggatggattgaagttaatgctactcctagaagtaatctcaggcgagaggcttgccaagcctgagcgaggtaaaatgagagtccataaaattagtaatgtaaataaagccctggactttattgcctcgaagggggttaaactggtgagtatcggcgccgaggagatagtggatggcaacgtgaaaatgacactgggcatgatttggacaatcattctacggttcgcaatccaggacataagcgtcgaggaaaccagcgctaaggaaggcctcctgctttggtgccaacgcaaaacagccccgtacaaaaacgtgaatatacaaaattttcatattagctggaaagatggcctcgggttctgcgccctcattcatagacacagaccagagctgatcgattacggcaagctccggaaggacgaccctctgaccaatctgaatacagcctttgatgtggcagagaagtacctggacatccccaaaatgctcgatgctgaagacatagtgggcaccgcccgcccagatgaaaaagccattatgacctatgtgtcatctttttaccacgcattcagcggtgctcaaaaggccgaaactgcggctaatcgaatatgtaaagttctggctgtcaatcaggaaaacgagcagctgatggaggattatgagaagctggcctctgacctgctggagtggataaggcgaactataccctggttggagaaccgagttccagaaaacactatgcacgccatgcagcaaaaactggaagattttcgtgactatagaagactgcacaagcctcccaaggtgcaggagaagtgccagctagagatcaatttcaatacactgcagacaaagctgagactgagcaatagaccggcctttatgcctagcgaaggccgaatggtctcagacataaataacgcatggggttgcctggagcaggtagaaaagggctatgaagaatggctgttgaatgaaattcggcggcttgagcgactagatcatctcgctgagaagttccgacaaaaggcgtcaatccatgaagcgtggacagatggcaaggaggcaatgctgcggcagaaggattacgaaactgcaaccctatccgaaatcaaagccctcctaaagaagcatgaggctttcgagtctgacctggcggctcaccaggaccgcgtggagcaaattgcagcaatcgcacaggagctgaatgaacttgactattacgattctccgtcagtgaacgccagatgtcagaagatatgcgatcagtgggacaatctgggtgcgctgacccagaagcgtagggaggctttggaacgaacagaaaaactgctggagactattgaccagctttacctggaatatgcaaaacgggcagcccctttcaacaactggatggaaggagccatggaagacttacaggatactttcatagtccacaccattgaggagatccaggggctcactaccgcacacgagcagttcaaggccacattgcccgacgcagataaagagcggctggccatactgggtatccacaacgaagtgtccaagattgtgcagacctaccacgtgaatatggcaggaactaacccatacacaactattacacctcaggagatcaatgggaagtgggaccacgtgcgccaactggtgccacgacgcgatcaagctctcacagaagagcacgccaggcaacagcacaatgaaaggctcaggaagcaatttggggcacaggccaatgtaatcggcccctggattcagaccaaaatggaggaaattggtagaatttcaatcgagatgcacggcactctggaggatcaactgtcccatctgaggcagtacgaaaagagcatcgttaactacaaacccaagatcgatcagctcgaaggagaccaccagctgattcaggaggcactcatcttcgataataagcacacgaattatacgatggagcatataagggtggggtgggaacagttgctgacaactatcgcacgtacaattaatgaagtcgaaaaccaaatcctcacaagggacgcaaaaggtatttcgcaggagcaaatgaacgaattccgagctagcttcaaccactttgatagagatcattccggtacactggggcccgaagaatttaaagcatgtcttatcagtctcgggtatgacataggtaacgatcctcagaaaaaaacgggtatgatggacaccgacgactttcgggcatgtctgatatccatgggctacaacatgggagaggcggaatttgctaggattatgagcatcgtcgatccaaaccgtcttggcgtggtgacatttcaggccttcatagatttcatgagcagagagactgcggatactgacactgcagatcaggttatggctagttttaagatcctcgccggagataagaactatatcaccatggatgagctgagaagggagctccctcctgaccaagccgagtattgtattgcacggatggcaccatatacgggaccggattcggtcccaggggctttggattatatgtccttcagcacagctctttacggcgagtccgatttatag

SEQ ID NO: 22708 - DNA, 2664 bp, synthetic construct
  misc_feature 1..2664: note = Description of Artificial Sequence: Synthetic coding sequence
  source 1..2664: mol_type = other DNA
atggaccactacgacagccagcagaccaacgactacatgcagcccgaggaagattgggatcgggacttactattagaccctgcttgggagaaacagcaaagaaaaactttcacagcctggtgcaacagccacctgcggaaagccggaacacaaattgagaacatagaggaagacttccgcgacggactcaagctaatgcttctgctggaagtgatctccggcgagcgtttggccaaacccgagagaggtaagatgagggttcacaaaatttctaatgtgaacaaagccctggatttcatcgcgtctaagggcgtgaaactcgtgtcaattggggctgaagagatagtggacggtaatgtcaagatgaccctcggaatgatttggactataatcttacggttcgcgatccaggatatttccgtagaagaaacttctgcgaaggaagggctgcttctttggtgccagcgaaaaacggccccctacaagaatgtgaatatccagaactttcatatatcctggaaagatggacttggcttctgtgccctcatccatcgtcacaggccggagcttattgattatggcaagctgagaaaagacgaccctctaactaaccttaacactgcttttgacgtagctgagaagtatctggatatccctaagatgttggatgctgaagacatagtcgggaccgccaggcctgacgagaaagccattatgacgtacgtgagctctttttaccacgctttcagcggagcacagaaagcagagaccgcagcaaataggatctgcaaagtgctcgcggtcaatcaggaaaacgagcagctcatggaggattacgagaaactagcttcagatctgttagagtggatccgcagaacaatcccttggctggagaatagagtccccgagaatacaatgcatgcgatgcagcaaaagttagaggactttcgggactacagaagactacacaaacctccaaaggtccaggaaaaatgccagttagagatcaacttcaatacccttcaaacgaagctgagactcagtaataggcccgcattcatgccttccgaaggccggatggtgagcgacattaataacgcctggggttgtttggagcaagttgaaaaaggatatgaagagtggctcctgaatgaaattcgccgactggaacggctcgaccatctggcggagaaattccggcagaaggcatcaattcacgaagcatggacagacggaaaggaggcaatgttacggcagaaggattatgagacagcgaccctctccgagatcaaggccctcttgaaaaagcatgaggctttcgaatctgatttggccgcacatcaggatcgggtggaacagattgctgcgattgcccaggaactgaacgaactggactactacgattctccgtcggtaaacgccagatgtcagaaaatctgtgatcagtgggacaatctgggggccctcacacagaagaggagagaagccctggaaaggactgaaaagctgctggaaacaatcgatcagctatatctggagtacgccaagcgggctgcaccattcaacaactggatggagggcgccatggaagacctccaggatacatttattgtgcacaccatagaggagattcaagggctgaccacagcccatgaacagttcaaagccaccctccctgatgctgataaagagagactggccatcctcggaattcataatgaggtctctaagatcgtgcagacgtaccatgtgaatatggcaggcacaaacccttatacaacaattacaccccaagaaataaatggaaaatgggaccatgtgcgccagctggtgcctaggagggatcaagccctgacagaggagcatgctcgccagcagcataacgaaaggttgcggaagcaatttggggctcaagccaatgttatcggtccgtggatccagacgaaaatggaggagattgggagaatctctattgagatgcatggcacattagaggatcagctgagtcacctgaggcagtatgagaaatctatagtcaattacaagccgaaaatagatcaattagaaggggatcaccaattgattcaggaggctctgattttcgataacaagcacactaactatacaatggagcacattcgtgtgggctgggaacagctgctgactacgatcgccagaactataaatgaggtagagaatcagattctgacccgagacgccaaagggatcagccaggagcaaatgaatgaatttcgagccagcttcaaccacttcgaccgaaaaaagacaggcatgatggatacagatgacttccgagcttgcctgataagtatggggtacaatatgggagaggcggaatttgctagaatcatgagtattgtcgatcccaacagactgggggtcgtgactttccaagcgttcatcgactttatgtcccgcgaaactgcagacaccgacacagctgatcaagttatggccagtttcaaaatactggcaggcgataaaaactatatcactatggacgaattaaggagggaactgcccccagaccaagccgaatactgtattgctcgtatggctccatatacaggtccagactccgttcctggtgcactggattacatgagtttttccaccgcactttatggcgagagtgacttgtag

SEQ ID NO: 22709 - DNA, 2736 bp, synthetic construct
  misc_feature 1..2736: note = Description of Artificial Sequence: Synthetic coding sequence
  source 1..2736: mol_type = other DNA
atggtggactaccacgccgccaaccagagctaccagtacggccccagcagtgcgggcaatggcgctggggggggcggatcaatgggcgactatatggcacaggaggatgactgggacagggaccttctgctcgaccctgcctgggagaagcagcaaagaaagacttttaccgcttggtgcaactctcatctccgaaaggccggtacgcagattgagaacatcgacgaggactttcgggacggattgaagcttatgctcctactggaagtgataagcggcgaaagactgccaaagccagagcgagggaagatgagggttcataagatcaacaacgtcaataaagccctggactttatcgcctctaaaggggttaagttggtgagtataggagcagaagagatcgttgacggcaatgccaaaatgaccctaggaatgatctggaccataatactcagatttgccattcaggatatcagcgtcgaggaaacgtccgctaaggagggcctcttactgtggtgtcaaagaaagaccgccccttacaagaatgttaacgtacagaatttccatatcagttggaaagatggactcgcattcaatgccctaattcacaggcatagacctgaattgattgagtacgacaaacttaggaaggatgatcctgtgacaaacctaaacaacgccttcgaggtagctgagaaatatctggatatccctaaaatgcttgatgcagaagacatagtgaataccgcccgaccggatgaaaaagcaataatgacctacgtgtcctcattctaccacgccttttctggcgcgcagaaggccgaaaccgcagccaacaggatctgcaaagtgcttgctgtaaatcaggaaaatgagcacctcatggaggattacgagaagctggctagcgatctcctcgaatggatcagacgcacgatcccatggttggaagaccgtgtccctcaaaaaactattcaggaaatgcagcagaagttagaggactttagagactacaggcgtgtgcacaagcctccaaaagtccaggaaaagtgccagttagaaatcaatttcaacaccttgcagactaagctgagattaagcaatcggccagcctttatgccttctgagggcaagatggttagcgacattaacaatggctggcaacacctggagcaggcggaaaagggctatgaagagtggctgctaaacgagatacgcaggcttgagcgcctggatcatttggcagaaaagttccgccagaaagcctctatacacgaggcctggaccgacggcaaggaggccatgctgaagcatcgggactacgaaacagcgaccctgtcggatattaaggctctaatcagaaaacacgaggcttttgagagcgacctcgcggcccaccaggaccgagtcgaacagatcgcggccattgcccaggagttaaatgagcttgactactacgactctcacaacgtcaacacacgctgccagaaaatctgtgatcaatgggacgctctgggatcccttactcactcgcggcgagaggctctggaaaagaccgaaaagcagctcgaggcaatagaccagctccacctggagtacgccaaacgtgcagcaccatttaacaactggatggagagcgctatggaggatttacaggatatgttcatcgtgcatacaattgaagagatcgaagggctgatctctgcacacgatcaattcaagtcaaccctgcccgatgccgacagagagagagaagccatccttgcaatccacaaggaagcccagcgtatcgccgaatctaaccacattaaattatctggcagcaacccctataccactgtgacccctcaaattatcaacagtaagtgggagaaggttcagcagctggttccaaagcgcgaccatgccctcctcgaggaacagtcaaaacagcagagtaacgaacatttgcgacgtcaatttgccagccaagccaacgtcgtcggcccatggatccagacaaagatggaagagatcgggagaatttccattgagatgaatggtactctcgaggaccaactgagccacctgaagcagtacgagcggtccattgtggattacaagccaaatcttgacctcctggaacaacagcatcagcttatccaggaagccctgatctttgataacaaacataccaattataccatggaacatattcgggtgggctgggaacagttgctgaccactatcgcacgtaccattaatgaagtagagaatcagatacttacccgggatgccaagggcatatctcaggaacagatgcaggagtttcgggcaagctttaaccacttcgataaggaccatggaggcgcccttgggcccgaggagtttaaggcgtgtctgatcagcctgggttacgacgtggagaacgataggcagggagaggccgagtttaaccgaataatgtctttggtggatcctaatcacagcggcctcgtgacattccaggcattcatcgactttatgtctagggagacaacagacaccgacaccgcagatcaagtgatcgcaagcttcaaggtgctggccggggacaagaattttattactgctgaagagctacggcgggaactcccacctgaccaggccgagtactgcatcgcacggatggccccatatcaaggacctgacgcagtgcctggcgcattggattataaaagcttttcgaccgccctttacggggagtctgatctgtag

SEQ ID NO: 22710 - DNA, 2079 bp, synthetic construct
  misc_feature 1..2079: note = Description of Artificial Sequence: Synthetic coding sequence
  source 1..2079: mol_type = other DNA
atggtggactaccacgccgccaaccagagctaccagtacggcccctctagcgccggtaatggagctgggggcgggggatccatgggggattatatggcacaggaagacgactgggatcgtgatcttcttctggacccagcatgggaaaagcagcagagaaaagccgagaccgcagccaacaggatttgcaaggtgttggcagtgaatcaggaaaatgagcacctcatggaagactatgagaaactggcctcagacttactcgagtggatcagaagaactatcccttggttggaggaccgcgtgcctcagaagacaatacaggaaatgcagcagaagctcgaggattttagggactatcgtcgcgtacacaagccacccaaggtgcaggagaaatgtcagctggagatcaacttcaataccctacagaccaagctcaggctctcaaaccgccccgccttcatgccctcggaaggaaaaatggttagcgatataaacaatggttggcagcacttggaacaggcagagaaggggtacgaagagtggctgttgaatgagatcagaaggctggaacggctcgaccacctggctgagaagttccggcagaaagcctccatccacgaggcctggactgacggcaaagaggccatgctaaaacacagagattacgaaaccgcaactctcagcgacataaaggccttgattcggaagcacgaggccttcgagtccgaccttgcagcgcatcaggaccgggtggagcaaatcgcggccattgcgcaggagctcaatgaactagactactacgatagtcataatgtaaacacgcgctgccagaagatttgtgatcagtgggatgccctcgggagcttaacgcatagcagaagggaggccctggaaaagacggaaaaacagctagaagccattgaccaactccacctcgaatacgcaaaacgcgccgcaccatttaataactggatggagtccgcaatggaggatctgcaagatatgtttattgttcatacaatcgaggaaattgaaggccttattagcgcccacgaccagttcaaatccacattgccagatgctgatcgcgagcgcgaagctatccttgccatccacaaggaagcccagcggatcgctgagtccaatcacatcaagttgagtggctccaatccttatacaaccgtaacccctcaaattattaactcaaaatgggagaaggtccaacaactggtgccgaaacgtgaccatgctttattagaggaacaaagtaagcagcagagtaacgagcatcttcggaggcaatttgctagccaggccaacgtggtgggcccatggattcagacaaagatggaggagattggccgcatcagcattgagatgaatgggacacttgaggaccagctgtcacacctgaaacaatatgaacgatcaattgtggactacaaacccaacctggacttgctggagcagcagcaccagctcatccaggaggcccttatcttcgataacaagcatacaaactacacaatggaacacattcgggttggttgggagcagctactgaccaccattgctcggactatcaacgaagtagaaaaccagatactgactagggatgccaagggcattagccaggagcagatgcaggaattccgggctagtttcaatcactttgacaaagatcacgggggagcattagggcccgaagaatttaaggcctgtcttatttctctgggatacgacgtggaaaatgacaggcagggggaggcggagttcaaccgcattatgagccttgtggatccgaaccacagcgggttggttaccttccaagctttcatcgattttatgtcgcgagaaacaaccgatactgacaccgctgatcaggtcatcgccagcttcaaggtactggcaggcgataaaaatttcataaccgcagaggagctgagacgcgagctgcctcccgaccaagccgagtattgtatagctcgtatggctccttaccagggccccgacgctgtacccggagcactcgactataaaagcttcagcacagccctgtacggcgaaagcgacctttag

SEQ ID NO: 22711 - DNA, 1566 bp, synthetic construct
  misc_feature 1..1566: note = Description of Artificial Sequence: Synthetic coding sequence
  source 1..1566: mol_type = other DNA
atggtggactaccacgccgccaaccagagctaccagtacggccccagcagtgccggaaacggggcaggaggaggggggtccatgggggactacatggctcaagaagacgactgggatagagatctgctgctggatccagcctgggagaaacagcaacggaagacgttcactgcctggtgtaattcacatctgcgaaaggctgggactcagatcgagaatattgacgaggatttccgagacggtctgaagttgatgctcctgttagaggtgcacgagttggattattacgattctcacaatgttaacacacgttgtcaaaaaatctgcgaccaatgggatgcactggggtctttgacacattcccgcagggaagctctcgaaaaaaccgagaaacagttggaggctatcgatcagctgcacctggagtatgctaaaagagctgctccatttaacaactggatggaaagcgccatggaagacttgcaagacatgtttatcgttcataccatcgaggagatcgaaggtctaatcagtgcccatgaccagttcaagtccactctgcccgatgccgatcgtgagcgtgaggccatcctggccatccacaaggaggcgcagcggatcgccgagtcaaatcacatcaagctctccgggtccaatccgtataccactgtaacaccacagattatcaattctaaatgggagaaggtacagcagttggtaccgaaaagggaccacgccctgctggaagagcagtcgaagcagcagagcaacgagcacttaaggcgccagtttgcctcgcaggccaatgtagtggggccctggattcaaaccaagatggaggagattggtcggatttctatcgaaatgaacggcaccctggaggaccaactgtcccatctaaagcagtacgagcgttctattgtggattacaagccgaacctagatttactggagcaacagcaccagctgattcaggaggcccttatctttgacaataaacataccaactacacgatggagcatattcgggttggctgggagcagctactgactactatcgccaggacaattaacgaagtcgagaaccaaatcctgacgcgagatgcgaaaggaatctcccaggaacagatgcaagaatttcgcgctagctttaaccattttgataaagaccatggaggcgctctcggacccgaggaattcaaagcatgtctgatctctctgggttatgacgtggaaaatgacagacagggagaggcagaatttaatagaatcatgagtctggtggacccgaaccatagcggtctggtgacatttcaggcctttatagactttatgagccgagaaacaactgacacggataccgctgaccaggtcatcgctagctttaaagttctggctggggataagaacttcataaccgctgaggaactgcgcagagagctcccgcccgaccaggctgaatattgcattgcccgaatggccccatatcagggcccagacgcagttcccggggcccttgactataagagcttttctaccgcactatacggagaatcagacctatag

SEQ ID NO: 22712 - DNA, 1689 bp, synthetic construct
  misc_feature 1..1689: note = Description of Artificial Sequence: Synthetic coding sequence
  source 1..1689: mol_type = other DNA
atggtggactaccacgccgccaaccagagctaccagtacggccccagctcagccggtaacggggcaggcggcgggggctccatgggggattacatggcccaggaagacgactgggatcgggacctgctcctggatcccgcatgggagaaacagcagagaaagacttttacggcctggtgcaactcgcacctgcggaaagcgggaacgcagatcgagaacattgatgaagactttcgggacggtttgaagcttatgctcttgcttgaggtgattagcggggaaagactccctaagccagagcgggggaagatgagggtgcacaagataaacaacgtgaacaaggctctggactttatagcaagtaagggcgtcaaactggtgagtattggggctgaggagattgtggatggaaacgccaagatgactctgggcatgatctggacaataattctgcgcttcgcaatccaggatattagtgttgaagagacttccgctaaggaagggctgctgctatggtgccagcggaaaacagccccctacaagaatgtcaacgtgcagaatttccacatctcgtggaaggacgggctggcatttaatgccttaatccatagacaccggcccgagcttattgagtacgacaaactgcggaaggatgatcccgttacaaacctgaacaacgcgttcgaggtggctgaaaagtacctggacatacctaaaatgctggatgctgaagacattgtcaacacggcacgccctgacgagaaggcaataatgacgtatgtatcaagcttctaccatgcatttagcggcgcacaaaaggccgagacagctgctaatcggatctgtaaagttctggctgtcaaccaagaaaacgagcacctcatggaggactacgagaaattagcctctgatctgctggagtggatcagaagaacaataccctggctggaggaccgggtgccccagaaaacaatacaggaaatgcaacagaaactggaagatttccgtgactataggagggttcataagccacctaaggtgcaggagaagtgccaactagagattaactttaacactctgcagaccaaattaaggttaagcaacaggccagccttcatgccatcggagggcaagatggtctctgatatcaataatggctggcaacacttggagcaggccgaaaaaggttatgaggaatggttgctgaacgaaataaggcggctggaacggctagatcacctggctgagaagttccgccaaaaggccagcattcacgaagcctggacagacgggaaggaagctatgctgaagcatcgggactatgagaccgccacattatctgacattaaggccctaattcggaagcacgaggcatttgagagcgacctcgctgctcaccaagatcgcgtagagcaaattgcagccatagcccaggaactgaatgagctggactactacgattcccacaatgtcaatactcccgatggactgcaggaaggtcctggccaaccccatagtccaatcccacccctatgtatatacgcgaagcacagtcttcagagcagcggtgtaggtggatgggccggcagaggatggggacggctttcacctttatcactgtgcggacttgcccgacgattccctagaccaggctggggggatctcggccccgcattgcttgtttggtag

SEQ ID NO: 22713 - DNA, 1518 bp, synthetic construct
  misc_feature 1..1518: note = Description of Artificial Sequence: Synthetic coding sequence
  source 1..1518: mol_type = other DNA
atgaagttcaagctgcacgtgaacagcgcccggcagtacaaggacctctggaacatgtctgacgataagcccttcttatgcacggccccaggatgtggtcaacgatttacaaacgaggatcacctagcagtccacaagcataagcatgagatgacactgaagtttggtcctgctcgtaatgacagcgtgattgtggccgatcagacacccaccccaactcgatttctgaaaaactgcgaagaggttgggcttttcaacgaactggcatctccattcgaaaacgaattcaagaaagctagcgaagacgatatcaagaagatgcctttggacttaagccctctcgccaccccaattattcgtagtaagatcgaggaaccctcagtcgtcgaaacaacgcaccaagactcacccttgcctcacccggaatcaacgactagcgacgagaaagaggtgccactggcccagactgcccagcccacctcagcgattgttcgccccgccagcctgcaagttccaaacgtattattgacttcctccgatagcagcgtaattatccaacaggctgtgccctcccccacttcatcaacagtgataactcaggccccctctagcaaccgccctattgtgcccgtgccgggcccatttcctttgttgctgcacttacccaacggccagaccatgccagtggctatacctgcctctatcacgtcatctaatgtgcacgtgcccgctgctgtcccgcttgtccgcccagtgacaatggtgcccagcgtccccgggatacctggccctagttccccacagccagtccaatccgaagcaaaaatgagacttaaagctgccctgacccagcagcacccccctgttactaacggagatactgtgaaaggacatggaagcggcttagttcgcacacagagcgaggagagccggcctcagagcctgcagcaacctgcaaccagcactaccgagacgcccgctagccccgcccatacaaccccccagacacagtctacatcaggacgacggaggcgagcggctaatgaagacccagacgagaaacgccggaaattcctggagagaaaccgcgccgccgcatcgcgctgccgccaaaagaggaaggtttgggtccagagcctagaaaagaaagctgaggacctctcaagtctgaacggccagctccagagcgaggtgaccctgttgagaaacgaggtggctcagctgaaacagctgctgctcgctcataaggactgccccgttaccgccatgcagaaaaagagcggctaccatactgccgacaaagatgacagctccgaagacatcagtgtccccagctcaccccatactgaggccatccagcacagcagcgtgtctaccagtaatggcgtaagctcaacatccaaggcagaggcagtagccacttctgtcctcacacagatggctgaccagagcaccgagcccgccttgagtcaaattgttatggctccatcctctcagtctcaacctagtggtagctag

SEQ ID NO: 22714 - DNA, 1344 bp, synthetic construct
  misc_feature 1..1344: note = Description of Artificial Sequence: Synthetic coding sequence
  source 1..1344: mol_type = other DNA
atgtactgcgcctggatgtggcccgaccagacccccacccccacccggttcctgaaaaactgcgaggaagttgggctgttcaatgagctcgccagcccgttcgaaaatgaattcaagaaagcctccgaggatgatatcaagaaaatgcccctagatctgtcacctcttgctacccctatcatcagaagcaaaattgaggaaccttcagttgtggagactacacaccaagattccccactgccacacccagaatctactacatctgatgaaaaagaggttccactggcccagaccgcccaaccgacttcagctatcgttcggcccgcttccttacaggtccctaatgtcctccttacatccagtgacagttctgtgatcatacaacaggccgtgccctctccaaccagcagcacagtgatcacacaagccccttcttccaatagacccatagttccagtccctgggcccttccctttgctactgcatcttccgaatgggcaaaccatgcctgtagcgatccccgcctcgatcacctcatcgaacgtgcatgtgcctgcagccgtccccctagtgcggcccgttacgatggtgccatctgtgccgggcatccctggacctagtagcccacaaccagtgcagtccgaggcaaagatgcgactgaaggcagcgctgacacaacagcatcctcccgtgaccaacggggacacagtgaaagggcatggatccggcttggtgcgcacacagtccgaggaaagccggccgcagtcactgcaacaacctgctacctctacaacggagacaccggcttcccccgcacacaccacaccccagacacagagtaccagcggcaggcgccgaagagccgccaatgaagatcccgacgagaagcggaggaagtttttagagcgcaaccgtgccgctgcttctcggtgcaggcagaaaaggaaggtctgggtgcagagtctggagaagaaagccgaagacctttcgagtctcaacggccagctccagagcgaagtgaccctcctcaggaacgaagtggctcagctgaaacagctcttgctcgcgcataaagactgccccgtaacagccatgcagaaaaaaagcggctatcacactgcagataaagatgatagctcagaggatataagcgtgccctcatccccccacacggaagccattcagcacagctctgtttctacttctaatggcgtgagttctaccagcaaagccgaggccgtggcaacatccgtgctaacacagatggcggaccaatccacggaacccgctctttctcagatcgtcatggccccctccagtcagtcacagcccagtggtagctag

SEQ ID NO: 22715 - DNA, 381 bp, synthetic construct
  misc_feature 1..381: note = Description of Artificial Sequence: Synthetic coding sequence
  source 1..381: mol_type = other DNA
atgagcgacgacaagcccttcctgtgcaccgcccccggctgcggccagtccgaggttacgctgctccgcaacgaagtggcacagctgaaacagttactcctggcccacaaggactgtcctgtaactgctatgcaaaagaaatcgggatatcacaccgcagacaaagacgactccagcgaggacataagcgttccgtcgagcccccatacggaagcgattcagcactcctctgtgtccacgtcaaatggcgtgtcctcgacatcaaaggctgaagctgtagccacatccgtactcacgcaaatggccgaccaaagtacagagccagcattgagtcagatagtaatggccccttccagtcagagtcagccgtccgggtcatag

SEQ ID NO: 22716 - DNA, 1518 bp, synthetic construct
  misc_feature 1..1518: note = Description of Artificial Sequence: Synthetic coding sequence
  source 1..1518: mol_type = other DNA
atgaagttcaagctgcacgtgaacagcgcccggcagtacaaggacctctggaatatgagtgacgataaaccctttctttgcacagctcctggctgtggacagcggtttaccaatgaagatcaccttgccgtgcataagcacaaacacgaaatgaccctcaaattcgggcccgccaggaatgactctgttattgtcgccgaccagaccccaacaccaacacggttccttaaaaactgtgaagaggtgggtctattcaacgaactggcaagccccttcgaaaacgaattcaaaaaggcttctgaagacgatatcaagaaaatgcccctcgatttatcaccactggccacccctatcatccgcagcaagatcgaggagccttccgtggtggagacaacacaccaagacagtccattgccccaccctgagtctacaactagcgacgagaaagaggtgccattagcacagactgcgcagcctactagcgctatcgtgagacccgccagcctgcaggtacccaacgtattgttaaccagttcggacagctctgtgattatccaacaggccgtgccaagcccaacctcgtccactgtaatcactcaggcacccagctctaacaggccaatcgtccccgtgcccggtccctttccactactgctgcatctgcccaacggtcagaccatgcccgttgcgattcctgccagtattacctccagtaatgtgcatgtgcccgccgcggttccactcgtgcgacctgtcaccatggtaccgagcgtgcctggaatacccggcccatctagcccccagcccgtacagtcagaggctaagatgcgacttaaggctgcgcttacgcaacagcacccacccgttacgaatggtgatactgtcaaaggacacggttctggtctggtgagaacacaatcagaagaatcgcgtccacagtccctgcagcagcccgctacctctacaaccgaaacccctgcttccccagcacataccacaccacaaacacagagtaccagcggtcgtcgcagaagggccgcaaacgaagaccccgacgagaaacgccggaagttccttgaacgtaacagggccgccgcgagtcgctgtagacaaaaaaggaaagtgtgggtccagtctctagagaagaaagccgaagacctgagtagcctcaacgggcagttgcagagcgaggttacgcttctccggaatgaagttgcacagctcaagcagttgcttctggcccataaagactgtcctgtgacggctatgcagaagaagagcggctaccacaccgcagacaaggatgacagtagcgaagacattagtgtccccagctctccgcacaccgaggcaatacaacattccagcgtatcgactagcaacggagtgagtagcacatccaaggccgaggcagtagcaacaagcgtgctgacacaaatggcagatcagtcgacagagcccgccctgtcacagatcgttatggcacccagctcccagtctcagcccagcgggagctag

SEQ ID NO: 22717 - DNA, 1344 bp, synthetic construct
  misc_feature 1..1344: note = Description of Artificial Sequence: Synthetic coding sequence
  source 1..1344: mol_type = other DNA
atgtactgcgcctggatgtggcccgaccagacccccacccccacccgatttttgaaaaactgtgaggaggtgggattgttcaacgagctggcatccccgttcgagaacgaatttaaaaaagccagtgaagacgatattaaaaagatgccactcgacctgagccctctcgctacacccattattcggtctaaaatagaggagcctagcgttgtggagacaacacaccaggacagtcctctcccacacccggaatccacaacatctgacgagaaagaagtccctctggctcagacagcacaacccaccagcgccattgtgagacctgcctcactgcaggtgcccaatgtgctgctcacttcctcagacagttccgtgataattcagcaagcggtgccatcccccaccagcagcaccgtcatcacacaggccccatcttctaaccgtcccattgtaccagttcctgggccctttccactcttgctgcatcttcctaacggccaaacgatgcccgtggccatccccgcatcaatcacttcttcaaatgttcatgtgccggctgctgtgccccttgtccggcctgtgactatggtgccgtccgtccctggcatcccaggaccttcctctcctcagccagtccagagtgaagcaaagatgcgcttaaaggccgctcttacacagcaacacccaccagtgacaaacggggacaccgtcaaagggcacggaagtggactggtgaggacacagtctgaggagtcacggccacagtctctccaacagccggccacttctacaactgaaacacccgcatcccccgcccacaccacacctcaaacacagagcaccagcgggcgcaggcgacgtgccgcaaatgaagatcccgacgaaaaacgacgcaagtttctcgagaggaaccgtgcagccgcctccaggtgcaggcagaagcgaaaggtgtgggtccagtctttggagaagaaggcagaggacttgagttccctgaacggccagctccagtcagaagtgaccttactccggaacgaagttgctcagctcaagcagctgctgctggcccataaagattgtcccgtcaccgcaatgcagaagaagtcaggttaccatacagcagacaaggacgactctagcgaggacattagtgtgccttcttctccacacacagaggctatccagcacagctccgttagcacatcaaacggggtatcttctacctccaaagccgaggccgttgccacatctgtattgacgcagatggcagatcagtcgaccgagcccgctctatcacaaatcgtcatggctccatcatctcagtcccagccttcgggctcttag

SEQ ID NO: 22718 - DNA, 630 bp, synthetic construct
  misc_feature 1..630: note = Description of Artificial Sequence: Synthetic coding sequence
  source 1..630: mol_type = other DNA
atgaagttcaagctgcacgtgaacagcgcccggcagtacaaggacctgtggaacatgtccgacgacaaaccttttctttgcaccgcaccaggttgtggtcaaaggttcacaaatgaagatcatctagcagtccacaaacacaagcatgagatgactctgaaattcgggccagctcggaatgattccgtaattgtggctgaccagacacccactcctacgaggttcctcaaaaattgcgaagaggtggggctcttcaacgagctggcatcacccttcgaaaatgagtttaagaaggccagcgaggacgacatcaagaaaatgcctcttgatctgtctccccttgccacacccatcatacgcagcaaaatcgaggagccaagcgtagttgagacaacgcaccaagatagtcctctgccacaccctgagtccactaccagcgatgaaaaagaggtcccgctggctcagacagcccagccgacttctgccatcgtccgccccgccagcctccaagtgcccaacgttctactgacttctagtgactcaagcgtgattatccaacaggccgtgccttccccgaccagtagtaccgttatcacgcaggcacccagctctaacagacccatcgtatag

SEQ ID NO: 22719 - DNA, 1188 bp, synthetic construct
  misc_feature 1..1188: note = Description of Artificial Sequence: Synthetic coding sequence
  source 1..1188: mol_type = other DNA
atgaagttcaagctgcacgtgaacagcgcccggcagtacaaggacctgtggaacatgtccgacgacaagcctttcctgtgtaccgcccctgggtgcggccaacggttcacgaatgaagaccacctcgctgttcacaagcacaagcatgagatgacccttaagtttggccccgccaggaacgattccgtcattgtggcggaccagacccctactccgactaggttccttaagaactgtgaggaagttgggctattcaatgaactagcttctccgtttgagaatgaatttaagaaagcttctgaggatgacatcaagaagatgcccctggatctttccccactggccacccccatcatcaggagcaagattgaggagccttctgtcgtggagacaactcaccaggacagcccccttccccatccagagagcactaccagtgatgagaaagaagtgccactggctcagacagcgcagccaacctccgccatcgtgcgccccgccagcctccaggtgccgaatgtccttctcacctcatcagattccagcgtcattatacagcaggctgtcccaagtccaactagttccacagttataacccaagccccaagcagtaaccggcccatagtgcccgtgccaggtccctttccattgctcctgcatctgcccaatggccagaccatgccagtggccattccagcctcaatcacctcgtccaatgtacatgtgcccgctgcagtccccctggttcggcctgtgacaatggtccccagcgtaccaggtatacctggaccctccagcccacagcccgtccagtccgaggcaaagatgcgattaaaggccgccctgacccagcaacaccctcctgtaaccaacggtgacaccgttaaggggcatggctcaggcttggttcgtacacagtccgaggaatcccgtccccaatccctacagcaacccgcaacatcaacaacagagactcctgcctctccagctcacacaacaccgcaaacacaaagtacatccggacgccgacgcagggcagccaacgaggaccctgatgagaagcgaagaaaatttctcgagcggaatagagctgccgctagtaggtgtcggcagaaacgcaaggtctgggtacagagcctcgagaagaaggcggaggatttgtcttctctgaacgggcaattgcagtag

SEQ ID NO: 22720 - DNA, 714 bp, synthetic construct
  misc_feature 1..714: note = Description of Artificial Sequence: Synthetic coding sequence
  source 1..714: mol_type = other DNA
atgaagttcaagctgcacgtgaacagcgcccggcagtacaaggacctatggaatatgtccgatgacaaacctttcctttgtacggcccctggttgtggtcagaggtttactaatgaagaccacctcgccgttcataagcataagcacgagatgaccctcaagttcggcccagcaagaaatgactctgtcattgtggccgatcagacgcccacccctacccggtttctgaaaaattgtgaggaagtgggcctctttaatgaactggcctcaccatttgaaaacgagttcaagaaagcctcagaagatgatatcaagaaaatgcccctggatttatcacccttagctacaccaatcattaggtctaaaatcgaggaaccctcggttgtcgaaacaacccatcaggactccccactgcctcaccccgagtcaacaaccagcgacgagaaggaggtgccccttgctcagaccgcacaaccaacatcagcaatcgtcagacccgcctctctacaagtgcctaatgtgctgctgacctcaagcgattcttctgtgatcatccagcaggctgtgccgtcacccacgtcttccactgtgatcacacaggctccgtcatcgaatcgtcccatcgtaagttttgatcagagcccgtggtgtctggtgttccaggagtcgcaagtcctgcctcttccaaatcagtattctcagaagcaaaagtag

SEQ ID NO: 22721 - DNA, 1464 bp, synthetic construct
  misc_feature 1..1464: note = Description of Artificial Sequence: Synthetic coding sequence
  source 1..1464: mol_type = other DNA
atgagcgacgacaagcccttcctgtgcaccgcccccggctgcggccagcggtttaccaatgaagatcacctagcagtacacaaacacaagcatgaaatgactctgaaatttggtcccgcccgcaacgactccgtcatcgtcgcagatcagacacctaccccgacaaggttcttgaaaaattgcgaagaagtcggcctcttcaatgagctggccagcccattcgagaatgagtttaaaaaagcctcggaggacgatatcaaaaagatgccactggatctaagcccactggcaacccctataatcagatccaagatcgaggaaccatccgtcgttgagactacccaccaggacagtcccctgccccaccccgagtccacaactagcgatgagaaagaagtgcctcttgcccagaccgctcagcccactagtgccatcgttcggccagcctcactgcaagtccccaatgttctcctgacatcaagcgacagttcggtgatcattcagcaggctgttccaagtcccaccagttctacggttatcactcaggctccttcaagtaataggccaatagtccctgtgccaggaccttttcccctactcctccaccttcccaacggtcagaccatgccagttgccatccccgcttcaatcacttcttccaacgttcatgtgcccgccgcggttcctctcgtgcggcccgttactatggtgccatctgtgccaggaatcccgggacccagctccccccagcctgtgcagagcgaggctaagatgaggctcaaagccgctctcacacagcagcaccctccagtgacaaacggcgataccgtgaagggacatggctctggcctcgtgcggacacagtcagaagaatccaggccccagtcactgcagcagcccgcaacaagcaccactgagactccagcctcgcccgcacataccactccacaaacgcagagtacctccggcagaaggagacgggccgccaacgaagacccagatgagaagcgtagaaagttcctcgagcgaaatcgtgctgccgcgagcagatgtcgccagaaaagaaaggtgtgggtgcagagcttagagaaaaaggcggaggacctgtcttccttgaatggccaactccagtcagaggtgacactgcttaggaatgaggtcgctcagctgaagcaactgctgttagcccacaaagattgccccgtgaccgctatgcagaaaaagagtggatatcacacagcagacaaagatgattcctcagaggacatcagcgtcccatcttctcctcacacggaagccatccagcacagttctgtgagcacctctaacggtgtcagtagcacctctaaggctgaagccgttgccacctccgtcctcacgcagatggctgaccagtccactgagccagcgctcagtcagatcgtgatggccccttctagccagtcacaaccatcaggttcatag

SEQ ID NO: 22722 - DNA, 1188 bp, synthetic construct
  misc_feature 1..1188: note = Description of Artificial Sequence: Synthetic coding sequence
  source 1..1188: mol_type = other DNA
atgaagttcaagctgcacgtgaacagcgcccggcagtacaaggacctctggaacatgagcgatgacaaaccttttttatgcacagccccagggtgtgggcaacggtttacaaacgaggaccacctcgcagtacacaaacacaaacacgagatgaccctcaagtttggccctgctcgaaatgattctgtcattgtggcagaccagacccccactcccacccggtttctgaagaattgcgaggaggtgggcctctttaatgagctggcgagcccttttgagaacgagttcaaaaaggcctcggaggatgatattaaaaaaatgcctctggatttgagcccactggctaccccaattatcagaagtaagatcgaggagccatccgttgtcgagacaacacatcaggactcccccttacctcacccggagtcaacaacatctgacgagaaagaggtgcctctagcccagacagcgcagcccacttcagccattgttcggcccgcaagtctccaagtgccaaacgtcctgcttaccagcagcgactcctcagtgatcatccagcaggctgtgccttcaccaacaagtagcaccgttattacacaggctccaagctcaaatagacctatcgtgccagtcccaggacccttccccctgttgctccacttgccaaacggacagaccatgccagtggccatccccgcttccattacatcctccaatgttcacgttccggcagccgtgcccctcgttcgcccggtgacgatggtaccttccgtacccggaattcctgggccctcatctccgcagcctgtgcagtcggaagccaagatgaggttgaaggcagcgctgactcagcagcacccacccgtgacgaacggcgatacagtcaaaggccatgggtcggggcttgtaaggacacaaagtgaagagagccgaccccagtccttacaacaaccagcaacctccaccaccgaaacaccggccagcccagcacacacgacaccacagacccagagcacatccggtcgtcggcgccgcgctgctaatgaagatccagacgaaaaaaggcgaaaattcctggagcgcaaccgtgcggctgcaagccggtgcaggcaaaagcggaaggtgtgggtacaaagcctggaaaagaaggctgaagacctgagttctctgaatggccagctgcagtag

SEQ ID NO: 22723 - DNA, 1188 bp, synthetic construct
  misc_feature 1..1188: note = Description of Artificial Sequence: Synthetic coding sequence
  source 1..1188: mol_type = other DNA
atgaagttcaagctgcacgtgaacagcgcccggcagtacaaggacctctggaacatgtctgacgacaagcctttcctctgcactgcccctgggtgcgggcagaggtttactaatgaggaccacctcgcggttcacaagcataagcatgagatgacgctgaagtttgggcctgctcggaatgattctgtgattgttgctgaccagactcccacccctacccggttcttgaaaaattgcgaggaggtcgggttgttcaatgagttggctagcccgttcgaaaatgagtttaagaaggccagcgaggacgacattaagaaaatgccccttgacctgagtccccttgctacacccattatccgatctaagatcgaggaaccaagcgtggttgagactactcaccaggatagtcccctgcctcatccagaatctacgacttccgacgagaaagaagtgcccttagcccaaacggcgcagcctacaagcgccattgtgaggccggcctcactccaggtccccaacgtcctgttgacgtcctcagactcgagtgtgatcatccagcaggccgtccctagccctacatcctctaccgtgattacccaggcaccctcttctaaccgccctattgttccagtccccgggccctttccactcttgctgcatctgcccaatggtcaaaccatgcccgtcgcaattcctgctagcattacgtcctctaatgtccatgtacccgcggccgtcccactggtgcgaccagtgaccatggtgcctagtgtacctggcatcccaggtccatcctctccgcagcccgttcagtcggaggctaaaatgcgcctgaaagcggctctaacgcaacagcacccgcctgtcactaatggagatacggtcaagggacacggaagcggccttgtgagaacacaaagtgaggagtcgagaccgcagagtctgcagcaacccgctacaagtactactgaaacgccagccagccccgctcatactacgccccagacacagtcaaccagcggtcgtaggagacgagctgccaacgaggaccctgacgagaaacgcagaaaatttctggaaagaaaccgagctgctgccagtagatgcaggcagaagcgtaaggtttgggttcaatccctggagaaaaaagcagaagacctgtcctccctgaatggccaactgcaatag

SEQ ID NO: 22724 - DNA, 660 bp, synthetic construct
  misc_feature 1..660: note = Description of Artificial Sequence: Synthetic coding sequence
  source 1..660: mol_type = other DNA
atgagcgacgacaagcccttcctgtgcaccgcccccggctgcggccaaagattcactaatgaggaccatctggctgttcacaagcataaacatgaaatgacactaaaattcggccctgcgaggaacgatagcgtgatcgtagctgaccaaactcccactccgacccgttttctgaagaattgtgaggaagtaggcctgttcaatgaactcgctagcccttttgaaaatgaatttaagaaggccagcgaggatgacattaagaagatgcctctggaccttagcccactagctacccccataatcagatctaaaatcgaggaaccgtccgtggttgagacaacacaccaagactcccctctcccccaccctgagagcacgactagtgacgaaaaagaggtcccgctcgctcagaccgcccaacccacatccgcaattgtgcgaccggcatccctgcaggttcccaatgtgctgctgacaagcagcgactcctctgtgattatccagcaggcagtcccctcaccaacatcgtccactgtaatcacacaggccccatcatcgaatcggcctattgtgagtttcgatcagagtccctggtgtctcgtgttccaggagagccaggtgctccccctgcctaaccaatactcccagaagcagaaatag

SEQ ID NO: 22725 - DNA, 1134 bp, synthetic construct
  misc_feature 1..1134: note = Description of Artificial Sequence: Synthetic coding sequence
  source 1..1134: mol_type = other DNA
atgagcgacgacaagcccttcctgtgcaccgcccccggctgcggccagagattcacaaatgaggaccacctggctgttcacaagcacaagcacgaaatgactctgaaattcggacccgccaggaacgatagtgtgatcgtcgctgaccagactcccacccctacacggtttctgaagaactgtgaggaggtgggactgttcaacgagttggcttctccttttgagaatgagttcaagaaggcaagcgaggatgacattaagaagatgcccttggacctttcccctctcgcgactccgatcattcgaagtaagattgaagagccctctgtagtagagacaacccaccaggattccccactcccccaccccgagagtacgacctccgatgagaaggaggtccctctggcacagacggcccagccaactagcgccatcgtccgacctgcttccctccaagtgcccaatgtgctactgaccagtagtgattcctccgtaataatccaacaagctgtgccttccccgacttcatcgaccgtgatcacccaagcccctagtagtaaccggcccatcgttcctgtgccgggcccattcccccttctgttgcacctccccaatggtcagactatgccagtggccattcccgcttctatcacttcttctaacgtgcacgtccccgcagccgtgcccctggtacggcccgtcactatggttcctagcgtgccaggtattcctgggccatccagtccacagcctgtgcagtccgaggctaaaatgagacttaaggccgctctcacccagcagcaccctccagtcaccaatggggacacagttaagggtcatggtagcggactcgttagaacgcagtcagaagaatctcgccctcaaagcctccagcagcccgcgacatcaaccaccgaaactccagccagccccgcccataccactcctcagactcagagtactagtggcaggagacgccgagctgctaacgaggaccctgacgagaagagaaggaagttcctcgagagaaaccgggctgccgcctcacgttgccggcaaaagaggaaggtctgggttcagtcactcgagaaaaaggccgaggacctcagctccctaaacggccagctgcagtag

SEQ ID NO: 22726 - DNA, 1449 bp, synthetic construct
  misc_feature 1..1449: note = Description of Artificial Sequence: Synthetic coding sequence
  source 1..1449: mol_type = other DNA
atgaagttcaagctgcacgtgaacagcgcccggcagtacaaggacttgtggaacatgtccgatgacaaacctttcctctgcacggcccctgggtgcggccaacggtttactaatgaggaccatctggctgatcagacccccacccccactaggttcctcaaaaattgcgaagaggtcggtctgtttaacgagttggcctctccattcgaaaatgagttcaagaaggccagtgaagacgatattaaaaagatgccgttagacttgtctccactggccactccaatcatccgcagcaaaatcgaggagccatctgtggtggagacaacccaccaggacagtccgctcccacaccctgagtcaacaacgagcgatgagaaagaagtgccactcgcacagactgcccaaccaacatcagcaatagtgcgcccagcgtcgctacaggtgccaaacgtcctgctcacctctagcgatagcagtgtgattatccagcaggccgtgcccagtcccacatctagcaccgtgatcacccaggcgccctcctctaatcgtcccatcgttcctgttcccggtccttttcctttgctccttcacctgcccaacgggcagactatgccggtagctatcccggcaagtattacatcttctaacgtgcacgttccggctgccgtaccattagtgcgtccggtaacaatggtgccatctgtgccgggcatccccggcccaagcagcccccaaccagtgcagtcagaagccaagatgcggctgaaagcagcactcactcaacagcaccctcccgtgaccaacggagacaccgtcaaaggccacgggagtgggctggtccgcacccagtccgaagagagtcggcctcagtccctgcagcaacccgcgacatcaacaaccgagaccccagcttcccccgctcacaccaccccccaaacacagtcaacttccgggcgccgacggagggctgccaacgaggacccagacgaaaagcgcaggaagttcttggagcgaaaccgggcagcagccagtaggtgccgccaaaaacgtaaggtgtgggtgcagtccctcgagaagaaagcggaggatttgagcagcttgaacggccagctgcagtctgaggttaccttgctgaggaatgaggtcgcgcagctgaagcagctgttgttggcgcataaagactgtcctgtgaccgccatgcaaaaaaagtccgggtaccataccgcggacaaggatgattctagcgaagatatctccgtgccatcatcccctcacaccgaggccattcaacacagcagtgtgagtacttccaacggagtttcaagcacgagcaaggcggaggccgttgccactagcgttctgacacaaatggcagatcagtccaccgaacctgctctctctcagattgttatggcaccttcatcccagagccagcctagcggcagctag

SEQ ID NO: 22727 - DNA, 2136 bp, synthetic construct
  misc_feature 1..2136: note = Description of Artificial Sequence: Synthetic coding sequence
  source 1..2136: mol_type = other DNA
atgaagctgaagctgaacgtgctgaccatcatcctgctgcccgtgcacctgctaattaccatctactccgccctcatttttatcccttggtacttcctaaccaacgcgaagaagaaaaacgcgatggccaaaaggataaaagcaaagccaaccagcgataaacctggttccccttaccgcagtgtaacgcacttcgatagtctggccgtcattgacattccgggggcagacacccttgacaaactgttcgaccacgctgtgtccaagtttggcaagaaagacagtctggggacacgtgagattctgagcgaggaaaacgagatgcagcccaacgggaaagtatttaaaaagctgattctaggcaactataaatggatgaactacctcgaggtgaaccggcgcgtgaataatttcgggagcgggctaaccgccctaggtctgaagcctaaaaacacaatcgctatattctgcgaaacgcgggcagaatggatgattgccgcgcagacctgctttaaatacaacttccctcttgttactttatatgctactttgggaaaggaagctgtagttcacggtttaaacgagtccgaggcaagttatctgattacgagcgttgaactgctggaaagcaagctgaagacagcccttctggatatctcttgtgtgaaacacatcatatacgtcgataataaagcaattaacaaagcagaataccctgagggcttcgagatccacagtatgcagtccgttgaggaattgggttccaacccagagaacctcgggatacctccttccagacccacaccttctgacatggcaattgtgatgtacacctccgggtctacagggaggccaaaaggggtgatgatgcaccactccaacttgattgctggcatgaccggacagtgtgaacgcatcccaggccttggtcccaaggacacttacattggatatttgccactggcccacgttctggaattaactgccgagattagctgcttcacctacggatgccgaatcggatacagcagtcctctgacgctatcagatcagtcgagtaaaattaaaaagggcagtaaaggggactgtactgtacttaaaccgacccttatggcggcagtgcccgagattatggaccgtatttacaaaaatgtgatgtccaaggtgcaggaaatgaactacatccagaaaaccctgtttaagattggatacgactacaaactagagcagattaagaagggatacgatgcccccttatgtaacctgctgctgtttaaaaaggttaaggcacttctgggaggaaatgttagaatgatgctctcaggcggagcccctctcagcccacagacgcaccgattcatgaacgtgtgcttctgctgcccaattggacagggctacgggttgacagagagttgcggtgctggtactgttactgaggtaactgattataccacaggcagagtaggagcccccttaatatgttgtgaaattaaactgaaggactggcaagagggtggatacactatcaatgataaacctaaccccagaggggaaattgtgataggaggccagaacatctccatgggctatttcaaaaacgaggagaagacggccgaagattatagtgtggatgaaaatggtcaacgctggttttgtaccggcgacatcggggaattccatcccgacggctgcttgcagatcattgaccgcaaaaaggacctggtaaaactgcaggccggagagtatgtttcactcggcaaggtggaagcagccttgaagaattgtccattgatcgataacatatgtgcctttgcaaaaagcgaccagtcttatgtgatctcattcgttgttcccaaccagaagaggctgacattattggcccagcagaaaggcgtggagggcacttgggtagatatttgtaacaatcctgccatggaggctgagatcctgaaggagatacgagaggctgccaacgctatgaagctggagcgatttgagatcccaatcaaggtccggctgagccccgagccatggactccagaaacgggcctggtgaccgatgcatttaaattgaaacgaaaggagttacggaatcattacttgaaggatattgagaggatgtacggaggcaaatag

SEQ ID NO: 22728 - DNA, 2013 bp, synthetic construct
  misc_feature 1..2013: note = Description of Artificial Sequence: Synthetic coding sequence
  source 1..2013: mol_type = other DNA
atggccaagcggatcaaggccaagcccaccagcgacaagcccggcagtccgtatcgcagcgtaacacatttcgacagcttagccgtgatcgacatacctggggccgacaccttagataagctgtttgaccatgcagtgtctaagtttggtaagaaggacagcttgggcactagggagattctatcagaagagaacgagatgcagccaaatggtaaagtgtttaaaaagcttattctcggaaactacaaatggatgaattacctggaagtcaatagacgggtgaataactttggcagcggtctcactgctctcgggctcaaacccaagaataccattgccattttttgtgagacacgtgccgagtggatgatcgccgcccagacctgctttaagtataacttccccttagtaacgttgtacgcaaccctgggcaaggaggccgtggttcatggcctgaacgaaagcgaggcctcataccttattactagcgtggagctgttggaaagtaagctgaagacagcattgttggacatctcctgtgtgaagcacattatttatgtggataacaaggctataaacaaggccgaatatcccgaggggttcgaaatccattccatgcaatctgttgaggagttaggtagtaatcccgaaaatctggggatcccaccttcacgccctacgcccagcgacatggccatcgtcatgtatacatcaggtagtactggtcggcctaagggtgttatgatgcatcatagcaacctaattgctggaatgacaggacaatgcgaacgcattccaggcctcggaccaaaggatacgtacatcggctacctgcctctggcccacgttctggaactgacagccgagatctcctgcttcacatatggatgtaggatcgggtattccagccctctgaccctctctgatcagtcttccaagataaagaagggtagcaagggcgattgcaccgtcctgaaaccgacattgatggctgcagtgcccgaaataatggacaggatctataaaaatgttatgagtaaggtgcaagagatgaattacattcagaagactctgttcaagatcggttatgactacaagcttgagcagatcaaaaagggttacgacgcaccactgtgcaacttgctattgttcaagaaagtcaaagccctcttggggggcaacgtgagaatgatgctgagtggtggagccccactgtccccccaaacccaccgatttatgaacgtttgcttctgctgcccaatcggccaggggtacgggctgacagagtcttgcggggccggcaccgtgacggaagtcactgactacacaaccggaagagtgggagctcccttaatttgctgtgaaattaagctgaaggattggcaggaaggaggctacaccataaacgacaaaccaaatccccggggggagatagtaataggaggccaaaatatctctatggggtatttcaagaacgaggaaaagacagcagaggactattctgtcgatgagaatgggcaaagatggttttgtacaggcgatatcggcgagttccatccagatgggtgcctgcagatcatagatagaaagaaagatctggtgaagctgcaggccggggaatatgtgtccctgggtaaagtcgaagccgccctgaaaaactgtcctttaatcgataatatctgtgctttcgcaaagtctgaccagagctacgtgatcagtttcgtggttccaaatcagaaacgactcaccctgttagctcagcaaaaaggagtcgaaggaacctgggtggacatttgcaataaccctgccatggaggccgagatactgaaagaaatccgcgaggcagccaatgcaatgaagctggaacgcttcgagatacctatcaaggtgcgtctgagccccgaaccctggacaccagaaacgggactggtgacagacgcattcaagttgaagcggaaggaacttaggaaccattacctgaaggatatcgagagaatgtacggcggaaagtag

SEQ ID NO: 22729 - DNA, 2136 bp, synthetic construct
  misc_feature 1..2136: note = Description of Artificial Sequence: Synthetic coding sequence
  source 1..2136: mol_type = other DNA
atgaagctgaagctgaacgtgctgaccatcatcctgctgcccgtgcacctgcttatcacaatctatagcgccctcatcttcattccatggtacttccttactaacgccaaaaagaagaacgccatggccaagcgaatcaaggcaaagcctacctctgataagccaggctcaccctatcgctctgtgactcattttgattccctcgccgttatcgacatccccggtgccgacacactcgacaaattgttcgatcacgccgtgtctaagttcggcaagaaagacagcctgggaactcgcgaaatccttagtgaagagaatgagatgcagcctaacggcaaggtctttaagaagctgatcttagggaactataaatggatgaattaccttgaagtgaatcgtagagtcaacaactttgggagtggtctaaccgcactcggactgaaacctaaaaatacgatcgcaattttttgcgaaacccgcgccgaatggatgatcgccgcccagacatgcttcaagtacaactttcctcttgtgaccctttacgcgactctgggtaaggaggccgtggttcatgggctgaatgagagcgaggcatcctaccttattacatccgtcgaactcctggagtccaagttaaagacggccctattggacatcagctgcgtcaaacatattatttatgttgacaataaagcgatcaataaggccgagtatcccgaggggttcgaaattcatagcatgcagtccgtggaggaactcggatcaaatcccgagaatttgggcatccctcctagtcgtcctaccccctctgacatggctatcgttatgtatacatctggaagtaccggccgcccgaagggagtgatgatgcaccactccaacctaatcgctggcatgacgggccagtgtgagagaatcccgggccttggaccaaaagacacctacatcggatatcttccactagcccatgttctggaactcacggccgagatttcgtgcttcacatatggctgtcgtatcggctacagcagcccactcactttgagtgaccagtctagtaaaatcaagaagggcagcaaaggtgactgtaccgttctaaagccaacattaatggcagccgtgccggagattatggatcgtatatataaaaatgttatgtctaaagtgcaggaaatgaactatatccagaagacgctcttcaaaattgggtatgactataaattagaacagataaaaaaagggtatgacgctcctctatgcaacctgcttttgttcaaaaaggtcaaggccttactcggtgggaatgtgcggatgatgctgtctggcggtgcacccctttctccccagacccatcgatttatgaacgtctgcttctgctgccccattgggcaaggatatggactgacagagtcatgtggcgcaggaaccgtgacagaggttactgattatacaaccggccgtgtaggggcacccctcatatgctgtgagatcaagctgaaagactggcaggagggtggctacacgattaatgacaagccgaaccctcgcggcgagattgtaatcggagggcaaaatatctccatgggctactttaagaatgaggagaagactgccgaggactattccgtggacgaaaatgggcaacgatggttttgcaccggggacatcggcgagtttcaccccgatgggtgcttacaaattatagaccgtaaaaaagacttggtgaagctgcaggccggggaatacgtgtcgttgggaaaggtggaggccgccttgaagaattgccctctgatcgataacatatgcgcatttgcgaaatcagatcagagctatgtcatctctttcgtggtccccaaccagaagcggctgacactgctcgcccagcagaagggcgttgaggggacctgggtggatatctgcaacaatcccgctatggaggctgaaattctgaaggagatcagggaagcagccaacgcaatgaagctggagcgatttgaaattccaattaaagtcagactcagtccagagccttggactcccgagacgggcctcgtgaccgacgcctttaagttgaagcgaaaggagttgagaaatcattacctgaaggacatcgaacgtatgtatgggggcaaatag

SEQ ID NO: 22730 - DNA, 165 bp, synthetic construct
  misc_feature 1..165: note = Description of Artificial Sequence: Synthetic coding sequence
  source 1..165: mol_type = other DNA
atgaagctgaagctgaacgtgctgaccatcatcctgctgcccgtgcatctgcttattacaatctactctgccttgatctttatcccatggtattttctgacaaacgctaaaaagaagaacgccatggcaaagaggattaaagcaaagccaactagcgataagtag

SEQ ID NO: 22731 - DNA, 438 bp, synthetic construct
  misc_feature 1..438: note = Description of Artificial Sequence: Synthetic coding sequence
  source 1..438: mol_type = other DNA
atgaagctgaagctgaacgtgctgaccatcatcctgctgcccgtgcatctcctaattaccatctattcagctttgatcttcatcccttggtatttcttgactaacgcaaagaagaagaatgcaatggcaaagaggatcaaggcgaagccaacatcagataagcctgggtccccctatagaagtgtcacccacttcgacagtctggccgtaattgatatacccggggctgacacactcgacaaactgtttgatcatgcagtttctaagttcgggaagaaagactccctgggaacaagggaaatactgtctgaggagaatgagatgcaacctaatgggaaggtgtttaagaagctcattttaggaaattacaagtggatgaattatttggaggtgaaccggagggttaataactttggcagtgggcttacagccctgtag

SEQ ID NO: 22732 - DNA, 381 bp, synthetic construct
  misc_feature 1..381: note = Description of Artificial Sequence: Synthetic coding sequence
  source 1..381: mol_type = other DNA
atgaagctgaagctgaacgtgctgaccatcatcctgctgcccgtgcatctgctaatcactatttacagcgccttaatcttcatcccttggtacttcctcactaacgctaaaaagaagaacgcaatggccaaaaggatcaaggctaagccaactagcgataaacccggcagcccctacagaagcgtcactcacttcgatagcttggctgtcatcgatatcccaggggccgataccctcgacaaattattcgaccatgcagtgtccaaatttgggaagaaggattccttaggaaccagagagattttgtcggaggagaacgaaatgcagccaaatggcaaggtattcaagaagctgatactgggaaactataaatggatgtag

SEQ ID NO: 22733 - DNA, 465 bp, synthetic construct
  misc_feature 1..465: note = Description of Artificial Sequence: Synthetic coding sequence
  source 1..465: mol_type = other DNA
atggccaagcggatcaaggccaagcccaccagcgacaagcccggcagtccttacaggtccgtgacccattttgacagccttgccgtgattgatatccccggagccgacacccttgacaagctgttcgatcacgccgtctccaaatttggaaaaaaagacagcctagggacacgggaaatcctgtctgaggagaatgaaatgcagccaaacgggaaagtttttaagaaactcatcctgggaaactacaagtggatgaactacctcgaagtgaaccgaagagtgaataactttggttccggactaaccgcacttggtttaaagccaaagaacacaatcgccattttttgtgagacccgggctgaatggatgatcgccgcccagacgtgtttcaagtataatttccctctggtcacactgtacgccacactggggaaagaggctgtggtgcatggccttaacgagtag

SEQ ID NO: 22734 - DNA, 387 bp, synthetic construct
  misc_feature 1..387: note = Description of Artificial Sequence: Synthetic coding sequence
  source 1..387: mol_type = other DNA
atgaagctgaagctgaacgtgctgaccatcatcctgctgcccgtgcacctgttgattacgatctactcagcgttaatttttataccatggtactttttaactaacgccaagaagaaaaacgcaatggcgaaacggatcaaagcaaaacccacttcggacaaaccgggaagcccttaccggagtgtcactcattttgactctctggcagtaatagacatccccggagctgatacgctggacaagctgttcgaccacgccgtttctaagtttggcaagaaggacagccttggaaccagagagattctgtctgaggaaaacgaaatgcagccaaacgggaaggtgtttaagaaacttattctgggcaactacaagtggatgaactattag

SEQ ID NO: 22735 - DNA, 2475 bp, synthetic construct
  misc_feature 1..2475: note = Description of Artificial Sequence: Synthetic coding sequence
  source 1..2475: mol_type = other DNA
atgcggcagagcctgctgttcctgaccagcgtggtgcccttcgtgctggccccccggcctccagacgatcccggtttcggccctcaccagagactggaaaagttggatagtttactttcagactatgatatcctgtcactgagtaatatccagcaacattcggttcgcaaacgtgacctgcagacatcaacacacgtcgagacgctgctgacattctccgcactgaaaaggcattttaaattgtatctcactagctccactgagcggttcagccaaaactttaaggtggtggtcgtcgatgggaaaaatgaatcagaatacaccgtgaagtggcaggactttttcaccggacacgtagtgggcgagcccgattcaagggttctggctcatatcagagacgacgatgttattatacgcatcaataccgatggagctgagtataatatcgaaccactctggagattcgtaaacgacacgaaggacaagagaatgctggtgtataagtctgaagatattaagaacgtatccagattgcagagccctaaagtctgcggataccttaaggttgacaatgaagaactgctccctaagggtctcgtggacagggagccgcctgaagagctcgtacaccgggtgaagcgcagggccgatccagacccgatgaagaacacttgcaagctcctggtggtggctgaccataggttttataggtatatgggaaggggggaggaatcaaccacaaccaattacctcatcgagctgatcgatcgggtcgacgacatttatagaaacacaagctgggacaacgctgggttcaagggctacggaattcagattgaacagatccggattctaaagtcacctcaggaggtaaagcccggggaaaaacattacaacatggcaaagtcctacccaaacgaagaaaaagacgcctgggatgtgaaaatgctcctggagcagttttcttttgatatcgccgaggaggcgtcgaaagtgtgcctggcgcacctgtttacctaccaggatttcgatatgggaactctgggactggcttatgtcggtagtccacgcgccaatagccatgggggcgtgtgcccgaaagcatattactcacccgtgggcaaaaaaaatatctacttgaattccggactgacctccaccaaaaactacggaaagaccatcctcacaaaggaggcagacctggtgacaacccatgagctcggacataatttcggcgcagaacatgatcccgatggactggcagaatgcgctccaaatgaagaccaggggggaaaatatgttatgtaccccatcgcagtgtcaggagatcacgagaataacaagatgtttagtaattgcagtaaacagagcatctataaaacgatcgagagtaaggctcaagagtgcttccaagaacgctccaacaaggtctgcggcaactcccgtgttgatgagggcgaagaatgtgaccccggaattatgtatctgaacaatgatacctgctgcaatagtgattgcaccttaaaagagggcgtgcagtgttcagaccggaacagcccctgttgtaagaattgtcagttcgagaccgcgcagaaaaagtgtcaggaagctattaacgcaacttgtaagggagtttcgtattgcacaggcaatagttccgagtgcccaccgcccgggaatgcagaggatgatacagtctgtctcgatctcgggaagtgcaaggatggaaagtgtatcccattttgcgagcgcgagcagcagctggagtcgtgtgcctgtaacgagacagataatagctgcaaagtctgttgccgcgatctatccggacgatgcgtcccctatgtagatgctgagcagaaaaacctattcctgagaaaaggaaagccttgcacggtgggcttttgtgacatgaatggcaagtgtgagaaacgggtacaggacgtgatagagcgattttgggacttcattgaccagctgtctatcaatacctttggaaaatttcttgcggacaacatcgttggcagcgtccttgtgttctccctgatcttttggatcccattctccatcctcgtgcattgcgtcgacaagaagttagataaacagtatgagtcgctttcactctttcatccgagtaacgtcgagatgctcagcagcatggatagcgcctctgttcggatcataaagccattccctgctcctcaaacccctggaaggctgcagccggcccctgtcatcccctcggcgccagccgcccccaaactcgaccaccagcggatggacacgattcaagaggaccccagtacagacagtcacatggatgaggatggatttgagaaggacccctttcccaattcaagcactgccgctaagtcctttgaagatcttaccgaccaccccgtaacgcggtccgaaaaagctgcttcatttaagctccaaagacagaatcgagtcgactcaaaggaaactgaatgctag

SEQ ID NO: 22736 - DNA, 777 bp, synthetic construct
  misc_feature 1..777: note = Description of Artificial Sequence: Synthetic coding sequence
  source 1..777: mol_type = other DNA
atgcggcagagcctgctgttcctgaccagcgtggtgcccttcgtgctggccccccgccctccagacgatccaggattcggcccccaccagcgcctagaaaaactggactcgctcttgtctgactacgacatcctctctctgagtaacatccaacaacacagcgtgagaaagagagatttgcagacaagcacccacgtagaaacattgctcacattctctgccctgaagcgacactttaagctgtacctcactagtagtacagagagattttcacagaatttcaaagttgtggtagtagatggcaagaacgaatccgagtataccgtgaaatggcaagacttctttaccggccacgtggtcggcgagccggattccagagttctggctcatatcagagatgacgacgtaattatccgtatcaatacagatggggccgagtataatatagagcctttgtggcggtttgtgaacgatacaaaagacaagagaatgctggtatataagtctgaagacattaagaacgtgtctcggctgcagtctccgaaagtctgtgggtatctgaaggtcgataatgaagagctcctgcctaaaggccttgtggatagggaacctccagaagaacttgtgcaccgcgttaagagacgcgcggatcccgacccgatgaagaatacgtgcaagcttctagtggtggcagatcatcgtttctaccgatacatgggtaggggggaagagagcaccacgaccaactacctcatccacacagatagagccaactag

SEQ ID NO: 22737 - DNA, 2499 bp, synthetic construct
  misc_feature 1..2499: note = Description of Artificial Sequence: Synthetic coding sequence
  source 1..2499: mol_type = other DNA
atgaagccccccggcagcagcagccggcagccccccctggccggctgcagcctagccggagccagttgcggcccacagcgaggacctgctggttcagtgcccgcttctgcccctgcccgtacgcccccatgccgcttgctgttagtcttgctgctgttgcccccgctagccgcttccagtaggccaagggcctggggggcggccgccccatccgctccccactggaacgaaacagccgaaaaaaatctcggggtgttggccgacgaggacaatactctgcagcaaaattcgtcaagtaacatctcctacagtaacgcgatgcaaaaagagataactttgcccagcagactgatctattacatcaatcaagactctgaaagtccatatcacgttctggatactaaagcccgccaccagcaaaaacataacaaggctgtgcacttggctcaagctagcttccagattgaggccttcggatcgaaattcatcctggatctcattttaaataacgggctgctgagctctgattacgtggaaattcattatgagaatggcaagcctcagtactctaaaggcggtgaacactgttactaccatggcagcatacgaggggtaaaggactccaaggtggcgttgagtacctgcaacggcctgcatggcatgttcgaagatgacacctttgtgtacatgatcgagccactcgagctagttcatgatgaaaagagcaccggacgtcctcacattatccagaaaacattggccggacagtactcaaagcaaatgaagaatctgacgatggaaaggggtgatcagtggcctttcctgagtgaattacagtggcttaaaagaagaaaaagagcagtgaatccatcccgtggaatctttgaggaaatgaaatacttagagctgatgatagtaaacgaccataaaacttataagaaacatcgcagttcccacgcacatacaaataatttcgccaagagtgtggtcaatcttgtggacagcatttacaaggagcagcttaataccagggtggttctcgttgctgtggagacctggacggagaaagaccagattgacataaccacaaaccctgtgcaaatgctgcatgaattcagcaaataccggcagcgaatcaaacagcatgccgacgccgtccacttgatcagccgggtgacattccactacaaacgttcatcccttagttattttgggggggtctgttcacggaccagaggcgtgggcgttaatgaatatggcctgccaatggccgtggctcaggtgctgtctcagtcactggctcagaatttaggaatccaatgggagccttcttccagaaaaccaaagtgcgactgtacggaaagctggggcggctgcattatggaggaaactggagtcagccattcacggaaattctctaagtgttctatcctggagtaccgggatttcctccaaaggggggggggcgcttgcctctttaatcgccccaccaagctcttcgagccaacagagtgtggcaatggatatgttgaagccggagaagagtgtgactgcggttttcatgtggaatgttacggactgtgttgtaaaaagtgttcactctctaatggtgctcactgtagtgatggtccctgctgcaataacaccagctgtctatttcagccgaggggatatgagtgccgcgatgcagtgaacgagtgcgacatcaccgaatattgcacaggcgattcaggccagtgtccccccaatctgcataagcaagatggctacgcctgcaaccagaaccagggccgctgttataatggggaatgcaaaacccgggataaccagtgccaatatatttgggggaccaaagcggcgggctccgacaagttttgctacgagaagctcaataccgagggcacagaaaaaggcaactgtgggaaggacggcgaccggtggatccagtgtagcaagcacgacgtcttctgcggattcttgctgtgtaccaacctgaccagggctccccgaatcggccaattacagggcgaaattatccctacgagcttctaccatcaagggagggtgatcgactgtagtggcgcccatgttgttctcgatgatgacacagatgtcggatacgtcgaagacggaactccatgcggaccatctatgatgtgcctcgacagaaagtgcttgcagattcaggccctcaacatgtccagttgcccactcgactcgaagggaaaagtttgcagcggacacggagtctgctcaaacgaggctacctgcatatgtgacttcacttgggccggcactgattgctccatccgggatcccgtgcggaatctgcacccgcccaaggacgagggccctaaagggccaagtgccacaaacctaataatcggatcaattgctggggcaattctggtcgcagccatcgtgctgggtggcactgggtggggcttcaagaacgtgaagaagcgccggttcgaccccacccaacagggacccatctag

SEQ ID NO: 22738 - DNA, 2499 bp, synthetic construct
  misc_feature 1..2499: note = Description of Artificial Sequence: Synthetic coding sequence
  source 1..2499: mol_type = other DNA
atgaagccccccggcagcagcagccggcagccccccctggccggctgcagcttggctggggcctcctgtggcccccaacggggccctgccggcagcgtgccagcctctgcccctgccaggacacctccatgtcgactcctgctggttctgctcctacttcctccgctcgccgctagcagcagaccacgtgcctggggcgcagctgctccaagcgcaccgcattggaacgagaccgccgaaaaaaacttgggggtcctggccgacgaggacaatacattgcagcagaactctagctctaacataagctatagcaacgctatgcagaaggagataaccctgccttccagattgatctactatattaaccaggactctgaaagcccctatcacgttctggacaccaaagccaggcaccaacagaaacacaataaggccgttcacttagcgcaggccagcttccagatcgaagcatttggctccaaattcattctcgatctcatcttgaataatggactgctctcctcagattacgttgagattcactatgagaatgggaagcctcagtactctaaagggggagagcactgctattaccacggaagcatccgtggtgtgaaagactcaaaagtcgcgctctccacatgcaatgggcttcacgggatgtttgaggatgacaccttcgtctatatgattgagcctttggagctggtccatgacgaaaagagtactggtcggccacatatcattcaaaaaacgctggccgggcagtattcaaagcagatgaaaaacctgactatggagagaggcgatcaatggcctttcctgtccgagctgcagtggcttaagcgtaggaaacgcgcagttaatccttcccggggcatctttgaagaaatgaagtacttggagttgatgatagtcaacgatcataaaacttataaaaagcaccgttccagtcacgcccacaccaacaactttgctaaatctgtcgtcaacctggtggatagcatatataaagaacagctgaataccagagtagtcctggtggccgtggagacctggactgagaaggatcaaatcgacattaccactaacccagttcagatgctgcatgagttcagcaagtatcgacagaggatcaagcagcatgctgatgctgtgcatctgatctcgagggtgacttttcattataaacgctcctccctatcgtattttggcggtgtctgttcacggacgcggggggtgggagtgaacgagtacggactgccgatggccgtggcccaagtgctcagtcaatcgctagcacaaaatctgggcatccaatgggagcccagcagccgaaaacctaaatgcgattgcaccgagtcctggggcgggtgcatcatggaagagacaggagtctcccatagtaggaagttctccaagtgcagtatcctggaatacagagacttcctgcagagaggcgggggcgcatgcctgttcaatcgccctacaaagctgttcgagccaacagaatgcgggaacggctacgtggaggctggggaggagtgcgactgcggattccatgtggaatgttatgggttatgctgcaaaaaatgctccctgtctaacggcgcccactgcagcgatggcccgtgctgtaataacacaagctgcttgttccaacctcggggatatgaatgtagagacgccgttaatgagtgcgatattacagagtactgtaccggagattctggccagtgtcctccaaaccttcataagcaggatggctacgcttgcaatcagaaccaaggccggtgctataacggggagtgcaagaccagagacaaccagtgtcaatacatctggggtactaaggcagctggatccgacaaattctgttatgagaaactgaatacagagggcacagaaaaaggaaactgcggaaaagatggggacaggtggattcaatgctctaaacacgacgttttctgtggctttctactgtgcaccaacctgacccgcgccccccgcatcggacagctccaaggggagattatccccacctctttctaccaccagggccgcgtaatagactgttctggagcgcatgtggtgttagacgatgacaccgacgtggggtacgtcgaagacggtaccccttgcggacctagcatgatgtgcctggacagaaagtgtcttcagattcaggcccttaacatgagttcatgcccactggattctaaagggaaggtgtgctccggacacggggtttgctccaatgaggctacctgcatttgtgattttacttgggcgggcacagactgctccattcgggaccccgtcaggaacttgcatccccccaaagacgaaggcccaaaggtgaatatggccacttctcggttaatcggtgccgtggctggaaccatcctggcactaggggtcatcttcggaggaaccggctgggggattgaaaatgtgaaaaaaaggcggtttgaccccacgcagcaagggcccatatag

SEQ ID NO: 22739 - DNA, 2499 bp, synthetic construct
  misc_feature 1..2499: note = Description of Artificial Sequence: Synthetic coding sequence
  source 1..2499: mol_type = other DNA
atgaagccccccggcagcagcagccggcagccccccctggccggctgctccctagccggagcttcatgcggaccccagaggggaccagccggcagcgtgcccgcctccgcaccagcaaggactccaccctgtagattacttctggtcctgctgctgctgcccccactggcggcctcatctaggccccgagcttggggagccgctgcaccctccgcaccccattggaatgaaacagccgagaaaaacctgggtgtgctggccgacgaagataacaccctccagcagaatagttcctcaaatatcagctatagcaacgctatgcaaaaggagatcacattaccatcgcggctaatttactacatcaaccaggactcagagtccccatatcacgtgctggataccaaagcgcgacaccagcagaagcacaataaggccgtgcacttagcacaggcgagcttccagatcgaagcattcgggtccaagtttatcctagacctgatactaaacaatggcctgctgtcctccgattacgtggagatacactatgagaatggcaaaccacagtattcaaaaggcggtgaacactgttactatcatgggtcaatacgcggtgtgaaggacagcaaagtagcattgtcaacttgcaacggtttgcacggaatgtttgaggatgatactttcgtgtacatgatcgagcctctggagctggtacacgacgagaagtccacaggtcgcccccatatcatccagaaaacactggctggacagtacagcaaacagatgaagaatttaactatggagagaggagaccagtggcctttcctttccgaacttcaatggctgaaacgcagaaagcgggccgtgaacccatccaggggaattttcgaggagatgaagtacctagagctgatgattgtgaatgatcataagacatacaagaaacaccgatccagccacgcccatactaacaatttcgcaaagagcgttgttaatttggttgacagcatttacaaggaacaactcaacaccagggtggtgctggttgctgtggaaacatggacggagaaggatcagatcgacatcaccactaacccggtccaaatgctgcatgagttttcaaaatataggcaacggatcaagcagcacgccgatgcagtgcacttgatctctcgcgtcaccttccattataaacgcagcagcctgtcttactttggtggcgtctgtagcaggacacggggcgtaggcgttaatgaatatggactgccaatggccgttgctcaggtgctgtcccagtctttggctcagaatctcggaattcagtgggagccttcaagccgaaaacccaaatgcgactgtacggagagctggggcgggtgcataatggaggagaccggagtgagccactctagaaagtttagtaaatgcagcatcctcgaataccgggatttccttcagcgcggtgggggcgcctgtctcttcaatcgacccaccaaactttttgagcccacagaatgtggtaatggatacgtggaagccggtgaggagtgtgactgtggcttccacgtggaatgttatggactgtgttgtaagaagtgtagtttatccaacggagctcactgttctgatggtccatgctgcaacaacacttcctgtctgtttcagccacgcggttatgagtgcagggatgctgttaacgaatgcgacatcaccgagtactgcacaggagacagcggacagtgtcctccaaacctgcataagcaggatgggtatgcttgtaaccagaaccaaggtcggtgctataatggggagtgtaagacgcgggacaatcagtgccagtacatctggggcactaaagccgctggaagcgacaagttttgttacgaaaaattgaacaccgagggaactgagaagggtaactgcggaaaagatggagaccgttggattcagtgtagcaaacatgacgtgttttgtggtttcctcctctgcaccaatttgaccagggcgccacggataggccagctgcagggagagataatcccgacttccttttaccatcagggtcgtgttatcgattgcagcggcgctcacgtagtgctggacgacgataccgacgtgggatacgtggaagatggcacaccatgcggaccctcaatgatgtgtctggatcgcaagtgtttgcagatccaggccttgaacatgagtagctgccctctcgactcaaagggaaaggtctgtagcgggcacggggtctgctcaaacgaggccacctgtatttgtgatttcacttgggcaggtaccgattgttcgataagagatccagtccgcaatttgcaccccccaaaagacgagggccctaaggagatgtccaggcgggaggggtcaatccttctgtcaaaagccccatcagagagcgcggccctggatgggcaccgcctggcacttctcgactcagggtacgatatactggccgcggtgctgctggaattgctaagcctgtag

SEQ ID NO: 22740 - DNA, 2100 bp, synthetic construct
  misc_feature 1..2100: note = Description of Artificial Sequence: Synthetic coding sequence
  source 1..2100: mol_type = other DNA
atgcagaaggagatcaccctgcccagccggctgatctactacatcaatcaggactccgagtctccctaccatgtgctggatacaaaagctagacatcagcagaagcacaataaagctgtccacctcgctcaggcgtcttttcagatcgaggcgttcggatctaagtttatcctcgacctgattcttaacaatggcctcttaagcagtgactacgtcgaaatacactacgagaatggcaaaccacagtactcaaaggggggtgaacactgttactaccacggttctatacgaggcgtcaaggacagcaaagttgctctgtccacatgcaatgggcttcacgggatgtttgaagatgacactttcgtgtatatgatagagccactggagctcgtgcatgacgaaaaaagcacaggccggccccatattatccagaagaccttggcagggcagtattccaagcaaatgaaaaacctaactatggagaggggcgatcagtggcctttccttagtgaacttcaatggcttaaaagaaggaagagggcggtaaacccatccagaggaatctttgaggagatgaaatatcttgaactgatgatcgtcaacgaccacaaaacttacaaaaaacatcgttcctcccacgcacacactaacaattttgcaaaatcagtggttaacctggtggattctatctacaaggagcagttgaacacgcgcgtagtcctggttgctgtggagacctggactgagaaggatcaaatcgatatcacgacaaatcctgtgcagatgctgcacgagttttccaaatatcggcagcgcattaagcaacacgccgacgcggtgcacctcatatccagagtaacatttcactacaaaaggagctcactctcctacttcggtggcgtgtgcagccgtaccagaggagtgggggtgaacgagtacggcctgcctatggcagtggcccaggtgttatcccagtcccttgcccagaacctgggcatccagtgggaacccagcagtcgaaaacctaaatgtgactgtaccgagagttggggtggttgcatcatggaggaaaccggcgtgagtcattcgcgcaaatttagtaagtgttccatcctagagtaccgagattttctacagcgcggaggaggcgcctgcctttttaaccggcctactaagctattcgaacccacggagtgtggcaacgggtatgtcgaggcaggcgaggaatgtgattgcggctttcatgttgaatgctacggcctctgctgcaagaagtgctcactgagcaacggtgctcactgctctgacgggccttgctgtaataacacctcatgcctcttccaaccacgggggtatgagtgccgggatgccgtgaacgagtgtgatattaccgaatattgtactggtgacagtgggcagtgcccaccaaacctgcataaacaggacgggtatgcttgcaatcagaaccagggtaggtgctacaacggggaatgtaagaccagggacaatcagtgccagtacatctggggcactaaagccgctggctcagacaaattctgttacgaaaagctgaataccgagggcaccgagaagggaaattgtggaaaagacggcgaccggtggatccaatgctcaaagcatgatgtgttctgcgggtttttgctctgtactaacctgacacgggccccacgtattggccagctgcagggagaaatcattccaacgagtttttaccatcaaggccgtgttattgactgttccggggcccacgtggtcctggacgacgacactgatgtgggatacgtagaggatggaacaccatgtggcccctctatgatgtgtcttgacaggaaatgcttgcaaattcaggcgttgaacatgagttcttgtccactggactcgaaggatgagggccccaaggcatgctttttgaagcgtacaaagtgcaaaagctaccctaagcaccgcaaatgccaggaggagaaagtgcgatcttactcagctagaccccaccttaatcagctaagatggatggacacagcccttcactgctggattctcggaatgacttattcacagcagtgctactggaactactag

SEQ ID NO: 22741 - DNA, 324 bp, synthetic construct
  misc_feature 1..324: note = Description of Artificial Sequence: Synthetic coding sequence
  source 1..324: mol_type = other DNA
tgacagatccaggccctgaacatgagcagctgccccctggacagcaagggtaaagtgtgttcaggccacggcgtgtgcagtaacgaggccacctgcatttgcgacttcacatgggccggcaccgactgcagtattcgggatcccgtgcggaatctccatccaccgaaggacgagggacccaaagagatgtcccggagagaagggagcatcctcctgtctaaggcccccagcgagtctgccgccctggatggccaccgtctggccctgctagattctggctatgatatactggcggccgtgttactggaacttttgagcctgtag

SEQ ID NO: 22742 - DNA, 8532 bp, synthetic construct
  misc_feature 1..8532: note = Description of Artificial Sequence: Synthetic coding sequence
  source 1..8532: mol_type = other DNA
atggccgccgccagctacgaccagctgctgaagcaggtggaggccctcaaaatggaaaattctaaccttaggcaggagttggaagataacagtaatcatcttaccaaactggaaacggaagcctcaaacatgaaggaggtactgaagcaactgcagggtagtatcgaggatgaggctatggcctcctctgggcagattgatctcctggaaagactcaaagagctcaatcttgattcctcgaattttccaggagtgaagctgcgatccaagatgtctctccgatcttacggatcaagggagggctctgtgagctcacggagtggcgagtgttcgcccgtgccaatgggatccttcccacggagagggtttgtcaacggaagtagagaaagcactggttatctcgaggaactcgagaaggaaagatcccttctgctcgcagatcttgataaagaagagaaggaaaaggactggtactatgcgcagttacaaaacctaacaaagcggatcgactcactaccgctgactgaaaatttttctctgcaaaccgatatgacgagacggcaactagagtacgaggcccgccagatcagggttgccatggaagagcagctggggacttgccaggatatggaaaagcgggctcagcgtcggatcgctagaatccagcagatagagaaagacatcctgcggatcaggcagctactccaaagccaggccaccgaagccgagcgttcaagccagaataagcacgaaactggcagccacgacgcagagcgtcaaaatgaagggcagggtgtgggagagatcaatatggcgacatcaggcaatggccaggggtccactactagaatggatcacgagactgccagtgtgctgtcatcctccagcacccactctgcaccacggaggctgactagccacctgggtaccaaagtggagatggtctatagcctgctgtcaatgctcggaacgcatgataaagatgatatgtcccgcacgcttcttgcaatgtccagctcccaggattcctgtatctctatgcgtcaatcggggtgcctgcctctgctcattcagttactccacggaaatgacaaagactccgtgctgctcggcaacagcagaggcagcaaagaggcccgtgcgcgcgcttccgccgcactgcataacatcatccactctcagccagatgataaacgcgggcggagagagatccgtgttctgcatctgctcgaacagattcgtgcctactgtgaaacctgctgggagtggcaagaggcacatgagcctggtatggatcaagataagaacccaatgcccgctcccgtggagcaccagatctgtcccgcagtctgcgtgctgatgaagctttcctttgatgaagagcatcggcacgctatgaatgaacttggcggcctccaggctatcgcagagctgcttcaggtcgactgcgaaatgtatgggctcaccaatgaccactacagtataactctgagacgctacgccgggatggctctgacaaatctcaccttcggcgacgtggccaataaggcaactctctgctccatgaagggttgcatgagagcacttgtggcacagctgaaatccgagtctgaggacttacagcaggtgattgcttccgtgttaaggaacctgtcatggcgggcagacgtaaatagcaagaagacgctacgagaagttggttccgtaaaggctctgatggagtgcgccctggaagtgaagaaagagtccaccttaaagtcagtgctgtcagctctatggaacctgagcgcccactgtactgaaaacaaggccgacatctgtgcagtggacggtgcgttagccttcctggtagggaccttgacttacaggtcccagactaacacattggccatcatcgaaagcggaggcgggattctgaggaatgtgagctctttgattgccacaaatgaagatcacaggcagatcctgagggaaaataattgtcttcaaaccttactgcaacatctcaaaagccacagcctgacaatcgtttctaacgcttgcgggacgctgtggaatctcagcgctaggaacccgaaggaccaagaagccctatgggacatgggagcggtgagcatgttgaagaacctgatccacagcaagcataaaatgatcgccatgggatccgccgcagcactgcggaatctcatggcaaataggccagccaaatataaagatgccaatattatgtcccccggctctagccttcctagcctccacgtccgaaaacagaaggcattggaagccgagctggatgctcagcatctatcagaaacatttgacaacatcgacaatctttcacccaaggcctctcacagatctaaacagaggcataagcaatctctctacggggattacgtcttcgacacaaatcgccacgatgataatcgcagcgacaactttaatactggcaatatgaccgtgctgagcccatatctgaacaccactgtgctaccaagctcctcatcttcacgcggaagcctggactcctcccgatcagagaaggatcgaagcttagagcgcgagcgaggcataggcctgggcaattaccacccagccaccgagaatccaggcactagctctaagcgtggattgcagatctcaactacagctgctcagattgccaaggtgatggaggaagtgagtgccatccacaccagccaggaagaccgcagcagcgggagtaccaccgaactccactgcgtcacagatgaaagaaatgcgctcaggaggtcttccgctgcacacacccactccaatacctataacttcacaaaaagcgagaattctaaccggacctgcagcatgccatacgctaaactcgaatacaaacggtcatcgaacgacagcctgaactccgtgagcagcagcgatgggtacggcaagaggggccaaatgaagccatcaatcgagagctactctgaagacgacgagtccaaattttgtagttatggtcagtaccccgctgaccttgcacacaagatccattctgccaatcacatggacgacaatgatggagagctggacactcccataaattactctcttaagtattctgacgagcagttgaacagcggcaggcaaagtccttcacagaacgaacgatgggcgcgcccaaaacacatcattgaggatgagataaagcagagtgagcagaggcaatcgaggaatcagagcaccacctatcctgtttacactgagtcaacagacgataagcatctgaaatttcagccccatttcgggcagcaggagtgtgtctcgccataccgctccaggggagcaaatggcagtgagaccaatagagtcggctcaaaccacggtataaaccagaatgtctctcagagcctgtgccaggaagacgattatgaagatgacaagccaacaaattattccgagcggtactccgaagaagagcagcacgaggaagaagagcggcctaccaattactctatcaagtacaacgaggaaaaacggcatgtggatcaacccatagactactcacttaaatacgctacggatattccatcctcgcagaaacagtcctttagcttcagcaagtcttcatccgggcagtcatccaagaccgagcacatgagctctagtagcgagaatacatctaccccctcctccaatgccaagcgtcagaaccagctacatccctcaagtgcccagtctcgatccggacagccgcagaaggctgctacgtgtaaggttagttctataaatcaggaaaccatccagacctattgcgtcgaggacacacctatctgcttcagccggtgtagctcactgagcagcctatcttctgcagaggatgagatcggatgcaatcagaccacgcaagaggctgacagcgcaaataccctgcagattgccgaaattaaagagaaaattggcacccgctctgccgaagacccagtatctgaggtgcccgccgtttctcagcatccccgcacaaaatcttcccgtttgcaggggtcttcactgtccagcgaaagcgcacgtcacaaggcagtagaattttcctcgggggctaagtccccctccaaaagtggagcacagacccctaagagcccacctgagcactacgttcaggagacccccctcatgttctcccgatgcaccagcgttagttctctagactcattcgaaagccgctctatcgccagcagcgttcagtctgagccgtgctcgggcatggtatcgggcattatcagtccctccgacttaccagacagcccaggacagaccatgcccccctcaaggagtaagacaccccctccacctccccaaacagctcagacaaaaagagaggtccctaagaacaaggcccctacggctgaaaagagagagagtggtcctaaacaagctgctgtgaacgcggccgtccagagggtgcaagtcctgcccgatgctgataccctcctccatttcgccactgagagcacacccgacggtttttcttgtagctcgtcgttgagcgctcttagccttgacgaaccctttatacagaaggacgtggaactgcgcattatgccccctgtccaggaaaacgataatgggaacgaaaccgagagtgagcaaccaaaagagagcaacgaaaaccaagaaaaagaggcggaaaaaactatcgactctgaaaaagacctcctggacgattctgacgatgacgatattgaaattctggaggagtgcattatctctgccatgcccaccaagtcaagccgcaaagccaaaaagcctgcccagacagccagcaaactgccacctcctgtggctcgtaagccttcccaactgccagtgtataaactgctgccttctcagaatagattgcagccacaaaagcatgtgagcttcacacctggggatgacatgccccgtgtgtactgcgtggaaggcactcccattaatttcagcactgcaacttcactgtcagaccttactatcgagtcgccgccgaacgagttggctgccggagagggggtgcggggcggagcccaaagtggcgagtttgagaagcgggacacaatcccgacagagggccgtagcacggacgaggcccagggaggcaaaacaagtagcgtgactattccagaacttgatgataataaggctgaggagggcgacattttagctgagtgcattaactccgccatgcctaagggaaaatctcataaaccatttcgcgttaaaaagatcatggaccaggtgcagcaggccagtgcctcttcttccgcccccaacaaaaaccaacttgatggaaagaagaagaaacccacctcccctgtaaagcccattcctcaaaatactgagtaccgcacgcgggtgcgcaaaaatgcggatagcaagaataaccttaacgcagagcgtgtcttttcagacaacaaagactctaagaagcagaacctaaagaacaattccaaagtttttaacgacaagctgccaaacaatgaagatagggttagaggctcttttgcattcgattccccccaccactacacgcctatcgagggcactccttactgtttctcacgtaatgactctctgtcatcattggatttcgatgacgatgacgtggatctgagtagagagaaagcggagctgcgcaaagccaaggagaacaaggaatccgaagctaaagtcactagccatactgagttaaccagcaatcagcagtctgcaaacaagactcaggcaattgcaaaacaacctattaacagaggtcagcctaaaccaattctgcagaagcaatcgacattcccacaaagttctaaagacatcccggaccgtggcgccgcaaccgacgaaaagttacagaattttgcaatcgagaatacgcctgtttgtttcagtcacaactcctcactgtctagcctctccgacattgatcaggagaacaataacaaagaaaatgaacccattaaggagacagagccacctgacagtcagggcgagcccagcaaaccccaagctagcgggtacgcacctaagtcttttcatgtcgaagacacccccgtctgcttctcccggaattccagtctgagttctctctcgatagattccgaggatgatctgctgcaagaatgcatttcaagtgcaatgcccaaaaaaaaaaagccctcccgtctgaaaggagacaatgagaagcacagtccgaggaacatgggaggaatccttggggaagatttgactctcgatctgaaggacatccagcggcccgactcagaacatggactttctcctgacagcgaaaattttgattggaaggctatccaggagggcgccaactccatcgtctcatctctgcaccaggcggccgccgccgcctgcttgtctaggcaagcgtcgagcgactctgatagtatattatcactgaaaagcggcatctctctgggttcaccatttcacctgactcccgatcaggaggagaagccattcacatccaacaagggcccccggattttgaagcccggagagaaatctaccctggaaactaagaaaatcgaatccgaatcaaagggcataaaaggtggaaaaaaggtgtataagtccctgatcaccggaaaagtgaggtctaactctgagattagtggacagatgaaacagcccctgcaggccaacatgccgtctatttcccgcggcagaactatgatccacatcccaggagtcagaaactcatctagttcaacatcaccagttagcaagaaaggtccaccgctgaagacccccgccagtaagtctccaagcgagggccaaactgcaaccacttctccaaggggggccaaaccgagcgttaagagcgagctctctccagtggcaagacagacctcgcaaattggtggcagtagtaaggccccctcaaggtccgggtctagagattctaccccatcgcggccagcccaacagcctctgagcagacctatccaatctcctggcagaaactccatatctcccggacgtaacggtatcagcccacctaataaactgagccagttgcctcgcacaagttccccttcgactgccagcacaaagtcaagtgggtccggcaagatgtcttacacatcccctgggcgtcagatgtcacagcagaacctcaccaaacagaccggactatcgaagaatgcctcctctatcccacgtagtgaaagtgcctcaaagggtctcaatcaaatgaacaacggcaacggcgcaaataagaaggtggagctttcacggatgtcctccacaaaatcatcgggctccgagtctgacaggtcagaacgccctgtccttgtgcgccagagtactttcataaaagaggctccgtcgccgactttgcggagaaagttggaagaatccgcctcgtttgagtccctgagtccgtcgagcagacccgcctctcccacccgcagccaggcacaaacccctgtcctctccccttcactgccagacatgtctctgtccacccactccagtgtgcaggcgggcggatggcgaaagcttcctcccaacctgtcaccgacaatagaatacaatgacggcaggccggccaagcgccacgatatcgcacggagtcactccgagagcccctccagattgcccattaatcggtcaggcacttggaagcgtgagcactccaagcactcgtcctcactcccacgcgtgagcacttggaggagaactggatcaagcagttcaattctctccgcgtcctccgaatcctctgagaaggccaagagtgaggacgaaaagcacgtgaattctatcagcgggaccaagcaaagcaaggaaaaccaagtatctgcaaagggcacttggcggaagattaaagaaaatgagttttccccaaccaactccacaagccagacagtgtccagcggtgctacgaacggtgccgaatccaaaacgctgatctaccagatggcacccgcggtgtctaaaacagaagacgtatgggtcagaattgaggattgccccatcaacaatccccggagcggtagatctcctaccggaaacactcctcccgtcatcgactctgtcagcgaaaaagcgaatccaaacatcaaggattctaaggataaccaggcgaaacagaacgtgggtaatggatctgtgcctatgaggacagtgggattggagaatcgtctgaacagttttattcaggtggatgcaccagatcagaaggggacggagataaagcctggtcaaaacaacccggtccctgtttcagaaacaaatgagtcaagtatcgttgaaaggacacctttttccagctcctccagtagtaagcactccagcccgtccgggaccgtcgccgcccgggtgacaccatttaattataacccctcacccaggaagtcatcagccgacagcacctctgctaggcctagccagattcccaccccggtaaataataataccaagaaacgggactccaaaaccgactcgaccgaatcatctggaacccagtcacctaagcggcacagtgggagctacctcgtcacgagtgtgtag

SEQ ID NO: 22743 - DNA, 8532 bp, synthetic construct
  misc_feature 1..8532: note = Description of Artificial Sequence: Synthetic coding sequence
  source 1..8532: mol_type = other DNA
atggccgccgccagctacgaccagctgctgaagcaggtggaggccttaaagatggagaattcgaacttgagacaggagcttgaggacaacagtaatcatctcactaagctggagaccgaggctagcaatatgaaggaggttcttaagcagctccaggggtcgattgaagatgaagctatggcaagttccggccagattgacttattggagcgtctgaaagagctgaatcttgatagcagcaatttcccgggtgtcaaactgcgatcaaaaatgagtctcaggtcttatggctctcgggaggggtcggtgagttctagatctggagagtgtagcccagttccgatgggcagcttccctcgccgggggtttgttaatggctccagagagtccaccggataccttgaagagctcgagaaagagcggtcactacttctcgccgacctggataaggaggagaaggagaaagactggtactatgcccagttacagaaccttaccaagcgaattgactccctgccactgaccgaaaacttctcccttcagactgatatgacacgacggcagctggagtacgaagctcgccagattcgggtcgcaatggaggagcagctgggaacgtgccaagacatggaaaagagggcacaacgaaggatcgccaggatccagcagatagagaaagatatactgcggatacggcagctgcttcagtctcaggccactgaagccgagaggagctctcagaacaagcacgagacagggtctcatgacgccgagcgacaaaatgaaggacagggagtaggggagataaatatggccacctccgggaatgggcaggggtccaccacccgcatggaccatgaaactgcgagcgttctttcatcttcgtccacccacagcgctccacgccgtctcaccagccatctgggaacaaaggtagagatggtgtacagtttgctgtcaatgctaggcacccatgataaagatgacatgagtaggaccctgctggctatgtcgtccagccaggatagttgtatttccatgaggcagagcgggtgtctgccactgttaatccagctcctgcatggcaacgacaaagactccgtactgttaggaaacagccgaggcagcaaggaggcccgagcccgcgccagcgccgctctccacaatattatccacagtcagccagatgataaaagagggcggagagaaatccgggtgttacacctgctcgagcagattcgcgcctattgcgagacctgctgggagtggcaagaagcccatgagccgggtatggatcaggataaaaatcccatgcctgcacccgtggaacatcaaatttgtccagcagtgtgtgtgctcatgaaattaagcttcgacgaggaacataggcacgcgatgaacgaacttggcggcctccaggcaattgctgaattgctgcaggtcgattgtgaaatgtatggcctgaccaacgatcattatagcatcacgctcagacgatacgctgggatggcactgacaaacctcacattcggtgatgttgccaataaagccaccttatgttcaatgaaggggtgcatgcgcgctcttgttgcgcagctgaagagcgagtcagaggacctgcaacaggtcatcgcttccgtactgagaaacctctcttggcgcgccgatgtcaatagcaagaaaacactgcgagaggtgggctctgtgaaggccctcatggagtgtgcgttggaagtgaagaaggagtctaccctcaagtcagtgctttccgctctgtggaacctgtctgcccattgcactgaaaacaaggccgatatatgcgcagtagatggggcattggcgttcttagttggaacactaacttaccggtcccagactaatactctggccatcatcgaaagcggaggcggcatcctgcgcaatgtgtcgtccctgatagccacaaacgaggatcaccgacagatacttcgagagaataactgtctgcagaccctgctgcagcatttgaaatctcacagtctcaccatcgtctccaacgcctgtggcacgctttggaatctgagcgctcggaacccgaaggaccaagaggccctgtgggatatgggagcggtgagcatgcttaagaatctaattcactcaaagcacaaaatgatcgctatggggtctgctgccgctcttagaaatctgatggcgaatagaccagctaaatacaaagacgcgaacatcatgagcccaggctcttctttgccctcgctgcacgtgcgcaagcagaaggcactcgaggccgaactagacgcgcagcacctgtctgagacattcgacaatattgacaatctctcaccaaaagcaagtcaccgcagtaaacagcgacacaagcagagtttatatggcgactatgttttcgataccaataggcacgacgacaatcgctccgacaatttcaacacaggtaatatgactgtgctcagtccttatttaaatacgaccgtgctccccagttcctcttcctcacggggatctttggactcctctcggagcgaaaaggaccgctcactggagagagagcggggtatcggactcgggaattaccatccggctacagaaaacccaggcacctcttccaaacgtggcttgcaaatctccacaactgcggcacaaattgccaaggttatggaggaggtgagtgccatccacactagtcaagaagaccggtcttccgggagtaccacagaattgcattgtgtgacggatgagcggaacgccttaaggcgctcatccgcagcacacacccatagcaacacatacaattttacaaaatcagagaatagtaatcggacttgttctatgccgtatgccaaactggaatataaacgttcctccaacgattcattgaattctgtgtcttcctctgatggctatggtaaacgggggcagatgaaaccatccattgagtcttattccgaggacgatgaatctaagttttgcagttatggtcagtatccggccgacctcgcccacaaaattcactctgcaaatcacatggacgataacgatggcgagctggacacaccaatcaattattcccttaaatacagcgatgagcaattaaatagcggacgccagagcccttcacagaatgaacgatgggccaggccaaagcatattatcgaggatgaaatcaagcagagtgagcagagacagagtagaaatcagagcacaacgtaccccgtgtataccgagtccacagatgacaagcatctcaaattccaacctcacttcgggcagcaggaatgtgtgagcccttatcggtccaggggagcaaacggaagcgaaaccaatagggtgggaagtaatcacggcattaaccagaacgttagtcaatccctgtgccaagaggatgactatgaagatgataagcctaccaactactcagagcgctatagcgaagaagaacagcacgaggaggaggaaaggcctaccaactatagcattaagtacaacgaggagaagcgacacgtggaccagccaatcgattattctcttaagtatgcaacggacatcccctccagccagaagcagtcctttagtttcagtaagtcttcgtcaggtcagagctccaaaacggaacacatgagcagcagctctgagaacacctcaacacctagctcaaatgcaaagcggcaaaaccaactgcatccttccagtgctcagtccaggagtgggcagcctcagaaggcagccacatgcaaagttagttcaattaatcaggagacaatccagacatactgcgtagaagacactcccatctgtttctccagatgctcatctctgtcttccctttccagcgctgaggacgaaataggctgtaaccaaaccactcaggaggcagattccgctaatacgctgcaaatcgcggagattaaagagaagatcggcacccgaagcgcagaggaccctgtttctgaggtccccgctgtgagtcagcacccgagaaccaaatcctctcgactgcaggggtccagcctgagctctgagtccgcgcgccacaaggctgttgagtttagcagtggcgctaaaagccctagtaaaagcggggcacagactcccaaatcgcctcccgagcattatgtccaggagacccccttgatgttttcccggtgcacctctgtctctagtctggactcctttgaatcacgctccatcgccagtagcgtccagtcggagccttgcagcggtatggtgtctggcataatctccccttcagatttacccgatagtccaggacaaacgatgccaccttctaggtctaagacacctcctcctcccccgcagactgcacagacaaagagggaagtgcccaagaataaagcacccacagcagagaaacgggaaagcggtcccaagcaggccgcagttaacgctgcagtgcagagagttcaggttttacctgacgctgatacacttttacattttgcaacagaaagtacccctgacggttttagctgctctagcagtctttccgcgctgtccctggatgaaccattcatccaaaaagacgtcgagcttcgcatcatgcctcctgtgcaggaaaacgacaatggaaacgagaccgagtctgagcagccaaaagaatcaaatgagaatcaagaaaaagaagcggaaaagactatagatagtgagaaagacctgctcgatgacagcgacgatgatgacattgagattttggaggaatgtatcatttcagccatgcccacgaagagtagccgcaaagccaagaaaccagcccagacagcgagtaagttgccacctcccgtcgcacgcaaacctagtcaactgcccgtatacaaattactgccttcccagaaccgtttgcaaccccaaaaacacgtgtctttcaccccaggcgacgatatgcccagagtgtactgtgtagaaggaactccaattaacttcagtacagccacctcccttagcgacttgaccatcgagagccccccgaatgaactggcagccggggagggggtaagggggggcgcgcaaagtggcgagttcgagaagagagatacgattcccaccgaagggcgttccaccgacgaagcccagggcggtaaaacttcctccgtgacaattcctgaactggacgacaacaaggcagaggaaggtgacattctggccgaatgtatcaacagtgccatgccaaaggggaagagtcacaaaccatttcgggtaaaaaagattatggaccaagttcagcaggctagcgcctctagttcagcaccaaataagaaccagttagatggcaaaaaaaagaagcccactagtccagtgaaacctataccacagaataccgagtatagaacacgggtgcggaaaaacgctgacagcaagaacaacctgaacgccgagagggtgttctctgataacaaggacagcaagaagcaaaatctaaaaaacaatagtaaagtcttcaacgacaagttaccgaacaatgaagacagagtgagggggagcttcgcgtttgactcgcctcaccactataccccaattgagggcacaccctactgtttttccaggaacgacagcttgtcctctctggacttcgacgacgacgatgtggatctcagcagagagaaggctgagctccggaaagccaaggagaacaaagagtccgaggccaaagtgacttcacacaccgaactcacatctaaccagcagagcgccaacaagactcaggcaatcgccaagcagcccatcaaccgggggcaacccaagccaatactccagaagcagagtactttcccacaaagctctaaggatattccggataggggagcagccaccgacgagaaactgcagaattttgccatagagaacactccagtttgtttttcacataactcatccctctcatctctgtccgatatcgaccaggagaataataataaggagaacgagccaatcaaggagaccgagcctcctgattcccagggcgagccttcgaaaccccaggccagcggctacgcacccaagagtttccacgtggaagataccccagtgtgctttagtcggaattcaagcctgtcctctttgagcatcgattctgaggacgatctattgcaggagtgtatttcctctgccatgcctaagaaaaagaaaccttcgagattaaaaggggacaacgaaaaacactctcctaggaacatggggggcatactgggcgaagatcttaccttggacctgaaagacattcaaaggcccgactctgagcacggtctaagcccggattcggagaactttgactggaaagctatacaggaaggggccaactcaatcgtatcttctctacaccaggcggcagcagcagcttgcctgagccgtcaggcctcttcggattccgactcaatcttgtctctgaaatcggggatcagcctgggatccccctttcacctgacaccggaccaggaggagaagcctttcactagtaataagggacctcgcatcctgaagccaggcgaaaaaagcactctggagaccaagaagatcgagtccgagagcaagggaatcaagggcggcaagaaagtgtataagtcgttaatcacaggcaaagtgcgctccaatagcgaaatcagcggccagatgaaacagccgctgcaggctaacatgcccagcattagtcgcggcaggacaatgatccacatacccggtgtgagaaatagcagtagcagcacctcacctgtttccaagaaaggacctcctttgaagacccctgcttcgaagtctcccagcgagggacagactgccacaacctctccaaggggcgccaagccttctgtaaagagcgagctgtctcccgttgccaggcagacctctcagatcggcggctcatccaaagctccgagtcggtctggaagtagggattctacgccatcgcgaccagcccagcaaccgctgtccagacccattcagagccccggccggaacagtatctctccgggaaggaatggcataagtcctcccaataagcttagccagctacctaggaccagcagtcctagtacagctagcacgaagtcatcaggaagcggaaaaatgtcctatacatcacccggacgacagatgtcacagcaaaaccttactaaacagaccggactgagcaaaaacgccagcagcattccaaggtcagagagcgcgagtaagggcctcaaccaaatgaacaatggtaacggggccaataaaaaggtggaacttagcagaatgagcagcactaagagctcagggtctgaatccgacaggtctgaacggcccgtgcttgtccgccagagtacttttattaaggaagcaccatcaccaaccctccgacgtaagctagaagaatctgcatccttcgagtcattgagtcccagctcacgccctgccagtccgacacggtctcaggcccagacccccgtgctgtccccatctctcccagacatgtctctttcaacccattcctcagtgcaagcaggcgggtggcgaaagctcccacccaacctgagccctactatagagtacaacgacgggagacctgctaagagacacgacattgcccgatcccattccgaaagcccttctaggctgcccataaaccgatctggcacatggaaacgggagcacagcaaacattcaagttctctgcctcgcgtgtccacatggcgccgtacggggtcttctagcagcatcctcagcgcttcctccgaaagctccgagaaagccaagtcggaggatgaaaagcatgtcaactccatcagcggaaccaaacaatcgaaggagaaccaggttagcgctaaaggaacatggagaaaaattaaagaaaacgaattttcacctactaatagcacctcccagaccgtgagtagcggggccacaaatggagccgagtctaagactctcatttatcagatggcccctgcagtgtccaaaaccgaggatgtctgggtgcggatcgaagattgcccgatcaacaacccaaggtccgggcgctcccctaccggaaacactccacctgtcattgattccgtatccgagaaggccaacccaaacatcaaagattcaaaagacaatcaggccaaacagaacgttggtaatgggtctgtgcctatgcgcacagtgggcttggagaatcggctaaactctttcattcaggtcgatgcaccagaccaaaagggtacagagattaaacctgggcagaataacccagtccccgtgtccgaaacaaacgaaagcagtatagtagagaggactccattctcctccagtagtagctctaaacattcgagtccctctggaaccgtagccgccagggttaccccttttaactacaatccatctccccgcaaatctagtgctgactccacgtcagctagaccatcacagatccctacacctgtcaacaacaataccaagaaacgagactctaagacggattctactgagagctctgggacccagtcgcccaaacggcacagcggctcttaccttgtcacatctgtctag

SEQ ID NO: 22744 - DNA, 8532 bp, synthetic construct
  misc_feature 1..8532: note = Description of Artificial Sequence: Synthetic coding sequence
  source 1..8532: mol_type = other DNA
atggccgccgccagctacgaccagctgctgaagcaggtggaggccctcaaaatggagaactctaacctaagacaggaactcgaagacaattcaaatcatctgaccaaactagagaccgaggcttccaacatgaaggaggtattgaagcagttgcagggcagtattgaggacgaggctatggcctcctccggtcagatagatctactggagcgactgaaggagctgaacttagacagctctaactttccgggagtgaagctgaggagcaaaatgagcctcaggagctacggctctagggagggatctgtgtcgtctcgctccggcgagtgcagtccagtacccatggggtcatttcctcggagaggatttgtgaacggcagtcgtgagagcacaggatatctggaagaactggaaaaggaacgctctttgctcctggccgatctcgataaggaggagaaggagaaagactggtattacgcccaactgcagaatcttactaaacgcatcgactcactgccacttacagaaaacttctctctgcaaacggacatgacccgaaggcaactggagtacgaggctaggcaaatccgggttgctatggaggaacagctgggtacgtgtcaagacatggagaagcgtgcccagcgccgtatcgctaggatccagcagatcgagaaagacattctgcgcattcgccagcttttgcagtctcaggccacagaggccgagcgcagctctcaaaataaacacgaaactgggtcgcacgacgcggagaggcagaatgagggccagggagtgggcgagattaatatggcaacaagcggcaacgggcagggtagcactaccagaatggaccatgagaccgcaagcgtgctgtcttcttcctccacacattcagctcctcgtcgactcacatcacaccttggcaccaaagttgaaatggtgtacagcttgttgagcatgctgggaacccacgataaggacgatatgtcaagaactctcttggcaatgtccagcagccaggattcttgcattagcatgcggcagtcaggctgtctacccttgcttattcagctcttgcacgggaatgacaaggattctgtcctgcttggcaatagcagaggatcgaaggaagcccgcgcaagagccagtgccgccttgcacaatatcatccactctcagccagatgacaaaaggggtcgccgcgagattagggttctgcacctgctcgagcaaattcgggcttactgcgagacatgttgggaatggcaggaggcacacgagcccgggatggaccaggataaaaaccccatgcccgctccggtcgagcaccagatttgcccggccgtatgtgtgctgatgaaactgagtttcgatgaggagcataggcacgctatgaacgagctaggcgggctgcaggccatagccgagctgctgcaagtggactgcgagatgtatggcctgaccaatgaccattattctatcacgcttaggcggtatgcaggcatggccctcaccaatctgacatttggcgatgtggcaaacaaagccaccctttgttctatgaaggggtgcatgcgcgctctggtggcacagctcaagagcgagtctgaagacctccaacaggtcattgccagcgtactccgcaatctctcttggcgggcagacgtcaacagcaagaaaaccctgagggaagtgggatccgtcaaagccttaatggagtgcgctctggaagttaagaaagagtctactctcaagagcgtgctctctgctctgtggaacctgtccgcccattgtaccgagaataaggcagacatatgtgcggtcgacggtgcccttgcgtttttagtcggcactctaacataccggtcacagacgaatacgctagccattatcgagtctgggggaggaattttgcggaacgtctcctctctcatcgctactaatgaggaccatcggcagattctaagggagaacaactgtctgcaaacactgctgcagcatctgaaatcccactctcttactattgtctctaacgcctgcggcacactgtggaacttgtccgcccggaatccgaaggatcaggaggccctgtgggacatgggcgccgtgagcatgctgaaaaatctgatccacagtaaacacaagatgatcgccatgggaagtgccgcagctctcagaaatctgatggctaatcggcctgcaaaatacaaagacgcgaacattatgtctcctgggtcatccctaccctccttgcatgttcgtaaacagaaagcattagaggctgagctagatgcccagcatctgagtgaaacattcgataacatcgataatctgtcccccaaggccagccacagaagtaaacaacggcacaaacagagcctatatggtgactatgtcttcgacacgaacagacacgacgataacaggagcgacaacttcaatacaggaaatatgactgttctctccccctacctcaatacgaccgttctgcccagctcttcatcatctcgaggctcactggacagcagtaggagtgagaaagacagatcgttggagagagagcgtgggataggcttgggaaattatcacccagccacggaaaatcctggcactagctctaaacgtgggttgcagatcagcacaactgcagcacagattgccaaggttatggaagaagtttctgctatccacaccagccaggaggatcggtcatcgggaagtacaaccgaactgcactgcgtaaccgacgagaggaatgcgcttagacgctctagcgctgcccacacacacagcaatacctacaacttcacgaagtcggagaatagcaacaggacatgcagcatgccatacgccaaactggaatacaaacgtagctcaaacgactcccttaactccgtcagctccagtgacggatatggaaagcgaggccagatgaagccttccatcgaatcgtactctgaggatgacgagtctaaattttgctcttatggccagtatccagcggacctcgctcacaaaattcattctgccaaccatatggatgacaatgatggcgagctggatacaccaattaactactctttgaagtacagcgacgaacagctgaattctgggcgccagagccctagtcagaacgaacgctgggctaggcccaaacacataatcgaggacgagatcaaacaatcagaacagcggcagtctcgcaaccagagcacaacataccctgtgtatactgaatctaccgacgacaaacacttgaaattccaaccccattttggccagcaggaatgtgtgtctccgtacaggtctcgcggagcgaatgggtccgaaacaaatcgcgtcgggtccaaccatgggataaatcagaatgttagtcagtccctttgccaggaagatgactacgaggacgataaacccacgaactacagcgaacgctattctgaggaggaacagcatgaagaggaggagcggcccacgaactattcaataaagtacaatgaggagaagagacatgttgatcagccaatcgactacagtcttaagtacgccaccgacattccatcgtctcagaagcagtcctttagtttctccaaaagctcttctggacagagttcaaaaaccgaacacatgtcctccagctccgagaacactagcacccccagtagtaacgccaaacggcaaaatcagctgcatccttctagcgctcaatctcgcagtggacagcctcagaaagctgccacatgtaaagtctccagcatcaatcaagaaacgatccagacgtactgtgtagaggacactcccatctgcttttcccggtgctcctcattgtcatcgttatcctcagctgaagatgagattggctgcaaccagacaactcaggaagcggactccgccaacacacttcagatagccgagatcaaagagaaaattggaacccggagcgcagaggaccccgtatcagaggtcccggccgtctcccagcaccctcgcaccaagtctagcagactgcagggcagttcactatcttctgaatcggcgaggcataaagcagtagaattttcaagcggtgcaaaatcccctagcaaatcaggcgcacagacaccgaagtccccaccagagcattacgtgcaggagacccctctgatgtttagccgatgtaccagcgtcagttctctcgattcctttgaatctagaagtatcgcctcttcagtgcaatcagagccctgctccgggatggtatcaggcatcatctccccatctgacctccccgattcccctggtcagaccatgcccccgagccggtcgaagacacctcccccacccccacagactgcccagaccaagagagaagtgccaaaaaacaaagcccccactgctgaaaagagggaatcaggccctaaacaggcagctgttaacgctgctgtgcaacgagtacaagtcctgcctgacgctgatactttgttacacttcgcgactgagagcacaccagatgggttttcctgttcttcaagtttgagcgcgctgtctctggatgaaccttttatccagaaggatgtcgagctgagaattatgccaccagtccaggagaacgataatggcaatgagacagagtctgagcagcctaaggagtctaacgaaaaccaggagaaggaagcagaaaaaactatagatagcgagaaagacttactcgatgactcagatgatgacgatattgagatattagaagagtgtatcatcagtgctatgcccaccaagtcatcaaggaaagcgaaaaagcctgcgcaaacagctagcaaattgccaccacctgtggctaggaagccttctcagttgcctgtgtataagctactcccctcccagaatcgccttcagccccaaaagcacgtgagcttcacacctggcgacgacatgcctcgtgtttactgcgtcgaaggaacccccatcaatttttcgaccgcaacaagcctgtctgacctcacgattgagagcccacctaacgaactggccgccggtgaaggcgtgagaggaggggcacagagcggcgagttcgagaaacgtgataccattcctacagagggcagaagtactgacgaagctcagggcggcaagacgagctcggttaccattccagaactggacgacaataaagcagaagaaggggacatactagcagaatgtatcaacagcgccatgcctaaagggaagtctcacaaaccctttcgcgtgaagaaaataatggatcaggtgcagcaagccagcgcgtcctcctctgcccctaacaagaatcagttggatggaaagaaaaaaaagcctacatctcctgttaagcccattccgcagaacaccgagtatagaacccgggtacggaaaaatgctgactcaaaaaataacctcaatgcagagagagtctttagcgataataaggattcgaagaaacagaacctgaagaataattccaaagttttcaatgacaagttgccgaataacgaagaccgggttcgagggtctttcgctttcgatagtccacaccattacacacctattgaggggaccccgtactgcttctcccggaatgattctttatcatccttggatttcgacgatgacgatgtagatctgagccgcgagaaagccgagctgcgcaaagccaaagagaacaaggaaagcgaggcaaaggtgacctcacacacagaacttacctccaaccagcagagcgccaataagacgcaggcgatcgctaagcagcccatcaatcggggccagcccaaacccattctccagaaacagtctaccttccctcagtcctctaaggacataccagacagaggcgcagccactgacgagaagctgcaaaatttcgccattgaaaacacccctgtgtgcttctctcacaactcatcgctgtctagccttagtgatatcgatcaggagaataacaacaaggagaatgagccaattaaagagaccgaaccccccgattctcagggcgaaccgagcaagccacaggctagtggctacgcccccaaaagttttcacgtcgaggatacgcctgtgtgcttctcgcgaaattcgagcctctcaagcttaagcatcgacagtgaggacgacctcctccaggaatgcatttcttctgctatgccaaaaaagaagaaaccatcgagactgaagggcgacaatgaaaaacattcccccaggaacatgggagggatcttgggtgaagacctgaccctggacctgaaggacatccagcgacccgattctgaacacggcctgtcccccgacagtgagaacttcgattggaaagccatacaagaaggagccaattcaatcgttagctcactacatcaggcggcagcggcggcctgcttgtcacgccaagcaagctccgatagcgactctatcctcagcctgaagagtggcatatctttgggctcaccgtttcacctaactccagatcaagaggagaagccattcacaagtaataaaggacctcgcattctcaaacccggtgaaaaaagcacgctggaaacaaagaaaattgagtccgagtcaaagggtattaaaggaggaaagaaagtgtacaagtcactgattacagggaaagttcgcagtaactccgaaattagtggacagatgaaacagcctctgcaggctaacatgccttcaatctcacggggaagaacaatgatccatatacctggagtgcggaattcttcgtcttctacgagccccgtgagcaagaaggggcctcccttgaagacacccgcaagtaaatcacccagcgagggccagaccgcaacgacttcacctcggggcgctaaaccatcagtcaaatcagagctgagtccagtggctcggcagacatctcagatcggtgggagcagtaaagcgccaagtagatcaggctcaagggatagcactccatcccggcctgcacagcaaccactgagtagacctatccagagcccaggtaggaactcgataagtcctggcagaaatggtatctcaccaccgaacaagctctcccagctacctaggacgagctccccctcaacagcgagcactaagagcagcggcagcggaaagatgagctatacatctcccggacggcagatgagtcagcagaatctgaccaaacagacaggcctcagtaagaacgcatcgagtatcccacgatccgagtctgctagtaaagggctaaaccagatgaacaacggcaacggtgctaataagaaagtggaactgagcagaatgagcagcaccaaatcaagcggcagtgagtctgaccggtccgagaggcctgtactggtgcggcaatccacattcatcaaggaggccccatcgcccacgctcagaaggaagctggaagaatccgcgtccttcgagtctctgtccccctcatctcgccccgcaagccctacaaggtcgcaggcccagacgccggttctctcaccatcacttccagatatgagcctgagtacgcacagcagtgtgcaggccggaggctggcgaaagttgccccctaatctatctcctaccatagagtacaatgacggcagaccggctaaaaggcacgatattgcacggagccatagcgagtcgcctagccggctgccaatcaacagaagcggtacatggaagcgcgaacatagcaaacactcatcatccctgccgcgtgtcagtacctggaggagaaccgggagcagctcttctatcttgtcagctagcagcgaatcctccgagaaagctaaaagcgaggacgagaagcatgtcaacagcataagtggcaccaaacagtctaaggaaaatcaggtttccgccaagggcacctggcgcaagataaaggagaatgagttcagccccaccaatagcacctcacagactgtgagtagcggtgctacgaatggcgcagaaagcaagacattaatttaccaaatggcaccggccgttagcaagaccgaggacgtttgggtgaggattgaagactgtcccatcaataatcctcgatcagggcggagccctaccggcaacaccccaccagtgattgactcagtttctgagaaagctaacccgaacatcaaagacagcaaggataaccaggctaaacaaaacgtgggaaacggatcagtgcccatgcggacggtggggctagagaaccggctgaactctttcatccaggtggacgcccctgaccagaaaggaacagagattaagcctggccagaataaccctgtgccagtttcggaaacgaacgagagcagcatcgtggagcgcacgcccttctccagttctagcagctcaaaacactcgtccccttccggcaccgtggccgcacgtgtgacccccttcaattacaatccaagtcctcggaagtctagtgctgattccacaagcgcaagaccttcgcagatcccaaccccagttaacaataatacaaaaaagcgtgactccaaaacggatagcacggaatcatccggcacccaatcccctaagagacattccggatcatacctcgtgacttccgtgtag

SEQ ID NO: 22745 - DNA, 864 bp, synthetic construct
  misc_feature 1..864: note = Description of Artificial Sequence: Synthetic coding sequence
  source 1..864: mol_type = other DNA
atggccgccgccagctacgaccagctgctgaagcaggtggaggccctcaagatggagaactctaatctgcgccaggaattggaggacaactcaaatcatctgactaagttggagaccgaagctagcaacatgaaggaggtcctcaagcaactccaaggaagcatcgaggacgaagcgatggcatcgagcgggcagattgacctcttagaaagactcaaagagctgaacttagactcaagcaactttcctggagtgaaactcaggtccaagatgtctctacggtcttatgggagtagggaaggatcagtctcttccaggtcaggagagtgcagcccagtgcctatgggcagctttccaaggcgaggattcgttaatggctcacgggagtccacaggttacctggaggagctggaaaaagagagatcattgctcctcgccgatttggacaaggaggagaaggagaaggattggtattacgcccaactgcaaaatcttacgaagcggatagactccctgccgctgacagaaaatttctcgttacagactgatatgactagaaggcagctcgaatatgaggcccgccagataagagttgccatggaagagcaattggggacttgtcaggatatggaaaaacgggctcaaagaagaattgcacgcattcagcagatcgagaaggatatcctgcgcatccggcaactgttgcaaagtcaggcaactgaggctgagaggagttcacaaaacaagcatgagacaggaagccatgatgctgagcgccagaatgaggggcagggagttggggaaattaatatggccacatctggtaacgggcagatagagaagatgcggatgttcgagtgctag

SEQ ID NO: 22746 - DNA, 357 bp, synthetic construct
  misc_feature 1..357: note = Description of Artificial Sequence: Synthetic coding sequence
  source 1..357: mol_type = other DNA
atggccgccgccagctacgaccagctgctgaagcaggtggaggccctgaaaatggagaacagtaacctgcggcaggaactcgaggacaactctaatcacctgacgaaacttgagacagaggcttccaatatgaaagaagttctgaaacagctgcaaggatccattgaggatgaggccatggcctcctcaggacagattgacctgctcgagcgtctaaaggaactgaacctggatagttcgaatttcccaggcgttaagctccggtccaaaatgtccctccggagctatggaagccgcgagggttcggtctcttctcggtcaggggagtgttctcccgtgcctatgggatctttttag

SEQ ID NO: 22747 - DNA, 3918 bp, synthetic construct
  misc_feature 1..3918: note = Description of Artificial Sequence: Synthetic coding sequence
  source 1..3918: mol_type = other DNA
atggccgccgccagctacgaccagctgctgaagcaggtggaggccctgaaaatggagaacagcaatctgagacaggaactggaggataacagcaaccaccttaccaaactggagaccgaagcctctaatatgaaggaagtcctgaaacagctgcaggggtcaattgaggatgaagctatggcctccagcggtcagatcgatctgctggagagattaaaggagctgaatcttgacagctccaactttcctggggttaagttgcgcagcaaaatgtccctgagatcatatggcagtcgtgaggggtcggtgtcttctcgtagcggagagtgttccccggtgccaatggggtcctttcctcggagggggtttgtgaacggaagtcgtgagtccacagggtatctcgaggagctggaaaaggaaaggtcacttctgctggcagatcttgataaagaagaaaaagaaaaagattggtactacgcccagctccagaacttgaccaaaaggatcgactcactgcccctaacagagaatttctccctacagacagacatgacgcgccggcagttagagtacgaggcccggcagattcgagtagcaatggaggaacaactgggaacgtgccaggatatggagaagagagctcaacgcagaattgcccggatccagcagattgagaaggacattcttcgtatccgacaattgctgcagagccaggcaaccgaagctgaaagatccagccagaacaagcacgagaccggtagccatgatgctgagcggcagaatgaggggcaaggggtgggcgaaatcaacatggcaaccagcggaaatggccaaggctctaccacgcgcatggaccacgaaaccgcgtccgttctgagttcttcttccacgcattcagctcccaggcggctgacttcacacctgggaaccaaagtcgagatggtctattcacttctgtccatgctggggacgcatgacaaggacgacatgtccaggactctattggctatgagctcatcccaggatagctgcataagcatgcggcagagcggctgtttgcctttactcatccagttattgcacggcaacgacaaagactccgtgctgctgggcaattctcgcgggagcaaagaggcccgggccagggcgagcgccgctttgcacaacataattcactctcaacctgatgacaaacgggggcggagggagattagagttctccacctgctcgagcaaataagggcttattgtgagacttgctgggagtggcaagaggcccacgaacctggcatggaccaggataagaatcctatgccagctcctgttgaacaccaaatctgtccagctgtctgcgttcttatgaagctgtcttttgatgaagagcaccgccacgcgatgaatgagctaggcggtttgcaggcaattgctgagctactacaagtagattgcgagatgtacgggctgactaacgaccactacagcattacactgaggaggtacgccgggatggcactgactaacctgaccttcggtgacgtcgccaataaggctacgctgtgcagcatgaaaggatgcatgcgcgccctggtggcccaacttaaaagtgagagcgaggacctccaacaagtcattgcgagcgtgctccggaatctttcttggcgcgcagatgtgaatagcaagaaaacgttgagggaggttggttccgttaaggcactcatggaatgcgctctggaagtcaaaaaagaaagcacactgaagagcgttctgtcggccctctggaacctgagtgcccattgcacagaaaacaaagcagatatctgtgctgtggatggggcacttgcgtttctagtggggacactgacgtatcgcagccagacgaataccctagctataatcgaaagcggcggtggaatactgagaaatgtctccagtctgatcgccactaacgaggatcacagacagatcctgagagaaaacaactgtctccagacactgctccagcaccttaagagtcatagtttgacgatcgtgtctaatgcttgcggaactttgtggaatctctcagcaagaaaccctaaggaccaggaggctctgtgggatatgggagccgtgtctatgctgaagaacctgatccactcaaaacacaagatgatagcgatgggatctgccgctgcgctcaggaatcttatggccaatagacctgccaagtataaggacgccaacattatgtcaccaggatcatcattgccgtctctgcatgttcgaaagcagaaggctctggaagcggagctcgacgcacagcatctgtccgagacatttgacaatattgacaacctatcacctaaagctagccataggagcaagcaacggcacaagcaatccctgtacggggactacgtctttgataccaaccggcacgatgacaacaggtcagacaatttcaatactgggaacatgaccgtgctgagcccctatctcaatacaactgtgctgccttcgtcttcttctagtcgggggtcattagatagctcaagaagcgagaaggatcgttctcttgagcgagagcgggggatcggcttgggaaactatcacccagcaaccgagaatcctggtacgagctccaagagaggccttcaaattagtactaccgccgcgcagattgctaaagtaatggaggaggtgagtgccatccataccagccaagaggacagatcttctggcagcacgacagaactccactgtgtgaccgacgagcgtaacgctttgcgaagatcaagtgcggcccacacccatagtaatacctataacttcacaaagtccgagaactctaatagaacatgttccatgccatatgctaagttagagtacaaacggtcatcaaatgattccctcaacagcgtctcatcgtctgacggatacggcaagaggggccagatgaagcccagcattgaatcgtatagtgaagacgacgaaagcaagttttgttcatatggacagtatcccgctgatctggctcataagatccacagcgccaaccacatggatgacaatgacggtgagctagacactccgatcaactatagccttaagtatagtgatgaacagctgaactcggggcggcaatctccatctcagaacgaacggtgggcacgcccaaaacacatcatcgaagacgaaattaaacagagtgaacagcgtcagagcaggaatcaaagcaccacctatcctgtctacacggaaagtaccgacgataaacacctcaaatttcaaccccacttcggtcagcaggagtgcgtaagcccatacagaagccgaggggccaatggcagcgagacaaatcgcgtcggtagcaaccatggtatcaaccagaacgtttcacagtccctgtgccaggaggatgactatgaggatgacaaacctacaaactattcagagcgctactctgaggaggagcagcacgaggaagaagaacgcccaactaattattcgatcaagtacaatgaggagaagaggcatgtcgaccagcccatagactattcattaaagtacgcaacagatattccgtcctcacagaaacagtctttctcttttagtaagagttcatctgggcagtccagtaaaactgaacatatgtcatcaagctctgagaacacgtcaaccccctcgagcaatgcaaaaagacaaaatcagctccatccttcgtccgctcagtctcggagcggtcagccacagaaagctgcgacttgtaaagtgtcaagtatcaaccaggagaccatccagacctactgcgtggaagacacgccaatatgcttttccaggtgtagctcacttagcagtctgtcttctgctgaagatgagataggttgtaatcagactacacaagaagccgattccgcgaacacattgcaaatcgcatag

SEQ ID NO: 22748 - DNA, 2796 bp, synthetic construct
  misc_feature 1..2796: note = Description of Artificial Sequence: Synthetic coding sequence
  source 1..2796: mol_type = other DNA
atggccgagatcaaggagaagatctgcgactacctgttcaacgtgtccgacagctctgccctgaatctggccaagaatatcgggctgaccaaggcgcgggatatcaacgcagttctgatcgacatggagaggcagggcgatgtctatagacagggcacaacaccacccatttggcacttaaccgacaagaagagggaacggatgcagatcaaaaggaacacaaacagtgtacccgaaactgcccccgccgcaatccccgagacaaagcgcaacgcagagtttctgacatgcaacatcccaacctccaatgcctcaaataatatggtgaccacagaaaaggttgaaaatggccaggaacccgtgatcaagctggagaacaggcaagaagcccgccctgagcctgcccgtttaaagccccccgtgcattataacggcccttctaaagcaggctacgtcgatttcgagaacggccaatgggcaacagacgacattcctgacgacctcaacagcattagagcagcacctggagaatttcgcgctattatggagatgccttcattctactctcacgggctccctaggtgctccccttataagaaactcaccgaatgccaacttaagaatccaatctcaggcctgcttgagtacgcacagtttgcctctcagacgtgcgagttcaacatgattgaacaatcaggccccccacacgaacctcgattcaaattccaggtagtgatcaatggtcgcgagtttccaccagccgaggcgggttccaaaaaagttgccaagcaggacgccgccatgaaagcgatgacgatactgctggaggaggctaaggccaaggattcgggaaagtcagaggaatcttcccactattccaccgaaaaagagagcgaaaagaccgccgagtctcagacacccactcctagcgcgacttccttctttagtggcaaatctcccgtgactacccttttagagtgtatgcataaactgggtaacagttgcgaattccggttactgtctaaagaagggcccgcacatgaacccaaatttcaatactgtgtagctgtcggtgctcagacatttcccagcgtctctgctcctagtaaaaaggtggcgaaacaaatggccgccgaagaggcaatgaaggccctacacggtgaggcgactaattccatggccagtgacaatcagcccgaggggatgatttccgagagtctagataaccttgaatcaatgatgccaaacaaggtgcggaagatcggcgaactcgtgcgatacttaaacactaacccggtaggcgggctacttgaatacgctaggtcccacggcttcgctgcagagtttaaattagttgatcagtcaggaccaccgcatgaacccaagtttgtgtaccaggccaaagtgggcggtagatggtttccagccgtttgcgcccactccaagaaacaggggaaacaagaagccgccgacgcagccctcagagtgctgatcggcgagaatgagaaagccgaaagaatgggatttacggaagtaacacctgtgacaggcgccagcctcagacggactatgctgctcctcagtagatcacctgaagctcagccaaagaccttgccccttacaggtagcacgtttcacgatcagatcgcaatgctctcacacagatgcttcaatacacttacgaactccttccagccttccctgctgggaaggaagattcttgcagcaatcatcatgaagaaagatagcgaggacatgggggtggttgtctcactgggcaccggcaacaggtgtgtgaagggtgattcgctgtccctgaaaggagaaaccgtgaacgattgtcatgctgagataatcagcagacgaggctttatccgcttcctctacagtgagcttatgaaatacaactcccagactgcgaaggacagtattttcgagcctgccaagggaggcgaaaagctgcaaatcaaaaaaacggtgtcctttcatctctatatatccacggctccttgcggggatggcgcattatttgacaaatcttgttccgatcgggcgatggaatctactgagtcacgccactatccagtgtttgagaaccccaagcaaggaaaattgcgaacaaaggttgagaacggcgaggggactatcccagtggaatcatccgacatcgttcccacgtgggacggtattcgcctcggcgagaggctcagaaccatgtcatgctcagacaaaatactacgatggaatgtgctggggttgcagggcgcgctacttacacactttctacagcccatctacttgaaaagcgtaacccttgggtacctgttcagccaaggccatctaacgagggccatctgctgcagagtcactcgggatgggtctgcctttgaggacggtctgcgccacccctttattgtgaatcatcctaaggtgggaagagtctcaatatatgacagtaaaagacagtcgggtaagaccaaagagacctccgtcaactggtgtctagctgacggctacgacctggagatacttgatggaacaaggggtaccgtagacggacctcgcaacgagttgagtcgggttagtaagaagaatatctttctgcttttcaagaagctttgttccttcaggtaccgccgtgaccttctgaggctctcctatggcgaagcgaagaaggcagcgcgcgattatgagactgccaaaaactatttcaagaagggcctcaaggatatgggctatggaaactggataagtaagccccaagaagagaagaatttttatctctgtcccgtctag

SEQ ID NO: 22749 - DNA, 3681 bp, synthetic construct
  misc_feature 1..3681: note = Description of Artificial Sequence: Synthetic coding sequence
  source 1..3681: mol_type = other DNA
atgaacccccggcagggctacagcctgagcggctactacacccaccctttccaggggtacgaacatcggcaacttcgctaccagcagcccggccccggatcttcaccaagcagctttctactgaagcagatcgaatttctgaaaggacagctccccgaagctcctgtgattgggaagcagaccccttcactgccaccctcccttcccgggttaagaccgagattccccgttctcctcgcctcctctacaaggggaaggcaagtcgacatacggggcgttccgaggggggtgcacctcagatcacaagggctgcagcggggcttccagcacccctcccccaggggacggtctctaccccagcgcggcgtcgactgtctgtcgtctcactttcaggagctctctatctatcaggaccaagagcagcgaattctgaagtttttggaagagctgggcgagggcaaggctacgaccgcacacgacttgtccggaaaattgggcaccccgaagaaagagataaatcgggttctttatagtctggcgaaaaaaggcaagcttcagaaggaggcaggcacgccccctttgtggaagatagcggtcagcacccaggcctggaatcagcactctggagtcgtgcgccccgacggacactcacaaggcgcgcccaacagcgaccctagcctcgagccagaggaccgtaactcaactagcgtctccgaggacttactcgagcctttcattgctgtatctgcacaagcttggaaccaacacagcggggttgttagaccggactcgcactctcaaggttcgcccaacagtgaccctggactggagcccgaagatagtaattccacttctgccctggaggatcctctggagtttctggatatggctgaaatcaaggagaaaatatgcgactacttgtttaatgtttcagacagcagcgcactgaacctggctaagaatatcggcctgacaaaggctcgcgatataaatgcggttctgatagacatggagcgtcagggggacgtgtaccgccaagggacaacgcccccgatctggcacctgactgacaaaaagcgcgagcgaatgcagataaagcgtaacaccaatagcgtgccggagactgcccctgccgctatcccagagaccaaaaggaatgccgaatttttaacatgtaacattcccacatccaatgccagtaataacatggttacgacagaaaaagtagagaatggccaagagccagtgatcaagctcgaaaataggcaggaggccagacccgagcccgccaggctcaagcctcctgttcactacaatggcccatccaaggccggctacgtagactttgaaaacggccagtgggccacagacgatatcccagatgatctcaacagcattagggctgctcctggcgaattccgggccatcatggagatgccatctttctactcacacggacttcctcgctgttctccctacaaaaaactcacagaatgccagttgaaaaacccaatctcaggactgctagaatatgcgcagttcgcaagtcagacctgtgaattcaatatgatcgaacagtcgggccccccacatgaaccccgatttaagttccaagtggtcatcaacggaagagaatttccccccgccgaagcgggcagcaagaaggtggccaagcaagatgcagctatgaaagccatgactattctattggaggaggctaaggccaaagacagtggcaagagcgaagaatctagccattactccacggaaaaggaaagcgagaagacggccgagagccagacacctacaccgagtgcaacctcttttttctccggcaaaagccccgtgacgactctacttgagtgtatgcacaaattgggcaacagctgcgaatttcgcctcttgtccaaggaggggcccgcccatgaacctaaattccagtactgtgtggccgtgggagctcagaccttcccttcagtcagtgcacccagcaaaaaggtcgccaaacagatggccgccgaagaagcaatgaaggcgctgcacggcgaggccactaacagcatggccagtgataaccagcccgaaggcatgattagtgaatcactggacaatctggagtcaatgatgcccaataaggtgaggaagataggggaattggtgagatacctcaatactaatcctgtggggggactcctggaatacgctaggtcccatgggtttgctgcggagttcaaacttgttgaccagtcaggtccaccgcacgagccaaaatttgtgtaccaggcaaaagtcggggggcggtggttccccgctgtatgcgcccattccaaaaaacagggaaaacaggaagccgcggatgcagcactcagagtcctgattggcgagaacgaaaaggctgagcgcatggggtttaccgaggtaacccccgtgacgggcgcctccctgaggcgcactatgcttctgttatctcgctcgccagaagcccagcccaagaccttgcctctgacgggcagtacttttcatgatcagatcgcgatgctgagccatcgctgctttaacactttaactaattcctttcagccctccctcctgggccgtaaaatcctggctgctattatcatgaaaaaagactccgaagatatgggagttgtggtgtctttggggactgggaatcgttgcgttaaaggggatagtctttcactgaagggggagactgtgaatgattgtcatgccgagattatttctaggagggggttcatacgtttcctgtacagcgaactgatgaagtacaattctcaaactgcaaaagactctatcttcgagcctgcgaagggcggggagaaacttcagatcaagaagacagtgtcgtttcatctctatattagtacagccccttgcggtgatggtgctctgtttgataaatcttgctccgatcgggccatggaatcgaccgaaagtagacattatcccgtcttcgagaaccctaagcagggtaagctgcgaacgaaggtcgagaacggtgaagggaccatccccgtggaaagctccgacatagtgccaacgtgggacggcataagactcggagaaagattgagaacaatgtcttgcagtgataagatactccggtggaacgtgctgggactgcagggggctttgctcacgcactttctacaacccatatacttgaaaagtgtgacccttggatatctgttttcccagggtcacctcaccagagccatttgttgcagggtgaccagggatggcagcgctttcgaggatggattgaggcatcctttcatagtgaatcacccaaaagtgggacgcgttagtatttacgactctaagagacagagtgggaaaaccaaggagacgtcagtgaattggtgtctcgctgacggctatgatttggagattctcgacggaactcgtggcaccgttgatgggcctcgaaacgagctctccagggtgtctaaaaaaaacatctttttactgttcaagaagttgtgcagttttagatatcggagagatctgctccgactgtcatatggcgaggctaaaaaggctgcccgggattacgagaccgcaaagaactatttcaaaaaaggactcaaggacatgggatacggcaactggatttctaaaccacaggaggagaagaatttctacttatgcccggtgtag

SEQ ID NO: 22750 - DNA, 3588 bp, synthetic construct
  misc_feature 1..3588: note = Description of Artificial Sequence: Synthetic coding sequence
  source 1..3588: mol_type = other DNA
ggctacagcctgagcggctactacacccaccccttccagggctacgagcatcgccagctgcgctatcaacagcccggacctgggtcctccccatcaagcttcctgctcaaacagatcgaattcttaaaaggacagcttcccgaagctccagtgattgggaagcaaacccccagtctgcccccttccctcccaggcttgcgtccgcgcttccctgtgttgcttgcgtcctccacacgggggcgccaggttgatatccgcggagtaccacggggggtccatctgagaagccagggcctacagcgcggcttccagcacccaagcccacgcggaaggtcactcccccagcggggagtggattgcttgtctagtcacttccaggagctgtctatctatcaggatcaggaacagcgcattttgaaattcctcgaggagttaggagaaggcaaagctactacagctcatgatctcagcggcaagcttggcacccccaagaaggaaatcaacagagtcctgtactcacttgctaagaaggggaaactgcagaaggaagctggcacacccccattgtggaagatcgctgttagtactcaggcgtggaatcaacattccggcgtagtgagacctgatgggcattcccagggcgcacccaatagcgacccatccttggagccggaagaccgaaacagcacctccgtatctgaagatttgttagagcccttcatagccgtgtccgctcaggcatggaaccagcactccggcgttgtccgcccagacagccactctcagggcagccccaattcagacccaggactcgaacctgaagacagcaatagcacttccgccctcgaggatccgttagagttcctggatatggcagaaatcaaggaaaaaatttgcgactatctgtttaacgtgagcgactcgtctgccctaaacctggccaaaaatattgggcttaccaaggctagagatatcaatgccgttctgattgatatggagagacaaggagacgtttacagacaagggactactccaccaatttggcatctgacagacaaaaagagggagcggatgcaaattaagaggaatactaacagtgtccctgagaccgctcccgccgcaatcccagagaccaaaaggaacgccgagttcctgacctgcaacatccctacctccaatgctagtaataacatggttacaactgagaaggtagagaacgggcaggagcctgtcatcaaacttgagaaccgacaggaggcaagaccagaacccgctaggctcaaacctccagttcactacaacggcccttccaaagcaggttatgtggactttgagaatggacagtgggcgaccgacgatatacctgacgacctgaacagtatcagggctgctccgggagagttccgcgctattatggaaatgcccagcttttacagccatggtctcccacgatgcagcccttataagaagttaactgaatgtcagctcaaaaacccaatatccggactcctcgaatatgcccaatttgcgagccaaacgtgtgagtttaatatgatagagcagtctggcccaccgcatgagcctcgattcaagttccaggtcgttatcaacggtcgcgaattcccccctgctgaagccggctcaaaaaaggtggccaagcaagacgctgctatgaaagccatgacaatcctcctcgaagaggccaaagccaaagactctggaaagagcgaagagtcttcccattattcaacagaaaaagaatctgagaaaacggcagaatctcagacgccgactccgagcgcaacttccttttttagcggcaaatccccggtaaccacgttgctggaatgtatgcataaattaggcaacagctgcgagttccgcctgctttctaaggaaggccctgcccatgaaccgaagtttcagtactgcgtggccgtgggcgcccaaaccttcccctccgtgagcgcaccctcgaaaaaggtagctaaacagatggccgcggaggaggctatgaaggccttgcacggggaagctactaactctatggcctccgacaaccagcccgagggaatgattagtgagagtctggacaatttagagagtatgatgccaaataaggtgcggaagattggcgaactcgtgagatatctgaacacaaacccagtaggcggcctactcgagtacgctaggtctcatgggttcgccgctgagtttaagctcgtagatcagagcggaccaccccacgaaccaaagtttgtgtatcaggcgaaggttggcggaagatggttccctgctgtctgcgcccattctaagaaacagggcaagcaagaggctgcggatgccgcactgcgggttttaattggcgagaacgaaaaggccgagcggatgggcttcaccgagttgcctctcacaggctccaccttccatgatcagatcgccatgttgagccatcgatgctttaacaccctcacaaacagtttccaaccgtcccttctgggtagaaaaatcctggctgctatcatcatgaagaaagactcagaggacatgggcgtggtggtgtccctcgggaccgggaacagatgcgtgaaaggagatagcttaagcctcaaaggtgagaccgtcaatgattgtcatgccgagatcataagccgcaggggcttcattcggttcttgtattcagaactgatgaagtataacagccagacagctaaagactctatcttcgagcctgcaaaggggggcgagaagttgcagattaagaaaacagtgagcttccatctgtacatctctaccgctccttgcggcgacggcgcattatttgataaatcttgttctgatagagctatggagagcactgagagccggcactaccccgtatttgaaaatccgaagcagggcaaactgagaacgaaagttgagaatggcgaggggacaatcccagtggagtcatcagatatagtccccacttgggacggcattcgccttggagagcgtctccgcaccatgagttgctccgacaagatcctccggtggaacgtccttggcctgcagggcgccttgctgactcacttcctccagcccatctatttaaagagcgtcacgttaggatacctgttttcacagggccatctgactcgggccatctgttgtcgcgtgaccagagatggttctgctttcgaagatgggttaaggcatcccttcatcgttaaccatccaaaggtcggacgcgtatctatctatgatagtaaaagacagtctggcaagactaaagagacttctgtgaactggtgccttgccgatggctatgacctggagattctggacggaactaggggcaccgtggacggtcctcgaaatgagctaagtagggtatcaaaaaagaatatatttctgctgttcaaaaagctgtgctcctttcgatacagacgggacctgttgagactgtcatacggtgaggcaaagaaagccgctcgcgactacgagactgcaaagaattattttaagaaaggcttgaaagacatggggtatggaaactggatctctaaaccccaggaggagaagaacttctacttgtgcccagtgtag

SEQ ID NO: 22751 - DNA, 528 bp, synthetic construct
  misc_feature 1..528: note = Description of Artificial Sequence: Synthetic coding sequence
  source 1..528: mol_type = other DNA
atgggcaaggtgctgagcaagatcttcggcaacaaggagatgcggatcttgatgctgggcttagacgcagcaggcaaaacaactatcctgtataagctgaagctgggacaaagtgtcaccacaataccgacggtcggctttaatgtagagactgtaacttacaagaatgtaaaatttaatgtgtgggacgtgggaggccaggacaagattcgccctctctggcgacattactataccggcacccagggactgatcttcgttgtggattgtgctgatcgggacagaattgatgaagctaggcaggaactccatcgcataattaacgacagagagatgcgagacgccataatcctgatattcgctaataaacaggacctcccagacgcaatgaaacctcacgaaatccaggagaaactaggcttaactcggatccgcgatagaaactggtatgttcaaccttcctgtgcaacaagcggagatgggctgtacgagggtttgacatggctgacaagtaactataaaagctag

SEQ ID NO: 22752 - DNA, 1398 bp, synthetic construct
  misc_feature 1..1398: note = Description of Artificial Sequence: Synthetic coding sequence
  source 1..1398: mol_type = other DNA
atgttccggcaggagcagcccctggccgagggcagcttcgcccccatgggctccctgcaacccgatgcgggtaacgctagttggaatggcactgaagctcccggtggcggcgcaagggctaccccctattccttgcaggtaaccttaaccctggtgtgtctcgctggtcttttgatgctgcttaccgtgtttggcaatgttctggtcatcatcgctgtctttacttcccgggcgcttaaggcaccccagaacctgttcctggtgtccctggcgtccgccgacattttagtcgccacattagtgatccccttctcattagcaaatgaggttatggggtattggtatttcgggaaagcctggtgtgagatttatctggctttagacgtattattttgtacttcttcaattgtccacttgtgcgcgatctcattggaccggtattggtctattactcaggctattgagtataacctcaagcgcactccacgccggattaaagccatcatcattacggtctgggtcatctctgcggtcatcagttttcccccattgatcagtatcgagaagaagggcggaggcggtggtccgcaaccggctgagcctaggtgcgaaatcaacgatcagaagtggtacgtcatttcctcttgcatcggctctttcttcgccccctgcctgatcatgatccttgtatatgtccgaatctatcaaattgccaaacggcggacgcgcgtccctccttcaaggcgcggacctgacgcagtcgctgccccaccaggcgggactgaacgacggcctaatggactgggccccgagcgaagcgcaggcccaggaggagctgaagcagagccactgccgacgcagttaaatggcgctcctggggaacccgctccggccggcccacgcgacacagacgccctggatctggaggagtcttcaagttctgatcatgctgagcgaccgccaggccctaggcggccagagagagggccaaggggcaaaggcaaggctcgggcgagccaagtgaaaccgggcgactctcttccacgcaggggtcctggcgctacgggcataggaacgcctgccgcaggccctggcgaggagagggtgggggctgccaaagcctcaagatggaggggcagacagaacagagaaaaacgcttcacattcgtactcgctgtggtgattggtgtattcgtggtgtgctggttccccttcttttttacctacaccctaacagccgttggctgcagcgttccacgtacgctgttcaagttcttcttttggttcggatattgcaatagctcactcaaccccgttatttatactattttcaaccatgacttcaggcgtgccttcaagaagattctgtgcagaggggaccggaaacgtatagtgtag

SEQ ID NO: 22753 - DNA, 285 bp, synthetic construct
  misc_feature 1..285: note = Description of Artificial Sequence: Synthetic coding sequence
  source 1..285: mol_type = other DNA
atggcccccctgaagatgctggccctggtgaccctgctgctgggcgctagtctccagcacatccatgcggcgcgggggaccaacgtcgggcgagagtgctgtttagagtacttcaagggagccatcccccttagaaaacttaaaacctggtatcagacatccgaggattgttcccgggatgctatagtgtttgtcacggtgcaggggagagctatctgttctgacccaaataataagagggtcaaaaacgcggtgaagtatcttcaatctttggagagaagctag

SEQ ID NO: 22754 - DNA, 1635 bp, synthetic construct
  misc_feature 1..1635: note = Description of Artificial Sequence: Synthetic coding sequence
  source 1..1635: mol_type = other DNA
atgcccggccggtgccagagcgacgccgccatgcgggtgaacggccccgcttccagggccccggcaggttggacctccggcagcctgcacaccggaccacgggcaggccgtcccagggcccaagcccggggtgtccgtgggcgggggctgcttctccgcccaagacccgctaaagagctgccactgccccgtaagggcggcgcatgggcgcctgccggtaaccccggccctttgcatcctttgggggtcgccgtgggaatggctggctccggacgcctggtcctccgcccttggataagggagctgatcctcggcagcgagacacccagtagtccccgtgccgggcagctgttggaggtcctgcaagatgccgaggcagcggtggctgggcccagccatgcacccgacaccagcgatgttggcgcgacgctgctggtgtccgatgggacccacagcgtacggtgtctggtgacccgcgaagccttggacacatcagattgggaggaaaaagaattcgggttccgagggaccgagggccggcttttactcctccaggactgcggcgtgcacgtgcaagtagctgaggggggtgcacctgcggaattctatttacaggtcgacagattttcactactcccgacagaacagcccagactccgcgtaccaggatgcaaccaggatctggacgtccagaagaaattgtatgactgtctcgaagaacatttaagcgaaagcacatccagcaatgccggcctgtcgctgagtcagctactggacgagatgcgtgaggaccaggagcatcagggtgccctagtgtgcctcgctgagtcttgcttgaccctggagggaccctgcaccgcgccacctgtcactcactgggcggcatcacggtgtaaggccactggggaggcggtttacactgtcccttcttcaatgctgtgcattagcgagaatgaccagctgatcctctcttcgcttggaccgtgtcagcgcacacaaggtcccgaactgcccccgcctgatcccgctttgcaagacttgagcctgactctgatagcctcccctccctctagcccttcaagttcaggcaccccagcactgcctgggcacatgtcttcggaggaaagcggaacctcaatcagcttgctgcccgcgttgtcactcgcagctcctgatccagggcagagatcctcctcccagcccagccctgccatttgtagcgctcccgccactcttacaccccgttcccctcacgctagcaggaccccatccagtcccctgcaaagctgtactccgtccctgtctccaagatcccatgtgcccagcccacaccaggcactggtgacgcgaccgcagaagccatcactggagtttaaggagttcgtgggcctcccctgcaagaataggccaccattccctcgaactggggcaacacggggggctcaggaaccttgctccgtgtgggagccccccaaacggcatcgcgacggttcggcttttcagtatgagtacgagcctccctgtaccagtctgtgcgcacgcgtccaggccgtgcgtctcccgccacagctcatggcctgggccttgcatttcctaatggatgcgcagccagggtcagaacctaccccaatgtag

SEQ ID NO: 22755 - DNA, 558 bp, synthetic construct
  misc_feature 1..558: note = Description of Artificial Sequence: Synthetic coding sequence
  source 1..558: mol_type = other DNA
atgaagctggtgagcgtggccctgatgtacctgggcagcctggccttcctgggcgcggatactgcccgcctggatgtagcttccgagttccggaaaaagtggaataagtgggccttgtccagaggaaagcgtgagttgaggatgtcgtcttcatacccgacaggtctggcagatgtcaaggccgggccggctcagactctgataaggccacaagacatgaaaggagcatcacgctcaccggaagattccagtcccgacgccgcgaggatcagggttaaacgttatcggcagagcatgaataattttcagggtctccgctctttcggctgccggtttgggacatgtacagttcaaaaactagcacaccaaatctaccaatttacagataaggacaaagataacgtcgccccacgaagcaagatctccccccaagggtacggacggagacggagaaggtctctccccgaggcaggccccggcagaacactggtgtcatccaaaccccaagctcacggggcgcccgctcccccctcaggctccgccccccactttctgtag

SEQ ID NO: 22756 - DNA, 558 bp, synthetic construct
  misc_feature 1..558: note = Description of Artificial Sequence: Synthetic coding sequence
  source 1..558: mol_type = other DNA
atgaagctggtgagcgtggccctgatgtacctgggcagcctggccttcctgggcgcagacaccgcccgtctcgacgtcgcatcagagttccgcaaaaaatggaacaaatgggcactctctagagggaaaagagagctcagaatgtcttccagctatcctacagggctcgccgatgtgaaagccggacctgcacagacattgattagacctcaggacatgaaaggagcaagccgatctcccgaggattcaagtcccgacgccgccaggatccgagtgaaacggtatcggcagagcatgaacaactttcagggattgcggtcctttgggtgccgcttcgggacttgcacagtacagaaactcgcccaccagatctaccagtttaccgacaaggacaaggacaatgtggcccctaggtcgaaaatctcaccacaaggatacggacgccgccgtaggcgctcccttccagaggcaggccccggtcggacactggtgagctctaagcctcaggcgcacggggcacctgctccccccagcggttccgcaccccattttttatag

SEQ ID NO: 22757 - DNA, 558 bp, synthetic construct
  misc_feature 1..558: note = Description of Artificial Sequence: Synthetic coding sequence
  source 1..558: mol_type = other DNA
atgaagctggtgagcgtggccctgatgtacctgggcagcctggccttcttgggggccgataccgccagactggacgttgcctctgagtttaggaaaaagtggaacaaatgggccctgtccagggggaagcgagagctaaggatgtcgagctcctatcccacaggcctggccgatgttaaggccggccctgcgcagacgctaatccgcccccaggatatgaaaggagcgagtagaagcccggaggactcatctcccgatgcggcccgaatccgggttaagaggtatagacagtccatgaataacttccagggactgaggtcattcggctgtaggtttggtacatgtaccgtgcagaaattagctcaccaaatctatcagttcacagacaaagataaggacaatgtagctccaaggagcaagatcagcccacaggggtacgggcgtcgcaggcgaagaagtttgccagaggcagggcccggtagaacattggtgagcagtaaacctcaagcccacggtgcaccagcgccacccagtggatctgccccccatttcctctag

SEQ ID NO: 22758 - DNA, 702 bp, synthetic construct
  misc_feature 1..702: note = Description of Artificial Sequence: Synthetic coding sequence
  source 1..702: mol_type = other DNA
atggccgccggcaccgccgtgggcgcctgggtgctggtgctgagcctgtggggcgcggtggtgggcgctcagaacataactgctcgtattggtgaacctctcgtgttaaagtgtaaaggcgcccctaagaaacccccacaacggctggaatggaaattaaatacaggccgcacggaagcttggaaggtcctgtcaccccaaggaggaggtccttgggattcagtcgcacgggtgcttcctaatagttctcttttcctcccggcagtgggcatccaggatgagggaatatttcggtgccaggcaatgaatcgcaatggaaaggagactaagtctaattacagagttcgcgtttaccagatcccagggaagcctgagatcgtagactccgcttctgagttgacagcaggcgtccctaataaggtagtggaagaatcaagaagatctcgaaagcgcccctgtgagcaagaagtggggacatgtgtgtccgaaggatcatatccagccgggacattgagctggcacttggacggcaagcccctggtgccgaacgagaagggggtgtcagtcaaggaacagacacggcgtcatccagagactggtctcttcaccttgcaaagcgagcttatggtgacccccgccagagggggcgaccctaggccgaccttttcctgtagtttcagtcccggcctgcctcgccactag

SEQ ID NO: 22759 - DNA, 1029 bp, synthetic construct
  misc_feature 1..1029: note = Description of Artificial Sequence: Synthetic coding sequence
  source 1..1029: mol_type = other DNA
atggccgccggcaccgccgtgggcgcctgggtgctggtgctgagcctatggggagctgtggttggcgctcaaaacattactgcaagaattggcgaacccttagttttaaagtgtaaaggcgccccgaagaaaccaccccagaggctggaatggaaactcggaggaggtccatgggactcagtagcccgagtgctacctaacagttccctcttcctcccggccgtcggcattcaggacgagggaattttcaggtgtcaggctatgaatagaaatggcaaagaaactaagtcaaactatcgggtgagggtttaccagatccccgggaagcccgagattgtggattctgcatccgagctgacggcaggggtgcccaacaaagtgggcacatgtgtgtctgagggcagctaccctgctgggaccctgagctggcacctggacggaaaaccattggttcctaatgagaaaggtgtaagcgttaaggagcagacaaggcggcatcccgagaccggactgtttacccttcaaagcgaactgatggtgacccccgctcggggtggggacccccgtcccacctttagctgttccttcagccctggactaccacggcatcgcgcactccgcacagccccaattcaacctagggtgtgggaaccagtacctctggaagaggtgcagttagttgtggagcccgaagggggagcggtggcaccaggcggcaccgttacgctgacttgtgaagtgcccgcccagccctctcctcagatacattggatgaaggacgtgtcagacctggagcgaggagccggaaggaccagaagagggggcgccaactgcagattgtgcggtcgcatccgagcaggcaatagtagtccaggaccgggggaccccgggaggccaggggactcgaggcccgctcactggggccatttggtggcaaaggccgccactccacgtcggggcgaagagggaccaagaaaacccggaggtcgtggtggggcttgccggactgagtccgtgggcggaacatag

SEQ ID NO: 22760 - DNA, 1044 bp, synthetic construct
  misc_feature 1..1044: note = Description of Artificial Sequence: Synthetic coding sequence
  source 1..1044: mol_type = other DNA
atggccgccggcaccgccgtgggcgcctgggtgctggtgctgagcctttggggagccgtcgttggagcacagaacataaccgctcgcattggcgagccgctggttttaaaatgcaagggagccccgaagaagccacctcagcgtctggagtggaagctgaatacaggacgaaccgaggcctggaaagtgctgagcccccaaggaggcggcccctgggacagtgtggctcgagtgttgccaaactccagcctgtttctcccggccgttggaatccaggacgaggggatcttcagatgccaggcgatgaaccgcaatgggaaggaaactaaatctaactacagggtgagagtctatcagatacctgggaagccggagattgttgactctgcctccgaactgactgctggcgttcccaacaaggttggaacctgtgtgtcagagggctcgtatcccgctggaacacttagttggcacctagacggcaaacccttggtgcccaacgagaagggcgtctcagtcaaagagcagaccaggaggcaccccgaaactggtctttttaccttgcagagcgagctgatggtcacacctgctcgcggtggagatcccagacccaccttttcctgctcttttagccctggtctcccccgccaccgcgccctgcggactgctcccatccagccgcgggtgtgggaaccagttccactagaggaggttcaacttgtggtcgagccggaagggggcgccgtggctccagggggaactgttactctcacctgcgaagtgcccgctcagccatcaccgcagattcactggatgaaggatggagttcctctcccccttcctccgtctccagttctcatcttgccagagataggaccacaggaccagggaacctatagctgcgtagcgacccatagtagccacgggccacaggaatctagggctgtgtccatttccattatcgagccaggtgaagagggccctacggccggggaggggtttgacaaagtgagggaggctgaagattcacctcagcatatgtag

SEQ ID NO: 22761 - DNA, 1215 bp, synthetic construct
  misc_feature 1..1215: note = Description of Artificial Sequence: Synthetic coding sequence
  source 1..1215: mol_type = other DNA
atggccgccggcaccgccgtgggcgcctgggtgctggtgctgagcttgtggggtgccgtggtaggggcacaaaacataactgccagaattggagaacccttagttctaaaatgcaagggggctccaaagaagcctccccaaagattagagtggaagctcaacacaggccggaccgaggcctggaaggttctgtctccccaggggggcggaccctgggactcagtggccagggtgcttcccaattcatctctcttcctgcctgccgtggggatccaggatgaaggtattttccgctgtcaagcaatgaaccggaatggtaaggagaccaaaagtaattaccgggtgagggtttatcagatccctggaaagccggagatagtagattccgcctcagaactgacagctggagtgccaaataaggttggaacgtgcgtgagcgagggatcctatccagcagggaccctctcctggcatctcgacggtaagccgctggtccctaatgagaagggcgtgtccgtcaaagaacaaactagaagacaccctgagaccggcctgtttaccctacagtcggaactgatggtaaccccagctcgaggcggggatcctagacctaccttttcatgctctttttcacccgggctgccaaggcaccgcgcactgagaaccgccccaattcaaccacgcgtgtgggagcccgtgccactggaggaggttcagctggtggtggagccagaaggtggagcagtggcccctgggggcacagttaccctgacttgtgaagtgcccgcgcagccttcaccacaaattcattggatgaaagatggggtaccattacccctgccaccgtctcctgtcctcatcctccccgagattgggccgcaggatcagggtacctattcctgcgttgctactcactccagccacggtccccaggagtctagggccgtatctatcagtatcatcgaaccaggggaagagggtcccaccgctggttccgtgggaggttccgggctcggaacactcgccctggcactcggaatcttgggaggtctgggcaccgcagccctactaattggggtgatcctgtggcagagacggcagcgtcggggtgaagagcggaaggcccctgagaaccaggaggaagaagaagagagggcggagctaaaccagtctgaagagcccgaagccggcgaaagctcaaccggtgggccctag

SEQ ID NO: 22762 - DNA, 705 bp, synthetic construct
  misc_feature 1..705: note = Description of Artificial Sequence: Synthetic coding sequence
  source 1..705: mol_type = other DNA
atggccgccggcaccgccgtgggcgcctgggtgctggtgctgagcttgtggggggccgtggttggcgcacagaacattactgcaaggataggggagcctctggttctcaagtgcaaaggcgccccaaagaaaccacctcagcgtctggagtggaaattaaacacgggaaggacagaggcatggaaggtgctgtctccgcagggggggggcccctgggactccgttgccagagtactgccaaattcctctctttttctgcctgctgtggggatccaggacgagggcatcttccgctgccaagctatgaatcgtaatggcaaggagacgaagtctaattaccggagcctccgaacatttaccatcacagccagtgattggatctttcctcctagcgaaattccagggaaaccagaaatagtagacagcgcctctgaactgacggctggcgtaccaaataaggttggcacctgtgtaagtgaaggatcctatccggctggtacactgtcatggcacctcgacggcaaaccgcttgtgccaaatgagaagggtgtctccgtgaaggaacaaacacggcgtcacccagagacagggctgttcactctgcagagtgagctcatggtgactcccgccagaggcggcgacccacgtccaaccttttcgtgcagctttagccccggtctgcctcgacatcgagccttaagatag

SEQ ID NO: 22763 - DNA, 402 bp, synthetic construct
  misc_feature 1..402: note = Description of Artificial Sequence: Synthetic coding sequence
  source 1..402: mol_type = other DNA
atgaaggacggcgtgcccctgcccctgccccccagccccgtgctgatcttgcccgagattggtcctcaagaccagggaacatactcttgtgtggcaacccattcatctcatggaccacaggaatcacgggctgtgtcaatctcaatcattgaacccggagaggaagggccaacggcgggatccgtgggcggatcggggctggggactcttgcactggcgctggggatactgggtgggttagggaccgctgctcttcttataggcgtgatcctgtggcaacgacgccagaggcgtggggaagagcgtaaggcaccagaaaatcaggaggaagaagaagagcgcgccgaactgaaccagtcagaagaacccgaggctggcgagagcagcacaggaggaccatag

SEQ ID NO: 22764 - DNA, 1308 bp, synthetic construct
  misc_feature 1..1308: note = Description of Artificial Sequence: Synthetic coding sequence
  source 1..1308: mol_type = other DNA
atgggcgccggcgagcgggtgcaggcccccccccgggccgaggccacggccggacggggggccgatcgagcccgtactttggaagggagccggatggccgcagggacagcagtcggagcctgggtcctggttttgtccctttggggcgcggtggtaggggcccagaacattactgccaggataggggagcccctagtgctaaagtgcaaaggcgctcccaagaaacccccacagcggctggagtggaagctgaatacgggccgcacagaagcttggaaagttctctccccacagggaggcggcccgtgggacagcgtggccagagtcctcccaaactcatcactgttcctcccggcggttggtattcaggatgaagggatctttaggtgccaggccatgaatcggaacggcaaggaaactaagagtaattacagggtgcgcgtctaccagattccaggaaaaccagaaatcgtcgactccgcctctgaactcactgcgggggtcccaaacaaggtgggcacctgcgtctccgaagggtcctacccggccggaactctgtcttggcatttggacggcaagccattagtgccaaatgagaagggggtttcagtcaaagaacaaactcgtaggcatcctgagactggcctctttacacttcagagtgaactgatggtgactcctgctagaggtggcgatccaaggccgacgtttagctgtagtttttcccccgggcttccgagacatcgtgcattaaggactgcacctatacaacctagggtctgggaaccagtgcctctagaggaggtgcagctggtagtggagccagagggaggagctgtggcccctggagggactgtcaccttgacttgcgaggttcccgcacaaccttccccacagatacactggatgaaggacggtgtcccactccctctgcccccatcacctgtactcatccttcccgagattggtccacaagaccaaggaacatacagttgtgttgccacacatagcagccacggcccacaagagtctcgagccgtgagtatatcaattatcgaacctggcgaggagggacccactgccggctcggtgggtggttcagggctgggaacacttgcgcttgccctcgggattcttggcggactggggactgccgccctgcttatcggggtgattctatggcaaagacgacagcgccggggagaagaacgcaaggctcctgagaaccaagaagaggaagaagagcgggcagagctgaaccagtcagaagagcctgaagctggagaatcgagcacaggcgggccctag

SEQ ID NO: 22765 - DNA, 387 bp, synthetic construct
  misc_feature 1..387: note = Description of Artificial Sequence: Synthetic coding sequence
  source 1..387: mol_type = other DNA
atggccgccggcaccgccgtgggcgcctgggtgctggtgctgagcctttggggggccgtcgtgggagcccaaaacataactgcccgaatcggggagccattagttcttaagtgtaaaggcgctccaaagaaaccaccacagcggttggagtggaaacttaacacgggtaggaccgaggcctggaaagtgctgtcgccacagggtggtggtccctgggactctgtagcaagagtgctgccaaacagtagcctgtttctgccggccgtaggcatccaggacgagggaatcttccgctgtcaggctatgaataggaatggtaaggaaaccaagagcaactatcgggtgagagtctaccagttcgaaaacctgcataactacagcctctag

SEQ ID NO: 22766 - DNA, 462 bp, synthetic construct
  misc_feature 1..462: note = Description of Artificial Sequence: Synthetic coding sequence
  source 1..462: mol_type = other DNA
atggccgccggcaccgccgtgggcgcctgggtgctggtgctgagcttgtggggcgccgtggtcggcgcccaaaatatcaccgcccgcattggcgaacctcttgtcctcaaatgcaaaggcgcacccaagaaacctccacagaggctggaatggaaactaaacaccggaaggactgaggcttggaaggtgctgagcccacaaggcggcggcccatgggattcagttgcccgcgtcctgccgaactcatcacttttcctgcccgcggtcggaatccaggacgaggggattctgggaggactgggcacggctgcgctactcataggtgtgattctctggcagcggcgccagcggaggggagaggagagaaaagctcctgaaaaccaggaagaagaggaagagagggctgagttgaaccagagtgaggagcctgaagccggggagagctcaactggaggaccttag

SEQ ID NO: 22767 - DNA, 885 bp, synthetic construct
  misc_feature 1..885: note = Description of Artificial Sequence: Synthetic coding sequence
  source 1..885: mol_type = other DNA
atgaaccggaacggcaaggagaccaagagcaactaccgggtgcgggtgtaccagatcccaggcaagcccgaaatagttgacagcgctagcgagttgacagctggggtgcccaacaaggttggcacatgtgtatcagagggtagctacccagccggaacacttagttggcacctagatggtaagcccttggtccccaacgagaagggagtgagcgtgaaggagcagacccgtagacatcctgagaccggcttgtttaccctccaatccgagcttatggttactcccgctcgtggcggtgatcctagacccaccttttcctgctccttcagccccgggctgccccgtcacagggcattacgcactgctcctattcaaccccgtgtctgggagcccgtccccttggaagaagtgcagcttgttgtggagccagaagggggcgccgttgccccaggaggcacggtgaccctgacttgtgaggtgccagctcagcctagccctcagatccactggatgaaagatggagtgccattgcctctgccccccagtccagtccttatcttacccgagattggtcctcaggatcaaggcacttacagttgtgtagctacacactcctctcacggaccccaggaatcacgcgccgtttccatttcgattatcggctcggtgggagggtcaggactcggcaccctggccttggcccttggaatcctcggggggctgggtaccgctgccctcttgattggcgtgatcttgtggcagaggcgacagcgcagaggggaagagcgtaaggcccctgagaaccaagaggaggaggaagagcgtgcggagctgaaccagagtgaagagcccgaggccggagaaagctctactgggggcccatag

SEQ ID NO: 22768 - DNA, 366 bp, synthetic construct
  misc_feature 1..366: note = Description of Artificial Sequence: Synthetic coding sequence
  source 1..366: mol_type = other DNA
atggccgccggcaccgccgtgggcgcctgggtgctggtgctgagcctatggggtgctgtagttggagcccagaacataactgctaggattggtgagcctctagttctgaagtgcaagggcgcacccaagaagcccccacagcggctggagtggaagttgaacactggccgtaccgaggcttggaaggtactctccccccagggaggaggcccatgggactctgtcgcccgcgtcctgccaaactcctcactatttctacctgctgtcgggatacaggacgagggaatcttccgatgtcaggccatgaacagaaacgggaaagagactaaatcgaactggtggtggagccagaaggtcgagcaatag

SEQ ID NO: 22769 - DNA, 1092 bp, synthetic construct
  misc_feature 1..1092: note = Description of Artificial Sequence: Synthetic coding sequence
  source 1..1092: mol_type = other DNA
atggccgccggcaccgccgtgggcgcctgggtgctggtgctgagcctctggggtgctgtggtcggcgcccagaacataactgcaaggattggggagccgttagtcctaaagtgcaaaggagccccaaaaaaacccccccagcgcttggagtggaagctgaacactggacggacagaagcctggaaggttctgtcaccccaggggggaggtccttgggactcagtcgccagggtcttgccaaattcctcactgttcctgccagccgtcggcatccaggacgagggaatcttccggtgtcaggccatgaatagaaatggcaaagagactaaatccaattacagagttagagtttaccagatacccggaaagcccgagatcgtggattcggcgtcggagttgactgctggagtgcctaacaaagtcgtcgaggagtcccgcagatctcggaaaaggccttgtgagcaggaagttggcacatgtgtatctgagggatcctatccagccgggacattatcttggcacctcgacggcaaacctctggtccccaacgagaagggcgtctcagtgaaagaacagacccgccgacatccagaaaccggattgttcacattgcagtctgagcttatggtaacccctgctcgtggaggcgatcctcgacctacgtttagttgcagtttttcacctggtctgccccgccacagggccctgaggaccgcaccaattcagccaagagtgtgggaaccagtgccactggaagaggtgcagttggtggtggagcccgaagggggcgcagtcgccccaggaggcaccgtcaccttgacatgtgaggtacccgcacagccttcacctcagattcattggatgaaggatggcgtgccgttacccttgccccctagccccgtgttaatcttacccgagatagggccccaggatcagggaacatattcctgtgtcgccacacactccagtcatggtccccaggaaagcagagctgtatccatatcgattatcgaacctggcgaggaaggtcctacagctggggagggattcgataaggtcagagaagccgaagactcacctcagcacatgtag

SEQ ID NO: 22770 - DNA, 3633 bp, synthetic construct
  misc_feature 1..3633: note = Description of Artificial Sequence: Synthetic coding sequence
  source 1..3633: mol_type = other DNA
atggccgcccagagcagcctgtacaacgacgaccggaacctgctgcggattcgtgaaaaagagcggcgaaatcaggaggcccaccaggaaaaggaggcattccccgaaaagattccgctgttcggggagccatacaaaaccgccaaaggggacgagctgagtagccggatccagaatatgctgggaaactatgaggaggttaaggagtttttgtccaccaaatcccacacccataggctggatgcctcggaaaacaggctcgggaagcccaagtatccattaattccagataaaggctccagtatcccttccagttccttccacacctccgtgcaccatcagtctatccacacacccgccagcgggcctctttctgttgggaatattagccacaacccaaagatggctcaacccaggactgagcccatgccatccctgcatgctaaatcgtgtgggccaccggacagccaacatctgactcaggacaggctgggtcaagagggattcgggtcatcccaccataagaagggcgatcgtagagctgacggcgaccattgcgcttcggtcaccgactcagcccctgaaagggaactctcgcccctgatttctctgcccagccccgtccctcctctctcccccattcattccaaccaacaaacactgccaaggactcagggatcttctaaggtgcacggttcctcaaataattctaaggggtattgccccgcaaagagtcctaaagaccttgcagtaaaagtgcacgacaaagaaacacctcaggacagtctggtcgcacctgcacaaccaccgagccagactttcccccctccatcactaccctctaagtccgtggccatgcagcagaagcccaccgcatacgtgcgacctatggatgggcaggaccaggcccctagtgaaagccccgagttgaaacccctccctgaggactacaggcagcagacattcgagaaaacggatctgaaagtgcctgcaaaggccaagttgacgaaactgaagatgccctcccagagtgtggagcagacttattccaatgaggtccactgcgtcgaggaaatcctgaaagagatgactcatagttggccccctccgctgacagccatacatacacccagcacagccgaaccatctaagtttccttttcctaccaaagattcccagcacgtttcaagtgtgacacagaatcagaagcagtatgatacgagctccaaaacccactcaaatagccaacagggtacatcctcaatgctcgaggacgatctgcagctgagcgatagcgaggactccgacagcgaacaaacacccgagaagcctcctagcagcagcgctcctcccagtgctccacagtcccttcctgagccagtggctagcgcccactcaagtagcgcggaaagcgaatccaccagtgattccgactcatcttcagatagcgaaagtgagtcgagttcaagcgatagtgaggaaaatgagcccctcgaaaccccagcacctgaacccgagccacccaccaccaataaatggcagttagataactggctgaccaaagtttcacaacctgctgcaccgcccgagggaccacgatccaccgagcctccacggcggcaccctgaatcaaagggctcgtcagattctgctacgagtcaggagcattctgagagtaaagatccgccccccaagagttcgagtaaagctccaagggcccctcctgaggcaccccaccctggcaagcggtcgtgccagaaatcacccgcccagcaggaacctcctcagcgccagacagttggaacaaagcaacctaagaaacctgtgaaagcaagcgcccgggctggttcgaggaccagcttacagggagaaagagaacctggtttactcccctatggtagtcgagaccagacctcaaaagataagccaaaagttaagaccaaggggaggcctagagctgcagccagtaacgaacccaaacccgccgtacccccatcctccgaaaagaagaagcataaatcttcactacctgccccttcaaaggcactctcaggccctgagcctgctaaggacaatgtcgaggatcgaaccccagagcattttgcgctcgtgcctctgacagagtcccagggccccccccactcaggttcaggcagccgcacatccggatgtagacaggccgtcgtggtgcaggaagatagccgtaaggataggctgcccctccccctcagggacaccaaacttctgtcgccactccgggacaccccacctccccagagcctgatggtgaagataaccctagacctgttatcaaggattcctcagccccctgggaagggcagtagacagaggaaagccgaagacaaacagcctccggccggcaaaaaacattcttctgagaagcgaagtagtgactcgtcttctaagctggccaaaaagcggaagggggaggcagagcgagactgcgataataagaaaattaggctcgagaaagaaattaaatcacagagttcctcttctagctcctctcacaaggagtccagcaagaccaagccaagcaggccctcctcccaaagctccaaaaaggaaatgctcccgcctccccccgtaagttccagtagtcaaaaacccgcgaaaccagcactgaagcgatctcgacgagaggcagacacatgtggtcaggacccacccaaaagcgcgtcaagcacaaagagtaaccataaagattcttctatccccaagcagaggagggttgaaggcaaaggcagccgatcatccagcgagcacaaaggctcctcgggtgatacagccaatccgttccctgtgccttcactgccaaatggcaactcaaagcctggaaagccccaggtgaagttcgataagcagcaggccgacctgcacatgcgggaagccaagaaaatgaagcagaaagctgaactgatgacggatcgggtgggtaaggcattcaagtacctggaggccgtcctgtctttcatcgagtgcggaattgctactgaatctgaaagtcaatcctccaaaagcgcctacagcgtctatagcgaaacagtggatctgatcaagtttatcatgtctctcaagtccttcagcgacgcaaccgccccaacccaggaaaagatcttcgcagtgttatgcatgcgttgtcagagcatactcaacatggccatgtttcgctgtaagaaagacatagcgattaagtacagtcggaccttgaataagcacttcgagagcagttctaaagtcgcccaggccccaagtccatgcattgcctcaactggaacccctagcccactttcgccaatgccatctcccgcctcatccgtaggatcccaaagctccgccgggtccgtgggctcatcaggcgtggctgcaaccatcagtacccctgtgaccatccagaacatgacaagttcatatgtgaccatcacgagtcatgtcctgacagccttcgatctgtgggaacaggccgaggcactgactcgtaagaataaggaattcttcgcgaggctatcaacaaacgtatgtaccctggcgctcaacagcagcctggtggatctcgtgcattacactaggcaggggttccaacagttgcaggaactcacaaaaaccccctag

SEQ ID NO: 22771 - DNA, 1266 bp, synthetic construct
  misc_feature 1..1266: note = Description of Artificial Sequence: Synthetic coding sequence
  source 1..1266: mol_type = other DNA
atggccttcaccgagcgggtgaacagcagcggcaacagcctgtacaatgacgacagaaatttgctgaggatacgggagaaggagaggaggaatcaggaggcacatcaggagaaggaggccttccccgaaaaaatccctcttttcggtgaaccatacaagaccgcgaagggagatgaattatccagccggattcagaatatgcttggaaactacgaagaggtgaaggagttcctgtcgacaaagtctcatacacatcgacttgacgcctctgaaaataggctcgggaagccaaagtatccgctgattccggataaaggttcctctatcccctcgagctcattccatacaagcgtgcaccatcagtctattcacacacccgcaagtggccccctctccgtaggcaacataagccacaaccccaaaatggctcagccacgtactgagcctatgccttccttgcatgccaaaagctgcgggcctcccgactcccagcatctcacccaggaccgtttaggacaggaagggttcggatctagccaccacaaaaaaggtgacaggcgggcagacggagaccattgtgcatccgttaccgactcggcccctgaaagagagttatcccctctcatcagtttgccgtcgcccgtgccgcccttatccccaattcactctaaccaacagacccttcccagaactcaagggtcttcaaaggttcatggctcaagcaacaacagcaaaggttattgtccggctaagtcacccaaagaccttgccgtcaaggtgcacgataaggagaccccgcaggactctctggtggcgcccgcccagcctccaagccagacttttcctcctccctctttaccttcaaagagtgtcgcaatgcaacagaagccaacagcttatgtgagacccatggatggacaggaccaggcaccatcagaaagtcctgaactgaagccccttccagaagattacagacagcaaacatttgaaaagacagatctaaaggtcccagccaaggccaagctgaccaagctgaaaatgccctcccaaagcgtagaacagacctactcaaatgaggtacattgcgtcgaagaaatcctgaaagactcacagcatgtgtcctccgtgactcagaatcagaagcagtacgacacgtcgtctaaaacccacagcaatagccagcagggtacctcttcaatgctggaggatgacctgcagctcagtgattccgaggacagcgacagtgaacagacccccgccccttag

SEQ ID NO: 22772 - DNA, 3657 bp, synthetic construct
  misc_feature 1..3657: note = Description of Artificial Sequence: Synthetic coding sequence
  source 1..3657: mol_type = other DNA
atggccttcaccgagcgggtgaacagcagcggcaacagcctgtacaatgacgatagaaatctgctcaggattagagaaaaggagcgccgtaatcaggaggctcaccaggagaaggaggctttccccgaaaagatccccttgttcggtgagccttacaagactgctaagggagacgagttgtcctctaggatccaaaacatgctgggcaactatgaagaagtgaaagagttcttgtctacaaagagccatacccatagactggacgcttctgaaaatcgtttagggaaacccaaataccccctgataccagacaagggcagctcgattcccagttctagctttcacacgagcgttcaccaccagtctattcatactcccgcctctggtcctctgtctgtgggcaatatttcacacaatccaaaaatggcccagccaaggacagagcccatgccttcacttcacgctaaaagttgtggcccccctgattcccagcacctgacgcaagataggctcggtcaggagggcttcggttcatcccaccataagaaaggcgaccgacgcgccgatggagaccactgcgcctcagttactgatagcgcacctgagagggaactctccccgcttatctctctgccctcccccgtgccccccttgtcccctatccattctaatcagcagaccttgccgaggacacagggtagcagcaaggttcatggaagcagtaataattccaaggggtactgtcccgctaagagtcccaaagacctggccgtgaaagtccatgacaaggaaacgccacaagactccctcgtggctccagcccagccccctagccagacttttcccccaccctccctgccttctaaatctgttgcgatgcaacagaaaccgacagcctatgtgagaccaatggatgggcaagaccaggcaccttccgaatccccagagttaaagcccctgccggaggactaccgtcagcagacttttgagaagaccgatctgaaggttcctgccaaggccaaattaacaaaacttaaaatgcccagccaatcagtggagcagacctattcaaatgaagtccattgcgttgaggagatcctgaaagagatgactcatagctggcctcccccattgacagcgatccacacacccagtactgccgaaccctctaagtttccgtttcccaccaaagactcacagcatgttagttccgtgacacagaaccagaagcaatatgatacttcaagcaaaacacattctaatagccagcagggcaccagcagtatgctggaggacgatctgcaactgtctgacagcgaagacagcgattctgaacagacgccagagaagcctccatctagctctgccccaccatctgctcctcagtctttgcctgagcccgtcgcgagtgcacacagtagctctgccgaaagcgagagcaccagcgattcagactctagctccgattctgagtcagagagttcctcttctgactctgaggaaaatgagccgctggagacaccagcgcccgagcctgaaccacccactactaacaagtggcaattggacaactggctgacaaaggtgagccagcccgctgcgcctccagaaggccctaggagtaccgagccaccaagaaggcaccccgaatcgaaaggctcttctgacagtgctacaagccaggagcatagcgaatccaaagacccacctcctaagtcctccagtaaggcccccagggccccccccgaggcacctcaccccggtaaacggtcttgtcagaagagtcctgcgcagcaagaaccaccccagaggcagacggttggcactaagcaacccaaaaaaccagtgaaagcaagcgctagggcaggaagtcgtacctcactgcagggcgaaagggaacctggactgctgccatacggatcccgcgatcagacttccaaagacaagcctaaagtaaaaacaaaagggcgacccagggcggccgcgagcaacgaacctaaacctgcagtgccaccctcatcagaaaagaaaaaacacaagtcttccctcccagctccaagcaaggcacttagcggccccgaacccgccaaggataacgtggaggaccgcacccctgaacattttgcactggtgccgctgacagagagccaaggccctccacacagtggttcaggttctaggacatccgggtgtagacaggccgtggtggtacaggaggactcacgcaaagaccgactcccccttccgttacgcgatacgaagttactgtcaccgcttcgggacactccccctcctcagagcttgatggtgaagattacacttgatctgctctccaggattccacaaccccctggtaagggctcacggcagcgaaaagcggaggacaaacagcctccggccggaaagaagcatagctccgagaaacgctcctccgacagctcatcaaagctcgccaaaaaacgtaaaggcgaggctgaacgtgactgcgataataagaaaattcggctggaaaaagagatcaaaagtcagagcagcagctcatcctcttctcacaaggagagctccaagaccaagccctcccggccttcttctcagtcatccaaaaaggagatgcttccaccccccccagtctcttcttcatcacagaagcctgcaaagccggccttgaagcgctccagacgggaggccgatacatgcggacaagatccccccaagtccgcgtcgagcacaaagtcaaatcacaaggattcctccattcccaaacagcggcgggtcgagggtaagggttctcggtcctcatccgaacacaagggctccagtggagacaccgcgaacccgtttcctgtcccaagcctgcctaatggaaattctaagcccggtaaacctcaggtgaaattcgacaaacaacaggcggatctgcacatgcgagaagcaaaaaagatgaaacagaaggcggagctgatgactgaccgtgtgggtaaggcctttaagtatctcgaggctgtattatctttcatcgaatgcggtatcgccacagagtcggagagccagagctccaagagtgcatactcggtgtactctgaaaccgtcgatctgataaagtttattatgagcctgaagtcattcagcgatgccactgcgccaacacaagagaagatctttgcagtcctgtgtatgcggtgtcagtctatcctgaacatggccatgttcagatgtaagaaggatatcgccataaagtacagccggacacttaataagcacttcgaatctagttcaaaggttgctcaagcaccatctccatgtatcgctagaagcactgggacgccatcgcctctcagccccatgccatccccagcgtcctctgtgggatctcaatcatctgcaggcagcgtgggctcaagcggcgtggccgccacgatatctacgcccgtgacaatccagaatatgacaagttcatatgtgaccatcacgtcacatgtgctcaccgcattcgatttgtgggaacaggcagaggctctaacacggaagaacaaagagtttttcgctcgattaagcacaaatgtttgtacgttggcattaaactccagtttagtcgatcttgtgcactacacacgccaaggtttccagcagctgcaggagctcaccaaaacaccttag

SEQ ID NO: 22773 - DNA, 1221 bp, synthetic construct
  misc_feature 1..1221: note = Description of Artificial Sequence: Synthetic coding sequence
  source 1..1221: mol_type = other DNA
atggccttcaccgagcgggtgaacagcagcggcaacagcctgtacaatgacgacagaaatctactccggatccgagaaaaagagcgcagaaatcaggaggcgcatcaggagaaggaagctttcccagaaaagatcccactgtttggggagccctacaaaacggcaaagggtgacgaacttagttcaagaatccagaatatgctcggaaactacgaggaagtgaaagaattcctctctaccaaatcccacactcataggttggacgcgtctgaaaatagactcggcaaacctaagtaccccctgatccccgataagggctcctcaataccatctagctcattccatacctccgtacatcaccagtctatccacacccctgccagcggcccactgtctgtgggcaacatcagccacaaccctaagatggctcagccacggaccgagccgatgccgtctctgcacgcgaagtcctgcggaccgcctgattcccagcacctgacacaggaccgcctgggacaggaagggtttggaagctcacatcataagaaaggcgatcgacgcgccgacggagatcactgtgcaagtgtgacggacagtgctccagagcgcgagctctctccgcttatcagtctaccatcgcctgttcctcctttgtccccgattcattccaaccagcagaccctccccaggacccagggtagctctaaggtgcatggcagctccaacaactctaagggctactgccccgccaagagcccaaaggatctcgccgtgaaggtgcacgacaaagaaacccctcaggattccctcgtggcacctgcccagccaccttcccagacattcccccctccctctctcccatcaaagtcagtggccatgcagcagaagcctactgcctatgtgcggcccatggacggacaggaccaggcgcccagcgagtctcctgagctgaagccactgccggaagactatcgacagcagaccttcgagaagactgacctgaaggttcctgccaaagcgaagcttacgaagctcaagatgccgtcccaatcagtagagacctacagtaacgaggtgcactgtgtggaagagattctaaaggagatgacgcactcctggcccccaccgctgaccgccatacacaccccctccacggctgagccttcgaaatttcccttccccactaaagatagtcaacacgttagtagcgtgactcaatag

SEQ ID NO: 22774 - DNA, 1473 bp, synthetic construct
  misc_feature 1..1473: note = Description of Artificial Sequence: Synthetic coding sequence
  source 1..1473: mol_type = other DNA
atgcccagccagagcgtggagcagacctacagcaacgaggtgcactgtgtggaggagattttgaaggaaatgactcacagctggcccccccccctgactgctattcacacgccaagcaccgccgagccctctaagtttccgttccccactaaggactcccagcacgtgagctcagtcactcaaaatcagaaacagtacgacactagttccaagacacatagtaacagtcagcagggaacatcaagtatgctggaagatgatctgcaattgtccgattctgaggacagcgattcagaacagacaccagaaaagcctccccatctccacctgcaagtattgcacagcccctttcagaatcagtggcaccagcatatacccgctgttcagtcacagaaagcccccgtcacgcagacagtgccacagactcagcgcgcacgcgccgtccaagattccgaagagaacgaacctctcgagactccagcacctgagcctgaaccgcccaccaccaataagtggcaactggataattggctgacgaaagtgagtcagcccgccgcgcctcccgagggcccgcgcagcaccgaacctcccaggcggcacccagagagcaagggttcatcagattctgcaacatctcaggagcattccgagtccaaagatcctccgcccaagagttctagtaaggcccctagggcacctcccgaagctccccatccaggaaaaaggagttgtcaaaaatccccagcccagcaggagcctccacagcgacaaacagtgggaactaaacagccaaagaagccggtcaaagctagtgcgcgcgccggcagtcgcacgtcccttcagggcgaaagagagcctggattgctgccttacggcagtagagatcagacttccaaggataagccaaaggtgaaaaccaaagggcggcctcgagccgctgcttctaacgaaccaaaaccggcagttcctccatcctcagagaagaagaagcacaaaagcagtttgccagccccatcgaaggcgctgtccggtccagaaccagccaaagacaacgtggaggatcggacccccgagcacttcgctctggttcccctgacggaaagtcaggggccaccccactccggaagcggatctagaaccagcggatgtcgccaagctgtagtggttcaggaagattcccgaaaggatcggctcccccttcctcttcgggacactaaattattgtcacccctgcgcgatacgcctcccccccagtctcttatggtgaagattacgctcgacctgctgtccaggataccccagccacctgggaagggaagtcgtcagcgtaaggccgaggacaagcaacccccggccgggaaaaagcactcctccgagaagaggagcagcgattcttccagtaagctagctaagaagaggaaaggtgaagccgagcgcgactgtgacaataaaaagataagacttgagaaatag

SEQ ID NO: 22775 - DNA, 2550 bp, synthetic construct
  misc_feature 1..2550: note = Description of Artificial Sequence: Synthetic coding sequence
  source 1..2550: mol_type = other DNA
atgacccacagctggcccccccccctgaccgccatccacaccccctcaactgccgaacccagtaagttccctttccctaccaaggactcccagcacgtgtcatctgtcacacagaaccagaagcaatatgatacttcttctaagacacacagtaattcccagcagggcactagttcaatgctggaagacgatctccaactgtcagacagcgaagacagtgactcagagcagacaccggagaaacctccaagttcatctgcaccaccttccgccccccaaagcctcccggagccggtggcttctgcccactcctcaagtgcagagtctgaatcgacatccgattcggatagctctagcgactccgaatctgagtcgagctccagtgacagtgaggagaatgagcccctggagacaccagcaccagagcccgaaccacctaccacaaacaagtggcagttagacaactggctgaccaaagtatctcagcctgccgccccaccggaaggcccacgctccaccgagccccccaggaggcaccccgagtctaaaggttcctctgatagcgccacctcccaagaacactcagaaagtaaggaccctccccccaaatcttcttctaaggcgccccgcgcacctccggaagctccacatcccggaaagcgctcatgtcagaaatctcccgcacagcaggaacctccacagcgccagacggtggggacaaagcaacccaagaagccggtcaaggcttcggctagagctggatccaggacatccctgcagggggaaagagagcctggcttgctgccgtatggaagtcgggatcagacaagcaaggataagccaaaggttaagaccaagggacggcccagggcagctgcctccaacgagcccaagcccgccgtccccccatcttctgagaaaaagaagcataagtccagtttgcctgctccctccaaagcgttgtccgggccagagccggctaaagataatgtggaagataggactccggagcatttcgcccttgtgcccctcactgagtcccaagggccacctcatagcgggtccggctcaagaacctcaggatgtcgccaggccgtggtcgtgcaggaggattctcgtaaggaccgtctccccttgccgctccgtgacaccaaacttctgtcgcccctgcgtgataccccacctccacaatccctgatggtgaaaattactctggatctcctgtcgcggattcctcagccaccaggaaaaggctctagacaacgcaaggcagaggacaaacagcctccagcaggaaaaaaacacagctctgagaaaagaagctccgactcgtcttcaaaacttgccaagaaacgcaagggcgaggccgagcgggactgcgataataaaaaaatcagattggaaaaagaaataaaaagccaatcatcctcaagctcatctagccacaaggagtcctctaaaaccaaaccctccagacccagttcccaaagttccaaaaaggaaatgttgccccctccgccagtgagcagctcgtcacagaaacccgcaaagccagcactgaagaggagtaggcgagaagcagacacttgcggtcaggatcccccaaagagcgccagtagcacgaaatctaaccataaggacagctcgatacccaagcagaggcgtgtggaagggaagggatcccgcagttccagcgagcacaaggggagctcaggcgatactgccaacccctttccagtcccgagcctgcccaatggcaattctaaaccaggcaagcctcaggtgaaattcgacaagcaacaggctgatctgcacatgagggaggcaaagaagatgaagcagaaggccgagctgatgacagacagagtgggcaaggccttcaagtaccttgaagcagtattgtcttttatagagtgtgggattgctaccgagtctgagtctcagtcaagtaaatctgcctactcagtctacagtgagaccgtggatctgatcaagtttataatgagcttgaaatctttttctgatgccacagcgccaacccaagagaagatattcgcagtgctgtgcatgcggtgccaatctatcctgaatatggcaatgttcagatgcaaaaaagacattgcaattaagtactcccgcaccttaaacaagcatttcgagtctagttcaaaagtcgcccaggccccgagcccctgcatcgctaggtccaccggcacccctagtcctttgagcccaatgcccagtcccgcgtccagcgtgggctcccagagttctgcaggttccgtgggtagtagcggtgttgcggctaccattagcaccccggtgactatacagaacatgacgagctcatacgtcaccatcaccagtcacgtgctcactgccttcgacctgtgggagcaagcagaagccctcaccaggaaaaacaaagagttcttcgcccgcctgtctactaacgtgtgtacactggcactgaactctagcctcgtagacctcgttcattataccaggcaagggtttcagcagctccaggaactaactaagacaccctag

SEQ ID NO: 22776 - DNA, 2376 bp, synthetic construct
  misc_feature 1..2376: note = Description of Artificial Sequence: Synthetic coding sequence
  source 1..2376: mol_type = other DNA
atgcccgacatgcacttcaaggcccccaagatcagcatgcccgacgtggatctccatttaaaggggcccaaagtaaagggagacgtggatgtgtccgtgcctaagttagaaggtgacctgaccgggccctcagtcggagtagaagtgccggatgttgagttagagtgcccagacgcgaagttgaagggccctaagtttaagatgcctgaaatgcatttcaaaactcccaaaattagcatgcctgatgtggacttgcatctgaaaggtcctaaagtgaagggcgacatggacgtctcagtgccaaaggtggagggggaaatgaaagtgccagacgtcgacataaaaggtcctaaaatggacattgatgcacctgacgtggatgtgcatggccctgactggcatctgaagatgcccaaaatgaaaatgcccaaatttagcatgcccggatttaaggccgaaggtcccgaagtcgacgtcaatctccccaaggccgacgtggtcgtgtccggccctaaggtggacgtggaggtgcccgatgtgagccttgagggccctgagggaaagctgaaaggcccaaaacttaaaatgcccgaaatgcattttaaagccccaaagatcagcatgccagacgtagatctccatttaaaaggccccaaagtgaaaggcgatgtggacgtgtctctccccaagctggaaggcgatctgacgggacctagcgtggatgtggaagtgccggacgtcgagctggaatgtcccgacgctaagttaaagggccccaaattcaagatgccggaaatgcattttaagacgcccaaaatcagcatgccagacgtgaacctaaacctgaaggggcccaaagttaaaggtgacatggatgtaagtgtgccaaaagttgagggtgagatgaaggtgccagacgtggacattagaggacccaaagtggatatcgatgcccctgacgtcgatgtacatgggcccgattggcacttgaagatgcccaaaatgaaaatgcctaagttctcaatgccaggattcaagggagaaggaccagaagtagatgtgaatctgcccaaagcagatgtagatgttagcggacccaaggttgacgtcgaagtgcccgacgtgagcttagagggacctgagggtaaactgaagggcccaaagttcaagatgcccgagatgcacttcaagacacccaaaatctcaatgccagacgtagatttcaacttgaagggcccaaagatcaaaggtgatgtagacgtgagcgccccaaagcttgagggagaactcaaagggcccgagttagatgtgaaaggcccaaaactcgacgcggatatgccagaagtagccgttgagggacccaatgggaagtggaagacgccgaaatttaagatgccagatatgcacttcaaagcaccgaaaatctccatgcccgacctggacttacatctcaaaagcccaaaagccaagggcgaggtcgacgttgatgtgccaaaactggaaggggacctgaaaggccctcacgtggacgtgtccgggcccgacatcgacatagagggcccagaaggaaaactgaaggggcccaagttcaaaatgcctgacatgcacttcaaagccccaaacatttcaatgccagatgtggacctcaatctgaaggggccaaagataaagggggacgtggatgtgtcagtgccagaggtagaagggaagctcgaagtgccagatatgaatatccggggacctaaggtggatgtgaacgcccccgatgttcaggctcctgattggcacctgaaaatgcccaaaatgaagatgccaaagttcagcatgcccgggtttaaagccgagggccccgaggtggacgtgaacctaccaaaagctgatgtggatatttccgggccgaaggtagacattgaaggacctgatgtgaacattgaaggaccagaagggaaactgaaggggccaaaactgaagatgccagagatgaacattaaggcacccaagatctccatgcctgactttgatctgcatctgaaggggccgaaggtgaagggtgatgtggatgtgtcccttccaaaggttgaaggcgacttgaagggccctgaggtggatatcaagggtcccaaagtggatataaatgctcctgatgttggggtgcaggggcccgactggcacctgaaaatgccaaaagtgaaaatgccaaaattttccatgccagggttcaagggggaaggcccggacggggatgtaaaattgccgaaagcggatatcgacgtgtccggccctaaagtggacattgaagggccagatgtgaatattgagggcccagaaggaaaacttaagggtccaaaattcaagatggcgcaacggtggtggtag

SEQ ID NO: 22777 - DNA, 450 bp, synthetic construct
  misc_feature 1..450: note = Description of Artificial Sequence: Synthetic coding sequence
  source 1..450: mol_type = other DNA
atggagaaggaggagaccacccgggagctgctgctgcccaactggcagggatcaggatctcatggactgacaattgcccagcgcgacgacggagtctttgtacaggaggtgactcaaaactcccccgcggctagaacaggtgtggtcaaagagggagaccagattgtcggggccacaatctacttcgacaacctgcagtccggggaggtaacgcagctcttgaatactatgggccaccataccgtagggctaaaacttcacagaaaaggcgataggtcaccagagccaggccagacctggacccgcgaagtcttttccagttgtagttcggaggtcgtgctcaatactccgcagcctagcgctctggaatgcaaagatcagaacaagcagaaggaagcttctagccaggcaggagccgtgagtgtcagcacacctaacgccgggctgtag

SEQ ID NO: 22778 - DNA, 17673 bp, synthetic construct
  misc_feature 1..17673: note = Description of Artificial Sequence: Synthetic coding sequence
  source 1..17673: mol_type = other DNA
atggagaaggaggagaccacccgggagctgctgctgcccaactggcagggaagtggcagccacggactcacgattgcccagcgggacgacggcgtcttcgtgcaagaggtgacccaaaatagtccggccgcaagaacgggcgttgtaaaggagggagaccagatagtgggtgccactatctacttcgataatttacaatcaggggaggtgacgcaattgctcaacacaatgggacaccacactgtcgggctaaagctgcaccgcaagggcgatagatcacctgagcccggccagacatggactcgggaggtcttttcatcatgttcttctgaggtagtcctaagcggtgatgacgaggaataccagcgaatctatacaaccaagattaagcctagactgaaatctgaggacggcgttgaaggagacctaggcgagacccagtcacggaccatcaccgtgacaaggagggttacggcctacacggtcgatgtgacaggccgcgagggcgccaaagacattgatatttcatccccggaatttaaaattaaaatccctaggcacgagctcacagagatcagcaacgtggatgtggagactcagtcggggaaaacagtgattagattaccctccgggtccggcgctgcctcgcctacgggtagcgcggtagacattcgcgcgggggccatcagcgcatccggcccagaattacagggcgcaggacacagcaagctgcaggtgacaatgcctggcatcaaagtgggtggctccggtgtcaacgtaaacgcaaaggggctcgatttgggtggtcgtggcggagtccaggtgcccgccgtggacatctcctccagcctgggcgggagggctgtggaagtgcagggcccgtccctggaaagtggcgatcacggtaaaattaaattccctacaatgaaagtgccgaaattcggtgtcagcaccgggcgggagggacagacaccaaaggcgggactgagggtatcagcacccgaggtgagtgtaggccacaaggggggaaagcccggacttaccatccaagccccccagctagaagtaagtgtgcccagcgccaatatagagggtctcgagggcaaactcaaaggtccacagattactggacccagtctggaaggtgacctggggctgaagggagccaagccccaaggtcatataggcgtcgacgcctcagcccctcagattggcggatcaattactggccctagcgtggaggtccaagccccagacattgatgtacaagggcctggatccaaactcaacgtcccgaagatgaaggtgcccaagttttccgtgagcggagccaagggagaagaaactggcattgacgttacactaccaaccggggaggtgacagtgccaggtgttagtggagacgtgagtctgccagagatagcaactggaggtctggagggtaaaatgaagggcaccaaggtgaagactcccgagatgattatccagaaaccaaaaatcagcatgcaggacgttgacctttccttaggcagtcctaaactgaagggagacatcaaggttagcgcccctggggtccagggcgatgtcaaaggacctcaggtagcacttaaaggcagccgggttgacatcgaaaccccaaatctggaggggaccctcaccgggcctagactcgggtcgccaagcgggaagactggaacctgccgaatcagcatgtcagaggtggatctgaatgtggctgcgcccaaagtgaagggaggcgtcgacgtcactctgccaagggtggaaggaaaagtgaaagtgcccgaggtcgacgtgagaggccctaaggtcgatgtcagtgcacccgatgttgaagcgcatgggccggaatggaatctcaagatgcccaagatgaaaatgccaactttttccaccccaggagccaaaggcgaaggccctgatgttcacatgacgctgccgaaaggtgacatcagcatctccggccctaaagttaatgtggaggctcccgacgtgaatttggagggcctcggaggtaagctgaagggtccagatgtgaagctgcctgacatgtccgtcaagacgcctaaaattagcatgccagatgtggatctacacgtgaagggtaccaaagtcaagggggagtacgatgtgacggtccccaaactggagggcgaactgaaaggacctaaggtggacattgatgccccagatgttgatgtccacggccccgactggcacttgaaaatgccgaagatgaagatgccgaaattctccgtgccgggtttcaaggctgaaggccccgaggtggacgttaatctgcctaaagccgacgtggatatcagtgggcccaaaatcgacgttaccgcaccagatgtgtcaatagaggagcctgaaggtaaactaaagggccccaaattcaaaatgcctgagatgaacataaaagtgcccaaaatctcgatgcccgacgtagacctgcacctcaagggacctaatgtgaagggagagtacgacgtcactatgccaaaggtggagtctgaaatcaaagttcccgacgtagagctcaagagcgccaaaatggatatagatgtacctgatgtggaagtgcaggggcccgactggcacttgaagatgcccaaaatgaagatgccgaagttcagcatgccaggcttcaaagcagaagggccagaggtggacgttaacctcccgaaagcagacgtcgatatctccggtccgaaagtgggagtcgaggtgcccgatgtcaatattgaggggccagaaggcaaactgaagggccccaaattcaagatgcctgaaatgaacataaaggcgccgaagatttccatgcccgacgttgatcttcatatgaagggccctaaagtcaaaggtgaatacgacatgactgtgcctaagctcgaaggcgacctgaaagggccgaaagtggacgtgtctgcccctgacgttgaaatgcaaggtccagactggaatctgaaaatgcccaagataaagatgccaaaattttccatgccttccctgaagggggagggcccagagttcgacgtaaatctgtcaaaggccaatgtggatatctccgctcctaaggtggatacaaacgcccccgacctaagcctggaggggcccgagggcaagttgaaggggccgaaatttaagatgcctgagatgcattttagagcacctaagatgtccctgccagacgtcgacctggatctgaagggccctaagatgaagggaaatgttgacatctcagcccccaaaattgaaggcgagatgcaagttcccgacgtcgatatccgcggcccaaaagtagatattaaggcacctgacgtcgagggacagggtcttgattggtctttaaagatccctaagatgaagatgcccaaattttccatgccaagtctgaagggggaagggcccgaggttgatgtcaacctgcctaaagccgacgtcgttgtttcaggacctaaggtggatatcgaagccccagatgtcagcctggaaggccctgagggcaagctgaagggaccaaagttcaaaatgccagagatgcactttaagaccccaaaaatatctatgcccgatgtcgatctgcacttaaagggcccaaaggtaaagggcgacgtcgatgtaagcgtgcccaaagtcgagggcgagatgaaggtccctgacgttgaaattaaagggcctaagatggatatcgacgccccagacgtggaggtgcaggggcctgattggcacttaaaaatgcccaagatgaaaatgcccaaattctccatgcctggcttcaagggtgagggccgagaagttgatgtgaatctgccaaaagcagatatcgacgtgagcggcccaaaggtggacgtggaggtgcccgatgtgagcctagagggccctgaaggaaagttgaagggcccaaagtttaaaatgcctgagatgcattttaaggcccccaaaatcagcatgcccgacgtagacctgaatctcaagggacccaaattaaaaggtgatgtggacgtctcactgcctgaagtggaaggggaaatgaaggtccccgatgtggatatcaagggaccgaaggtggacattagtgctccggacgtcgacgtacatggacctgactggcatctgaagatgcccaaagtgaagatgcccaaattttctatgcccggcttcaagggcgagggacctgaggtggatgtcaaattacctaaggccgacgtggatgtgtccgggccaaaaatggatgcagaagtccccgacgtaaacatcgaaggacccgacgcaaaactgaaaggacctaaattcaagatgcccgagatgagcatcaagcctcagaagatctctattcctgatgttggactacacctgaaggggccaaaaatgaagggagattatgatgttactgttccgaaagttgaaggagagattaaagcccccgatgtcgacattaaggggccgaaggtggacatcaatgcccctgatgtggaagtgcacggacctgattggcacctgaagatgcctaaggtaaaaatgccaaaattctccatgcctgggttcaaaggggaaggacccgaggtagacatgaatctgcctaaagcagatctcggcgtgtcagggccaaaagtggacatcgacgttccggatgtgaaccttgaagcccccgagggcaagttgaaaggtcctaaattcaaaatgcctagcatgaacattcagacacacaagatttcaatgcccgacgttgggctaaacctgaaggccccaaaactgaaaacagatgtcgacgtaagtcttccgaaagttgaaggagacctcaaaggacctgagattgacgtgaaggcgccaaaaatggacgtgaacgtgggcgatatcgacattgagggcccggagggtaagctgaaaggtcctaaattcaaaatgccagagatgcacttcaaagcccccaagatctcaatgccggacgtagatcttcacttaaagggcccaaaggtgaagggagacatggatgtttcggtccccaaggtggagggggaaatgaaagtgcccgacgtggacattaaagggcccaaagtggatatcgatgctcctgatgtcgaggtgcacgatcccgattggcatctgaaaatgcccaagatgaaaatgccaaagttcagcatgcctggctttaaagctgaaggacctgaagtcgatgtgaacctgccaaaagccgatatcgatgtctcagggcctagtgtcgacacagacgcacccgatcttgatatcgaggggccagagggcaagctgaaggggtctaaatttaaaatgcctaaactgaacatcaaagcgcctaaagtgagtatgccagacgttgatctcaatcttaagggacccaagctgaagggcgaaatcgatgcgtccgtacctgagctcgaaggtgatctgcggggtcctcaagtagatgttaagggacctttcgtggaagctgaagttccggacgtcgatctggaatgccctgatgctaagttgaaggggcctaaattcaaaatgccagagatgcattttaaggccccaaaaattagtatgcctgatgtggacctgcacctcaagggaccgaaggtcaaaggtgacgctgatgtgtcagtcccaaagttggagggggatctcaccggtccttcagtgggcgtggaggttcccgatgttgagctggaatgccccgatgcaaaacttaaaggacctaaatttaaaatgccagacatgcacttcaaagcgccgaaaatctcaatgccagacgtcgacctgcacctaaagggacccaaagtgaaaggcgacgtcgacgtcagcgtgcccaagctcgaaggcgacttgaccggcccctcagtcggggtcgaggtgcctgacgtggagcttgagtgtcccgatgcaaaactcaagggcccgaaattcaaaatgcctgaaatgcacttcaagacccccaaaatctccatgcccgatgttgatctgcatctgaaaggcccaaaagtcaagggggatatggatgtcagcgtcccaaaggtagagggggaaatgaaagttccggacgtcgatattaagggccctaagatggacatcgacgcccctgacgtggatgttcacggacctgactggcatttgaaaatgcctaagatgaagatgcctaaattctccatgccaggtttcaaagccgagggccccgaagtagacgttaacctccccaaagccgatgttgtagtatctgggccaaaagttgatgtggaggtaccagacgtctctttagaaggcccagaggggaagcttaagggacctaagcttaaaatgccggaaatgcattttaaggctccaaagatctctatgcccgatgtagaccttcacctgaagggacctaaagttaagggagacgtcgatgtttccttgccgaaacttgagggcgacctcacaggtccaagtgtcgatgtcgaggtgcccgacgtggaactagagtgtccggacgctaagcttaaaggaccaaaatttaaaatgcctgaaatgcattttaagaccccgaagatatcaatgcctgacgtgaatttgaacctaaaaggacccaaggttaagggtgatatggacgtatcagtccctaaggttgagggcgaaatgaaggttcccgacgtggacattcgcggacccaaggtcgatatcgacgccccagacgtggatgtgcatggaccggattggcacctgaagatgcctaagatgaaaatgcccaagtttagcatgccaggctttaaaggcgagggcccggaagttgacgtaaacctccctaaggctgatgtggatgtttctggccccaaggttgatgtggaggtgcctgatgttagtttagaagggcccgaggggaagttaaaaggaccaaagtttaagatgcctgagatgcacttcaagacgcctaagatttcaatgcctgatgttgactttaacctcaaggggcctaagattaagggagacgttgatgtgtctgcccccaaattggagggtgaactgaaaggccctgagctggacgtaaagggccccaagctggacgccgacatgcccgaagtggccgtagaggggcccaacggaaaatggaaaacgcccaagttcaagatgccagatatgcattttaaagcacccaaaatctccatgcctgacctggatttacacctcaaatcaccaaaagctaagggagaagttgacgttgatgttccgaagctggagggagatcttaaaggccctcatgttgacgtcagcggcccggacatcgacatcgaaggacctgagggcaagttaaagggaccgaaatttaaaatgcctgatatgcatttcaaggctccgaacatttccatgccggacgtggacttgaatctcaaaggcccaaagatcaagggagacgttgacgtcagtgttccggaagtggaagggaagctggaggttcccgatatgaacattcgaggtcctaaggtggacgtaaacgcgccagatgttcaggcaccagattggcatctgaagatgccaaagatgaagatgcctaagttttctatgcccggtttcaaggccgaggggcctgaggtggatgtgaatctccccaaggctgatgtggatatttcaggccctaaggttgacattgagggaccagacgtcaacattgaaggaccagaaggtaagctgaaaggcccaaaacttaagatgcccgagatgaatattaaggcccctaagatctcgatgcccgacttcgatctgcatctgaagggtcccaaagtaaagggtgacgtggacgtgagcctgcctaaagttgagggggacctcaaaggtccagaggttgatattaagggacccaaagtggacatcaacgccccagatgtgggagtgcagggaccagattggcacctcaagatgcctaaggttaagatgccaaagtttagtatgcctggatttaaaggggagggtccagacggagatgtgaaacttccaaaggcagacattgatgtgagcggccccaaggtcgacatcgagggccctgacgtcaatatcgagggaccagaggggaaattaaagggaccgaagtttaaaatgccagaaatgaatattaaagcaccaaaaatctcaatgcccgatattgatctgaacctgaagggaccgaaagtgaaaggcgatgttgatgtgtccctcccaaaggtggaaggtgaccttaaaggtccggaggttgacattaagggtccaaaagttgacatcgatgcgccagatgttgacgtccacgggcccgattggcacctgaagatgccaaagatcaagatgcctaagatcagcatgcccggttttaagggtgagggcccagacgtcgacgtgaacttgcccaaggccgacattgacgttagcgggcccaaggttgatgttgagtgcccagacgtcaatatcgagggcccggagggaaagtggaagtcccctaagtttaagatgcccgagatgcactttaaaacgccgaaaatttcgatgccagacattgatttgaatcttacgggcccaaaaatcaagggagacgtggacgtaaccggtccaaaggtggagggagatttgaagggccctgaagtcgacctaaagggccctaaagtggacattgacgtgccagacgtaaacgtgcagggtccagactggcatctgaaaatgccgaaaatgaaaatgccaaaatttagcatgccaggcttcaaggcagaaggtcctgaagtcgatgtaaatctgcccaaggcagatgtagatgttagtggacctaaggtggatgtcgaaggccccgacgtcaacattgagggaccagaaggaaagttgaagggacctaaatttaaaatgccggaaatgaatattaaagcacctaaaatcccgatgcccgattttgatctgcacttaaaaggacctaaggtaaagggcgacgtggatatcagcctgcctaaggtcgagggagacctgaagggcccagaggtggatattcgtgggccccaggtcgatatcgacgtgcctgacgttggcgtgcaaggtcctgattggcacttaaagatgcccaaagtgaaaatgccaaagttctccatgccaggcttcaagggggagggccccgacgtggacgttaacctccctaaggccgatctcgatgttagtggaccaaaggtggacattgacgtgccagacgtcaatatagagggaccagagggaaaactgaagggcccaaagtttaagatgcccgaaatgaacatcaaagcaccgaaaatttccatgccagacatcgatcttaacctcaagggcccgaaggtgaagggcgatatggacgttagcttacctaaggtggagggcgatatgaaggtgcccgatgtggatattaagggacctaaggtcgacatcaatgcccctgacgtggacgtacagggtcctgactggcacctgaaaatgcccaagatcaagatgcccaagatctctatgcctggcttcaagggagagggacctgaagtcgatgtcaacttaccaaaggccgatctcgacgtcagcggtccaaaagtcgacgttgacgtccctgatgtgaacatcgagggccctgacgctaaactcaagggccccaagttcaagatgcccgagatgaatattaaggcacctaaaatctctatgccagaccttgatctgaacctgaaaggtcccaaaatgaagggagaggtggatgtttccttagccaacgtcgagggcgacctaaaaggacccgcattagatattaagggaccgaaaattgacgtggacgcacccgatatcgatatacatggccccgacgcaaagctgaaaggccctaaattaaagatgcccgatatgcacgtcaatatgccaaagatctctatgcctgagatagacctgaatctgaaaggaagcaaattgaaaggagatgttgatgtttccggcccaaagcttgaaggagacatcaaggctccctccctagacatcaaggggccagaggtagacgtgtccggtcctaaactgaatattgagggaaagagcaaaaagagcaggtttaagcttcccaagttcaacttctcagggtcaaaagtgcagacacccgaggtcgatgtgaaagggaagaagccagatatagatattacaggccctaaggttgacatcaacgcacccgatgtcgaggttcagggcaaggttaaaggctcaaagtttaaaatgccattccttagcatctcctctcctaaagtctcaatgccggacgtggagttgaatctgaagagtcctaaggtaaaaggtgatctggatatcgccggaccgaatctcgagggtgattttaaagggccaaaagtcgatatcaaggctcctgaggtcaatctgaacgcgcctgacgttgatgttcatggtccagactggaacctgaagatgcctaagatgaagatgcccaagtttagtgtcagtggcctgaaagcggaaggacccgatgtggccgtggacctccccaagggagacatcaatatagaggggccttctatgaacattgaagggccagacctcaatgtggagggaccggaaggaggtttaaaagggcctaaattcaagatgcccgacatgaatattaaggctcctaaaataagcatgccagacattgacttgaatcttaaaggtcccaaggttaagggcgatgtagacatttcactgcctaagctggaaggggatttgaaaggcccagaggtagacatcaaaggtccaaaggtggacatcaacgcccccgacgtggacgtccatggccctgattggcacctgaaaatgccaaaggtcaagatgcctaagttttcaatgcccggattcaagggtgaaggccccgaagtggatgttacattacctaaggcggacatcgatatttccggccctaacgtggacgtcgacgtccccgacgttaacatagaagggccagatgccaagttgaagggacctaagtttaaaatgcccgaaatgaacataaaagccccaaagatatcaatgcccgacttcgatttgaatcttaagggccctaaaatgaaaggagacgtggttgtttctctccccaaggtggaaggggacttaaagggaccagaagtagacattaaaggccctaaggtcgatatagacactccggacattaacatcgagggctccgaaggtaagtttaagggccccaagttcaagatccccgaaatgcaccttaaagctcccaaaattagcatgcccgacatcgatcttaacttaaaaggccctaaggtgaagggtgacgtggacgtgtctttgccaaaaatggagggcgaccttaaaggccccgaagttgacattaaaggccctaaggtggacatcaacgctcccgacgttgacgtccagggtcctgattggcatctgaaaatgccgaaggtgaaaatgcctaagttcagcatgccgggattcaagggcgaaggacccgatgtggatgttaacctgccgaaagcagacttggacgttagcggtccgaaagtggacattgatgtacccgatgtcaatatcgagggccctgaaggcaagctaaaagggcccaagttcaaaatgcctgagatgaatatcaaagcccccaaaatatctatgccagacatagatcttaaccttaagggcccaaaagtgaagggagacatggatgtgtctctgcctaaggtggagggcgacatgcaagtgcccgacttagatataaagggcccaaaggtggacataaacgccccagacgtggatgtgcgcggtcctgattggcacctgaaaatgccaaagataaaaatgccaaagattagcatgcccggattcaaaggcgagggacctgaagtcgacgtcaacttgccaaaggccgacctcgatgtgagtggccctaaggtcgacgtcgatgtcccggatgttaatatcgaaggtcccgacgcaaagttaaaaggacccaaatttaagatgcctgaaatgaacattaaggcacctaagatttctatgcctgactttgacttgcacctgaaaggcccaaaggtgaagggagatgtcgacgtgtcccttcctaaaatggagggtgatctgaaggcaccggaggtcgacattaaggggccaaaagtggacattgacgcaccggacgttgatgtgcacggccctgattggcaccttaagatgcctaaagttaagatgcccaaattctccatgccagggtttaagggggaggggcccgaggtggatgtcaacctgcccaaggcagacattgacgtgtcggggccaaaagtcgacattgacactcccgatatcgatatccatggtcctgagggcaagctgaagggtcccaagttcaagatgcccgacctacacctaaaggccccaaagatatccatgccagaagtagacttgaacctgaaaggcccaaaaatgaagggggatgtggacgtatccctcccaaaggtagagggtgacctaaagggccctgaagtggacattaaaggccctaaggtggacattgacgttcctgacgtggatgtacaaggcccagattggcacctcaaaatgcctaaagtcaaaatgccaaagttttctatgcctggattcaaaggcgaggggcctgacgtagatgtgaacctccccaaagctgacttagacgtctctggtccaaaagtggatatagacgttcctgacgtcaacatcgaaggacccgacgcgaagctgaaaggccctaagttcaagatgcctgagatgaacattaaggctcctaagatcagcatgcccgacttcgacttacatctcaagggaccgaaagtgaaaggggacgtcgatgtgtctcttcctaaggtggagggagaccttaaaggccctgaagtggacattaaaggccctaaagtggatatcgatgcccctgacgtggacgtgcacggcccggattggcatctgaagatgcccaaagtcaaaatgccaaaattttctatgcctgggtttaaaggggaggggccggatgttgatgtgacactccccaaagcagacatcgaaatctctgggccaaaagtggacatcgacgcgccagatgtatctatagagggacccgacgccaaactgaagggcccaaaatttaaaatgcctgaaatgaacatcaaggcccccaagatttctatgcccgacatcgatttcaatctgaagggtcccaaagtaaagggagatgtagatgtcagcttacccaaggtggaaggcgacctgaagggacccgagattgacatcaagggccctagccttgatattgatacccctgatgttaatatcgagggaccagagggcaagctgaaaggaccaaagttcaagatgcctgagatgaacatcaaggctccaaagatcagcatgcctgatttcgatttacacttgaagggtcccaaggtaaagggggacgtggacgtgtccttgcctaaagtggagagcgatctgaaaggaccggaagtcgacattgaggggccagagggcaaactgaaaggaccaaagttcaaaatgcccgacgtacatttcaagtcaccacaaatctccatgagtgatatcgaccttaacctgaagggaccgaagattaagggagatatggacatatctgttcctaagttggagggggatcttaagggtcccaaagtcgacgtgaaggggcctaaggtggggattgatactcccgatatagacattcatggccctgagggcaagctaaagggtccaaaattcaagatgccggatctgcatctgaaggcacccaaaatctccatgcctgaggtcgatttgaacttaaagggccccaaagtgaaaggagatatggatatttcacttccaaaagttgaaggcgacctcaaaggtcccgaagtggacattagggacccaaaggtggatatcgatgtccctgatgtggatgtgcaaggccccgactggcatctgaagatgccgaaggtcaagatgccaaagttctcgatgcccggcttcaagggggagggaccagacgtggacgtgaacctccctaaagcggatatcgatgtatccggtcccaaagtggacgtggatgtcccagacgtgaatatagaaggccctgatgcaaaattgaagggacctaagtttaagatgccagaaatgtctattaaggctccaaaaatctcaatgcctgacatcgatcttaatctgaagggcccaaaggtgaagggggatgtcgatgtgacgctgccaaaggtggaaggagatctgaagggaccagaggccgacataaagggcccgaaggtcgatattaatacaccagatgtggatgtgcacggacccgattggcatctgaagatgcccaaggtaaagatgccaaagttttcgatgccggggtttaaaggggagggccccgatgttgacgtgtctttgccaaaggccgacatagacgtgagcggtcccaaagtcgatgttgacattcctgacgtgaacattgaggggcccgatgctaagctaaagggccctaaatttaaaatgcccgagattaacattaaggcccccaagatcagcatccccgatgtggacctggacttaaagggaccaaaggtcaagggcgattttgacgtatctgtcccgaaggtcgaaggcacacttaaaggccccgaagtggacttgaagggcccacgactcgacttcgaggggcccgatgctaaactatccggcccatctttgaaaatgccttccctcgaaatcagcgccccaaaggtgaccgcacccgacgtcgatttgcacctcaaggcacccaagatcggtttcagcggccccaagctcgagggaggggaggtggatttaaaggggcctaaagtcgaggccccgtccttggacgtccacatggatagccctgacatcaacatcgaaggaccggatgtgaagattcccaaatttaagaagcccaaatttgggttcggggcaaagagccctaaggccgatattaagtctccctccctcgacgtgacagtgcctgaggcggagctaaacctagagacccccgaaatatctgtgggtgggaaaggcaagaagagcaagtttaaaatgcccaagatccatatgagcggccccaaaattaaggccaagaagcaaggctttgatttaaacgtccccgggggtgaaatcgatgcctcattaaaggcccctgacgtggacgtgaacattgccggccccgatgcagccttaaaagttgacgtcaagagtccaaagacgaagaaaaccatgtttggaaaaatgtacttccctgacgtggagtttgatataaaatcccctaaattcaaggccgaagccccactaccgtcacccaaactggagggagaactccaggcccctgatctggagctgtccctccccgctattcacgtagagggcctggacatcaaggcaaaagccccgaaagttaagatgccagacgtagacatttcagtcccaaagatagaaggcgatctcaagggtcccaaagtacaggcaaatttgggtgcccccgatatcaacatcgaaggactcgacgcaaaggttaaaactccctcttttggtatcagcgccccccaggtctctatccctgatgtaaatgtgaaccttaaggggcccaagatcaaaggggatgtccctagcgttggtctcgagggcccagacgttgacctacagggacccgaggctaaaataaagttccccaagttctccatgccgaaaattgggattccaggagtgaagatggaaggaggcggtgctgaggtgcacgcgcaacttccttccctagaaggggatctccgcgggcctgatgtcaagttggaaggccccgacgtgtcactgaaaggccctggagttgacttaccgagcgtaaacttgtcaatgcctaaggtttctgggcccgacctcgatcttaacctcaaaggccctagtctgaagggcgacctggacgccagcgtgccctccatgaaagttcacgccccgggcctgaacttaagcggcgtgggagggaagatgcaggtgggtggggacggggtcaaggtacccggcattgacgcaactacgaagctgaacgtgggtgcacccgacgtgactctaagggggccatctcttcaaggtgatctggccgtgtctggcgacatcaaatgcccaaaggtcagtgtgggtgccccagacctgagcctggaagcctctgaaggcagcataaagctgcctaagatgaagctgccccagtttgggatcagcacgcctggatccgatctccacgtcaacgccaagggacctcaggtgtccggggaactgaaaggccccggcgtggacgtcaacctgaaggggccaagaatttcagcaccgaacgtggattttaacctcgaaggacccaaggtaaaaggaagcctgggagcaactggagaaatcaagggaccaaccgtggggggggggctgcctgggatcggtgttcaggggctcgagggaaacctacagatgcctggcatcaagagctcaggctgcgatgtgaacctgcccggagtaaatgtgaagctgccgacgggacagatctctgggcccgaaattaagggaggtctcaaggggtctgaggtgggcttccacggcgctgccccagatatcagcgtgaagggccctgcgttcaacatggccagtccggaaagcgattttgggattaatctgaaggggccaaaaattaaaggcggcgccgatgtgtccggaggggttagtgctccagatatttctctcggagaaggccacctctccgttaaaggaagtggaggcgaatggaagggcccccaagtgtcgagcgctctcaatcttgatacgagtaaattcgctggaggtctccacttctctggcccgaaggtcgagggcggagtgaaaggcggccagataggactccaagctcccggtctctccgtttcaggcccccagggacatcttgaatctgggtccggtaaggtcacctttccaaaaatgaaaatccctaagtttactttctcaggccgggagcttgtcggccgagaaatgggcgtggatgttcacttccctaaagctgaggcctccatccaggccggcgcaggggacggagagtgggaagagagcgaagtgaaactgaagaagtcgaaaatcaagatgcctaagttcaacttctccaaacctaagggtaaggggggcgtcacgggtagccccgaggcatcaatatccggctcaaagggagatttaaaaagctctaaggctagtctggggagcttggagggcgaagctgaggccgaggccagcagcccaaagggaaagttttccctgtttaagtccaaaaaacctaggcatagaagcaactccttttctgacgaacgagaattcagcggacctagtaccccaactggcacgctggagttcgagggaggagaagtctctctagaaggcggaaaagtgaagggtaaacacggaaagttaaaattcgggaccttcggaggtttaggatccaagagcaaaggccactacgaggtcacagggtccgacgacgaaactggtaaactgcagggttctggcgtttctctggcatctaaaaaatccagattatcttcttcgtccagcaatgacagcggtaacaaagtgggaatccaattgcctgaggtggaactgtctgtgtccactaagaaagaatag

SEQ ID NO: 22779 - DNA, 372 bp, synthetic construct
  misc_feature 1..372: note = Description of Artificial Sequence: Synthetic coding sequence
  source 1..372: mol_type = other DNA
atggagaaggaggagaccacccgggagctgctgctgcccaactggcagggatctggatcccatggcttaaccattgcacaaagagatgatggtgtcttcgtccaggaggtgactcagaattcacctgctgctcggacaggggtggtaaaggaaggcgatcaaatcgtaggggctaccatatattttgataacctccagtctggggaggtcacgcaactcttgaacactatgggtcaccacactgtgggactaaaactgcatagaaaaggtgatcgtagccctgagcccggccagacctggaccagggaggtctttagttcatgctcatccgaggtcgtcctctccggagacgatgaggagtatcagcgttag

SEQ ID NO: 22780 - DNA, 435 bp, synthetic construct
  misc_feature 1..435: note = Description of Artificial Sequence: Synthetic coding sequence
  source 1..435: mol_type = other DNA
atggagaaggaggagaccacccgggagctgctgctgcccaactggcaaggatccggttcccacggactgacaatagcacagcgggacgatggtgtcttcgtccaagaggtgacccaaaattcaccagcggctcggactggcgtcgtgaaggagggggatcagatagttggcgctactatctattttgataacctgcagtctggtgaggtgacacaactcctaaatactatgggccatcacactgttggtctcaaactacaccggaaaggagataggagtcccgagcccggtcagacctggacgcgggaagtcttttcctcatgctcatccgaggttgtgcttagcggagatgatgaggagtaccagcggatatacacaaccaaaatcaagccccgcttaaaaagcgaggacggagtagagggcgacctgggctag

SEQ ID NO: 22781 - DNA, 261 bp, synthetic construct
  misc_feature 1..261: note = Description of Artificial Sequence: Synthetic coding sequence
  source 1..261: mol_type = other DNA
atggagaaggaggagaccacccgggagctgctgctgcccaactggcagggcagtgggtcacacggactaactatcgctcaacgggatgacggagtgtttgtgcaggaggtgactcagaatagccctgcagcccgcaccggagtggttaaggaaggagatcagattgtgggtgcaactatttattttgacaatctgcagtccggtgaggtgactcagctgctcaacactatggggcaccataccgtcggattgaaattgtag

SEQ ID NO: 22782 - DNA, 366 bp, synthetic construct
  misc_feature 1..366: note = Description of Artificial Sequence: Synthetic coding sequence
  source 1..366: mol_type = other DNA
atggagaaggaggagaccacccgggagctgctgctgcccaactggcaggggtctggcagtcacggcctgacaatcgctcagcgagacgatggggtgttcgtgcaagaagtgacacagaatagcccggctgccagaacgggtgtggtaaaggaaggagatcaaattgtcggagctaccatatatttcgacaacctgcagtcaggtgaggttacacagcttctgaatactatgggtcatcacactgttggtctgaaattacacagaaaaggagaccggtcacctgaaccaggccagacttggaccagggaagtgttctcttcctgttcatctgaagttgtcttaaatacccctcaaccatccgcttag

SEQ ID NO: 22783 - DNA, 2904 bp, synthetic construct
  misc_feature 1..2904: note = Description of Artificial Sequence: Synthetic coding sequence
  source 1..2904: mol_type = other DNA
atggccaagggcttctacatcagcaagagcctgggcatcctgggcattttactgggcgtggccgcagtatgcactattattgcgctgtctgtggtttactcccaggagaaaaataagaacgccaattctagcccagtggcatcaaccacacctagcgcgagtgccaccactaaccctgcaagcgccacgactctcgaccagtctaaggcctggaacagatatcggctgccaaatacgctgaaacctgattcttatcgggtaactctgcgaccctacctgacacccaacgatcggggactgtatgtcttcaaagggtcatccacagtcagatttacatgtaaagaagctacagacgtcataattatccatagcaaaaaattgaactacaccctgagtcaagggcatcgagtggttctgcgaggggtcgggggatcccagccaccagatattgataagacagagctcgtggaaccaaccgaatacctcgtggttcatctcaaggggtccctcgtgaaggatagccagtatgaaatggactccgagttcgagggggagctagccgatgacctggccggcttctaccggagtgaatacatggagggaaacgtaagaaaagtggtagccacaacccagatgcaagccgccgacgctcgcaaaagcttcccctgctttgatgaacctgccatgaaagctgagttcaacattactctcatccacccaaaggatctgaccgctttgagcaatatgctaccaaaggggccctcgacccccctcccagaggaccccaattggaatgtgacagagttccatacgactccaaaaatgtcaacctatctgcttgccttcattgtgtcagagttcgattatgttgaaaagcaggccagcaatggagtgctgataaggatctgggccagaccctccgcgattgccgcgggccatggagattacgcgttgaacgtgacaggcccaattctcaatttctttgccggacattacgacactccgtaccctttgccaaagtcagaccagatcgggctgcctgactttaacgccggcgcaatggaaaattggggactggtgacctaccgagaaaattccctgctctttgatccattgtcttcatccagctcgaataaagagcgagtcgtgaccgtcatcgcgcatgaactggctcatcagtggtttggaaatctcgttactatcgagtggtggaacgatctatggctgaatgaaggatttgcgtcctacgtggaatatctgggggctgactacgctgaacccacttggaatctgaaggacctgatggtactgaacgacgtctaccgagtgatggccgttgacgccttagcctcatcccaccccttgtcaacaccagcaagcgagattaatactcccgcacagatcagtgagttgttcgacgccatttcatattccaagggtgcgtctgttttgcgcatgttgtcctcatttttgtccgaggacgtgtttaagcaaggtctcgcgtcatatctgcacacctttgcttatcagaacactatatatctaaatctgtgggaccacctacaagaggccgtgaataaccggagcattcagcttccgactacggtgagagatatcatgaaccgctggacactgcagatgggttttcccgtcattactgtggacaccagtaccgggaccttgagccaggaacatttcttgttggatcccgatagtaacgtgactagacccagcgaattcaactacgtgtggatcgtgcctattactagcatccgggacggcagacagcagcaggactattggctgatagatgtgcgagcccagaacgatttgttctcaacctccggaaacgaatgggtgctcctaaatcttaacgtaacagggtactaccgggtgaactatgatgaggaaaattggcgaaagatccagactcagttacagcgtgatcactcagccattcctgtgatcaaccgtgcgcagataattaatgatgcatttaatctcgcctccgcccataaggtgccagttactctcgcccttaacaacacgctgtttctgatcgaggaaaggcagtacatgccatgggaagctgcactctcgagcctctcatatttcaaacttatgttcgatcgcagtgaagtttacgggcctatgaagaactaccttaaaaagcaggtcaccccgctttttattcacttccgaaacaataccaacaactggagggagatcccggagaacctgatggatcagtacagcgaggtcaatgctatttccaccgcttgttccaatggagtgcccgagtgtgaagaaatggtttccggactgtttaaacaatggatggaaaaccctaacaataatcccatccacccaaaccttagatctactgtgtattgcaatgccattgcgcaggggggggaagaggaatgggattttgcatgggaacagttcagaaacgcaacccttgtcaacgaagccgataagctgcgggccgccctggcctgctccaaagaactctggatactgaatcgatacctgagctacacgcttaatcctgatcttattcgaaaacaggacgcaacaagtacaattatctccattaccaacaacgtcataggtcaggggctggtgtgggatttcgtgcaatcgaattggaaaaagttattcaacgattacggcggcggctctttcagcttctccaacttgatacaagccgtgaccagacgattttccacggaatatgagctccagcagcttgagcaatttaaaaaagacaacgaagagactggtttcggaagcggaaccagagcattggaacaagctcttgagaaaacaaaggccaacataaaatgggttaaggaaaataaggaggtcgtcctgcaatggtttacagagaattcgaagtag

SEQ ID NO: 22784 - DNA, 312 bp, synthetic construct
  misc_feature 1..312: note = Description of Artificial Sequence: Synthetic coding sequence
  source 1..312: mol_type = other DNA
atggccaagggcttctacatcagcaagagcctgggcatcctgggcattttgctgggcgtcgctgccgtctgtacaattatcgcacttagtgtggtatattcccaggaaaaaaacaagaatgcgaattctagccctgtcgcctctacaacaccctctgcatctgcaactacaaatcccgcatccgctaccacacttgaccagagtaaggcctggaatcgctatagattacctaatacattgaaaccggattcttaccgtgtgaccctgcgaccttatctgacccctaatgaccgaggcttatatgtgttctag

SEQ ID NO: 22785 - DNA, 186 bp, synthetic construct
  misc_feature 1..186: note = Description of Artificial Sequence: Synthetic coding sequence
  source 1..186: mol_type = other DNA
atggccaagggcttctacatcagcaagagcctgggcatcctgggcatcctgctgggtgtagccgcagtatgtacaattatagccctcagcgtggtctactcgcaagagaagaacaaaaatgcaaacagctcaccagtcgcgagtaccacaccatctgcctccgcaaccacaaatcccgctagctag

SEQ ID NO: 22786 - DNA, 381 bp, synthetic construct
  misc_feature 1..381: note = Description of Artificial Sequence: Synthetic coding sequence
  source 1..381: mol_type = other DNA
atgaaccagaacaccgacaagatcagcggcagcggcagcaacagcgacatgatggaaaattctaaagaggagggtacatcctcttccgaaaagagcaagtcaagtgggtcaagcaggagcaaaaggaaaccatcgattgtgacaaagtacgtggagagcgacgatgaaaaaccactggatgatgaaacagtcaacgaggatgccagcaatgaaaattcggaaaacgacattacgatgcagtctctgcctaaggggaccgtaatcgtccaacccgagcccgtcctgaatgaggacaaagatgattttaagggccctgagttccgtagccgctccaagatgaagacagagaatcttaagaaaagaggtggaaagtataagtag

SEQ ID NO: 22787 - DNA, 7479 bp, synthetic construct
  misc_feature 1..7479: note = Description of Artificial Sequence: Synthetic coding sequence
  source 1..7479: mol_type = other DNA
atgaccgccgagcccatgagcgagagcaagctgaacaccctggtgcagaagctgcatgattttctagcgcactctagcgaagaaagcgaggaaacaagcagccctcctcgcctcgcaatgaaccagaacaccgataaaatttcagggtctggaagtaactccgacatgatggagaattctaaggaggaggggaccagctcatcagaaaaaagcaagtcttccgggtcctctcgctctaagcggaaacccagcatcgtgaccaaatatgtcgagtcagacgatgagaagcccctggatgacgagacagtgaacgaggacgccagcaatgagaactccgaaaatgatatcacaatgcagtcactgccaaaaggaactgtgatcgtccagccagaacctgtcctgaacgaagataaagatgatttcaaaggacctgaattccgttcccggagcaaaatgaagaccgagaaccttaaaaagcgcggcgaggatggtcttcatggtatagtgtcctgtactgcatgcggccaacaagtcaatcacttccagaaagattccatttatcggcacccaagcttacaagtccttatttgcaagaattgctttaaatactatatgagcgacgatataagtcgtgattctgatggtatggacgaacaatgccgctggtgtgccgaaggaggtaacctcatatgctgtgacttctgccacaatgccttctgcaaaaagtgcatcttgagaaatctggggagaaaagagctgtccaccattatggacgagaataaccagtggtattgctatatctgccaccccgaacctcttctggatctcgttactgcttgtaactccgtctttgaaaacctggagcaactcttgcagcagaacaagaagaagatcaaggtggactctgagaaatcgaataaagtgtacgagcacacatcgagattcagcccaaagaaaacctcaagcaattgtaatggggaggagaagaaacttgacgacagttgctcgggaagcgttacctatagctatagtgcgctgattgtccctaaagagatgattaagaaagctaagaagctgatcgagacgaccgccaacatgaactctagttacgtaaagtttttaaagcaggctaccgataactctgagatctcctcggcaacaaaactgagacagctgaaggcctttaagtcagtactggcagacataaagaaggcccatctggccttagaggaagatttaaactccgagttccgagccatggacgccgttaataaggaaaaaaatactaaagagcacaaagtgatagatgccaagttcgaaacaaaagccagaaagggggagaagccttgcgccctggagaaaaaggacatcagcaaatccgaggctaagctgtccaggaaacaagtggactccgagcacatgcaccagaacgtcccgaccgaggaacagcgtacaaacaagtcgacaggcggcgagcacaaaaagtccgacagaaaggaggaacctcaatatgagcctgcaaacacatccgaagatctggatatggacatcgtgtccgtcccgagcagtgtgccagaagatatctttgagaatctggaaactgccatggaagtccagtcctctgtggatcaccagggcgatggcagctccggtaccgagcaggaagttgagtcaagttctgtcaagttgaatatttcaagcaaggacaaccgggggggaatcaagtctaaaacgaccgctaaagttactaaggagctttatgtaaaactgacccctgtctccctgtcgaattcgccaattaaaggagctgactgccaggaagtgccccaggataaagacggctacaaatcttgcgggctgaaccctaagctggagaagtgcggcctgggccaggaaaattccgacaacgaacatctcgttgagaacgaggtgagtctactgctggaggagagcgaccttcgacgatccccccgggtgaagactacccccctgagacgaccaactgagaccaatcctgtaaccagcaattcagacgaggagtgcaacgaaactgtcaaggagaagcagaagctttctgtgcccgttcgcaaaaaggacaagaggaactcctccgatagcgccattgataaccctaagcctaataagctgccgaaaagcaagcagagtgagaccgtggatcagaacagcgactccgacgaaatgcttgccatcctgaaggaggtgtcccggatgagccactcaagtagctccgacactgacatcaatgaaattcataccaaccacaaaacactatatgacctcaagacccaagcggggaaagatgacaagggcaaaaggaagagaaaaagctctaccagtggctccgacttcgatacaaaaaaggggaagagcgccaaatccagcataatcagtaaaaagaagagacaaacacagtctgaaagttctaattatgactcggaactcgaaaaggagatcaaatcaatgagtaaaattggggcagcccggaccacaaagaaaaggattccaaacaccaaggacttcgactcctccgaagacgagaaacatagcaaaaaggggatggataatcaagggcataagaacctcaagactagccaagaaggatctagcgacgatgccgagagaaagcaggagcgggaaacctttagctcagccgaggggactgtcgacaaagatacgacaatcatggagttacgagatcgcctccctaaaaagcagcaagcctcagcttctacagatggcgttgacaaactctctggaaaggaacagtcatttaccagtcttgaggttcgtaaggtcgcagaaactaaagagaaatctaaacacctgaagacaaagacttgcaaaaaggttcaagacggtttgtctgacatagccgagaagtttctcaaaaaggatcaaagcgacgagacgagcgaggacgacaaaaaacagagcaagaagggcactgaggaaaagaagaagccttctgacttcaagaaaaaggttatcaagatggagcaacaatatgagagcagcagtgacggcaccgagaagctccctgagagagaagaaatatgccactttcccaaagggatcaagcagatcaaaaatggcactaccgatggggaaaagaaatccaagaagatacgtgataaaacttcaaaaaagaaagatgaactgtcggattacgccgagaagtccacaggcaaaggggacagttgcgactcttctgaggataagaaatctaagaacggcgcgtatggcagggagaaaaagagatgtaaattgcttggaaaatcctcacggaagcgccaggactgttcatccagtgataccgaaaagtacagcatgaaagaagacggatgcaacagcagcgataagagactgaaaagaattgaactgagggaacgtcgcaacctgtcctcgaagcgcaataccaaagaaattcaatcaggctcttctagctcggatgccgaggagtcgtcagaggacaataaaaaaaaaaaacagaggacttcctccaagaaaaaggctgtgattgtcaaggagaagaagaggaattcactgaggacatcaactaagagaaagcaggccgatattacatcctccagctcttctgacattgaggacgatgaccaaaactctatcggagagggaagcagcgacgaacagaagataaagcctgtgacggaaaacctcgtgctcagcagccacacagggttttgccagagcagtggcgatgaagctctgagcaagtccgtgccggtcacagtcgacgacgatgatgatgacaatgacccagaaaatagaatcgccaagaaaatgctgttagaggagatcaaggccaacctctcatccgacgaggatggttcttcagatgacgaacccgaggaaggcaagaagaggaccgggaaacagaatgaggagaatcccggtgatgaggaggcgaaaaaccaagtgaactctgagtctgattctgattcagaagaatccaagaaaccacggtataggcaccgtcttctgagacataagcttacagtgtcagacggcgaatcaggagaagagaaaaaaactaaacctaaagagcacaaggaagtaaagggtaggaataggcggaaggtctcctctgaggacagtgaagactcggactttcaggagtctggcgtctcggaggaggtgtctgagagtgaagatgagcagaggccccgaacgagatcagccaaaaaagcagaactggaggagaatcagcgatcctacaaacaaaaaaagaagagaaggcgcatcaaggttcaggaagattcttcgagtgaaaacaaatccaactctgaggaggaagaggaagagaaggaggaagaggaggaggaggaggaggaggaggaggaggaagaagaagacgaaaatgatgacagcaagtcaccggggaaaggacgtaagaagataaggaagatcctgaaggacgacaagctgcggaccgaaactcaaaacgctctaaaggaggaagaagagcgtcggaagcgcatcgctgaacgggaacgggagagggagaaactccgtgaggtgatcgagatagaggatgccagccccaccaagtgcccgattactacgaagctggtgctggacgaggatgaagaaacaaaggagccgcttgtgcaagtgcataggaacatggtgattaagctcaagccccaccaggttgatggtgtgcagtttatgtgggactgttgctgtgaaagcgttaagaagacgaagaagagccctggtagcggctgtatcttagcccactgtatgggcctgggcaagacactccaggtggtatcgtttctgcatactgtgctgttgtgcgataagctggacttctctaccgccctcgttgtgtgccctctaaacacagccttgaactggatgaacgaatttgaaaagtggcaggaggggttgaaagacgacgagaagctcgaggtatctgaactagccaccgtgaagaggcctcaggaaaggtcatatatgctgcagcgctggcaagaggatggaggtgtcatgattatcggctatgagatgtaccgcaatttggcgcagggccggaatgtcaagagccgtaaactcaaagaaatcttcaacaaggccttggtcgatcctggtcctgactttgtggtctgcgacgagggccatattctgaagaatgaggcaagcgccgtcagcaaagcaatgaatagcataagatcgcggcgccgcattattctgacgggtacgccacttcaaaacaacctgatagagtaccattgcatggtgaatttcatcaaggagaatcttctgggtagtattaaagaattcagaaatagattcatcaacccaattcagaatggtcagtgcgctgattctacaatggtagacgtcagggtcatgaagaagagggctcatatactgtacgaaatgttagcaggttgtgttcagcgcaaagattatacagccctgaccaagttcctcccgccaaagcacgagtatgtactggcagtgaggatgaccagtatccagtgcaagttgtaccaatactacctcgatcacttgacgggggtgggcaataactcagaaggtgggaggggtaaggcaggcgctaagctgtttcaagattttcagatgctcagtaggatatggacccatccctggtgtctccaactggactatatctccaaagagaataaagggtatttcgatgaggattctatggatgagttcatcgccagtgatagcgatgaaacaagcatgagcttgtcatccgatgactacaccaaaaagaaaaagaagggcaagaaaggtaagaaagattctagtagtagcggtagcgggagtgacaatgatgttgaggtgatcaaagtatggaacagcagatcaagagggggcggcgaagggaacgttgacgagactggcaacaaccctagtgtgtcactaaaactcgaggagtctaaggccacctcctcctccaacccaagttcgcccgcgccagactggtataaggattttgtgaccgatgcagatgcagaagtgctcgagcacagtggcaaaatggtgttactcttcgaaattctgcgcatggcagaagagattggcgataaggtgctggtgttcagccagtccttaatcagtctggacctcatagaagacttcctcgagctcgcgtcgagagagaaaaccgaggataaggacaaacctctgatttacaaaggcgagggcaagtggttacgaaacattgactattaccgtctcgacggaagcactacagcccagagccggaagaagtgggccgaggagttcaacgacgaaaccaatgtcaggggccggctgttcattatttcaacaaaagcaggatcgctgggaatcaatctggtcgcagcaaaccgcgtcatcatatttgacgcatcttggaacccttcatacgatattcagtccatcttccgggtctaccgctttgggcaaactaagccagtgtatgtctaccggttcctggctcagggaaccatggaagacaagatttacgaccgccaggtgactaaacagagcctttcctttcgagtggtggatcagcagcaggtggaaaggcatttcactatgaacgaactgaccgagctgtataccttcgagccggacttactcgatgaccccaattcagagaagaagaagaagagagacactcctatgctccctaaagatacaatcctcgctgaattgctgcagatccataaagagcacatcgtggggtatcacgaacacgatagtcttctcgatcacaaagaagaagaggagttgaccgaggaagaaaggaaggctgcctgggcagagtacgaagcggaaaagaaaggcctgactatgcgatttaacattcctacagggacaaacctgccacctgtttccttcaatagccagaccccatacattccttttaatcttggcgccctgtccgctatgtcgaatcagcagctggaggatttgatcaaccaaggcagagaaaaggtcgtagaggccactaactctgtcactgcagtccgtatacagcctttggaggacatcatttcagcagtgtggaaagaaaacatgaacctgtccgaggctcaggtgcaggccctcgcgctgagtcggcaggcctctcaggagttggacgtaaagcggcgggaggctatatataatgatgtcttaactaaacagcaaatgcttataagctgcgtccagcgaatcctaatgaacaggcgcctccaacagcagtacaatcaacagcagcaacagcagatgacctaccagcaagcaactctggggcacctgatgatgcccaagcccccaaacctgattatgaacccctcaaattatcagcaaatcgacatgcggggtatgtatcagccggtggccgggggtatgcagcccccaccattacaaagagctccacctccaatgcggtctaagaacccaggccccagccagggcaagagcatgtag

SEQ ID NO: 22788 - DNA, 7365 bp, synthetic construct
  misc_feature 1..7365: note = Description of Artificial Sequence: Synthetic coding sequence
  source 1..7365: mol_type = other DNA
atgaccgccgagcccatgagcgagagcaagctgaacaccctggtgcaaaagctccacgattttctggctcattcttccgaagagagcgaggaaacaagttcgccaccaaggctggcgatgaatcagaacactgataagatctctgggagcgggtcaaatagcgatatgatggagaactctaaggaggaggggacctcatcgtcggagaagtcgaagagttccggatctagtaggagcaaacggaaaccatccattgtgaccaaatacgttgaaagcgatgacgaaaagcccttggacgacgagacggtcaacgaagatgcttcaaatgagaactccgaaaatgatataaccatgcagtctctccccaaagaggacggattgcacggcatcgtgagctgtacggcctgcggccaacaggtcaaccactttcagaaagattcaatttatcgacacccctcgctgcaggtgctgatctgcaagaactgtttcaagtactacatgtccgacgatatctcacgggacagcgacgggatggacgagcaatgtcgatggtgcgctgaagggggcaatcttatatgctgtgatttttgccacaatgccttctgtaagaaatgtattcttcggaatctgggtaggaaagaattgagtacaatcatggacgagaacaatcagtggtactgctatatatgtcaccctgagccgttactcgatctggtaacggcttgcaacagcgttttcgaaaatcttgagcagctgctacagcagaataaaaaaaaaataaaggtggacagcgagaaaagtaacaaggtctatgaacacacgagcagattctcacccaaaaagacatcctcaaactgcaacggcgaggaaaagaagttagacgacagctgcagcggcagcgtgacctactcttactccgctctcattgtgccgaaggaaatgatcaagaaagccaagaagctgatcgaaaccaccgctaacatgaacagcagttacgtgaagttccttaaacaagccacggataattcagaaatctcttcagccactaaactgaggcaactcaaagcattcaagtcagtcctggcagacattaagaaggcccacttagctctggaggaagaccttaatagcgagttccgtgccatggacgctgtgaacaaagaaaagaataccaaggaacacaaggtcattgacgccaaatttgagaccaaagctagaaaaggagagaagccatgtgctctcgaaaaaaaagacatcagcaagtccgaggctaaattaagtaggaagcaagttgacagcgagcacatgcatcagaacgtaccaaccgaagaacagaggaccaataaaagcactggcggcgagcacaagaagtccgatcgaaaggaggagcctcagtacgaaccagccaatacttccgaggatctggacatggatatcgtgagcgtgccaagctctgtgcccgaagatatcttcgaaaacctagaaaccgccatggaggtccagagttccgttgaccaccagggggatggcagcagtggcactgagcaggaggtcgagtcgagcagtgtaaagctcaacatctcctctaaagataatcgcggcggcatcaagtcgaaaactacagccaaagttacaaaggagttatatgtgaagctgacacctgtcagcttgtcgaacagtcctatcaaaggggccgactgccaagaggtgccccaagacaaggatggctacaagtcctgcggccttaaccccaagttagagaagtgcggcctgggacaggagaactccgataacgagcacctagttgaaaacgaggtgtctttactgctggaagagagtgatcttaggcgcagccccagggtgaagaccactcctctgaggcgccccactgagactaaccccgtgacttcgaatagcgacgaagagtgcaacgagacagtgaaagaaaagcaaaaacttagcgtgcctgtgcgtaagaaagataagagaaacagcagcgactctgctattgacaacccaaaacctaataaactgccaaagtccaaacagtccgaaaccgtcgaccaaaactccgattctgacgagatgttggctatcttgaaagaagtatccaggatgagtcactccagttcgtcagacaccgacattaatgaaatccacaccaatcacaaaacactatacgatctgaagactcaggctgggaaggatgacaagggtaagcgcaaaaggaagtcaagcacttcaggatccgatttcgacacgaagaaaggtaagagcgccaagagctctattatatctaaaaaaaaaaggcagacgcagtctgaaagcagcaattacgacagcgagctggaaaaggagatcaaatcaatgagcaaaattggcgcagccaggacaactaaaaagcgcattcctaacaccaaggactttgatagctccgaggacgagaaacattctaagaaaggaatggacaaccagggacataagaatctgaaaacatctcaggaaggaagctccgatgatgccgagaggaagcaggaaagagaaactttttcatctgctgagggaacagtggacaaagacaccacgattatggaattgcgcgatagattgccaaagaagcaacaggcaagcgcttccactgacggagtggataagttgtccgggaaggagcagtcttttactagtctggaggtcaggaaagttgctgaaactaaggagaaaagcaagcacctcaagactaagacctgtaagaaagtgcaggatgggctatctgacatcgccgaaaagtttctgaagaaggatcagtctgacgaaacctccgaggacgacaagaagcagtcaaagaaaggcaccgaggaaaagaagaaaccctccgactttaaaaagaaggtcatcaagatggaacagcagtacgagagctccagtgatggcaccgaaaagcttcccgagcgcgaggagatttgccatttccccaaaggtattaaacagatcaaaaacggaacaaccgacggggaaaagaaaagtaaaaaaatcagagataagaccagtaaaaagaaggatgaactcagcgattacgcagagaaatcgacgggtaagggcgattcctgtgattccagtgaagataaaaaatctaagaacggtgcttacggcagagaaaaaaaacgctgcaaattgttgggaaaatcttccagaaaaagacaggactgctcaagctcagacactgagaaatactctatgaaagaagacggttgcaacagcagtgataaaaggctgaagcgaattgagctgcgtgagcgccggaacttatcgtcaaaacggaacacaaaggaaatacaatcaggctcctcctccagtgacgcggaagagagcagtgaggacaataaaaagaagaaacagaggacctcaagcaaaaagaaggcggtaatcgtgaaggaaaaaaagaggaatagcttgcgtacatctaccaagaggaaacaggccgacatcactagcagctcaagcagtgatatcgaagacgatgatcagaacagcataggcgaaggcagctctgacgaacagaagatcaagccagtgaccgagaacctggttctatcatcccacaccgggttctgtcagtcgtcaggtgatgaagctctgtccaagtccgtgcccgtgactgttgacgacgatgatgatgacaatgatccagagaatcgcattgcaaagaaaatgttactcgaggaaataaaagcgaatttatccagtgacgaagatggctctagcgacgatgagcccgaagaagggaaaaagcgcaccgggaaacaaaatgaggaaaatccaggagacgaggaggcaaaaaaccaggtgaattccgaatccgattccgattcagaagagtccaagaaaccaagatatagacatagactgctgaggcacaagctgaccgtttcagatggagagagcggagaagaaaaaaaaacgaaaccaaaggaacacaaggaggtgaagggcagaaacaggcgcaaagtgtctagcgaggacagtgaagactctgacttccaggaaagtggtgtcagtgaggaggttagcgagtctgaggacgagcagaggccccgcactcgatctgcaaagaaagctgagctcgaagagaaccaacgctcctacaagcagaagaagaagcgccggagaattaaggtgcaggaggacagtagctcagaaaataagtcaaacagcgaggaagaggaagaggaaaaagaggaggaagaggaggaagaggaagaagaggaggaagaggaggaagacgaaaacgacgattctaagtcaccaggaaagggtaggaagaaaattcggaaaatactcaaggatgataaattgagaacggagacgcagaatgcactgaaggaagaagaagagcgccgaaaacggatcgccgaaagggagcgggagcgggaaaagctgagggaggtaattgaaatcgaggatgcctcccctacaaaatgtcctataactaccaagttggtgttggatgaggacgaggaaactaaggagccactggtgcaggtccataggaacatggtcatcaagctcaaaccccatcaagtggatggggtacagttcatgtgggactgctgctgcgagagcgtgaagaaaaccaaaaaaagtcctggtagtggatgtattctcgctcactgtatggggttaggcaagaccctccaggtggtcagtttcctgcacaccgtgcttctgtgcgacaagctggacttttcgaccgctctggtcgtgtgtccattaaacacagccctaaactggatgaacgagtttgagaagtggcaggaggggcttaaggatgatgagaaattggaagtgagtgagctggcaacagtgaagaggcctcaagagcggtcttacatgctgcaaagatggcaagaggacgggggggtgatgataatcggttacgaaatgtaccgtaatctggcccaagggagaaatgtaaaatctcggaagttgaaggaaattttcaacaaagctctcgtagatccagggcctgacttcgtggtgtgcgatgaaggtcacattctgaagaatgaggcctccgcagtttccaaggctatgaattccattagatctagaaggcggattatacttacaggtacccccctccagaataatctgatcgagtaccactgtatggtgaattttataaaggagaatctattgggatccatcaaggaatttcggaacagattcataaatcccatacagaatggtcagtgcgccgacagcaccatggtggacgtgcgtgtgatgaaaaagagagcgcacatcctgtacgagatgttagccggttgtgtgcagcgcaaggactacacggccctgacaaaattcctcccacctaaacatgaatacgtgcttgctgttagaatgacaagtattcagtgtaaactctatcaatactacctagatcacctgacaggggtcggcaacaattccgaggggggtagggggaaggctggagcaaagctatttcaggatttccaaatgctcagccgcatctggactcatccttggtgccttcagttggattatatttcaaaagagaacaaagggtacttcgacgaggactcgatggacgagtttattgcctccgatagcgatgagactagcatgtcgctgtcctccgacgactatactaagaaaaaaaagaagggcaaaaagggcaagaaagatagcagctcctcaggcagtggctcagacaacgatgtggaagtcattaaagtgtggaactcccggagtagggggggaggtgaaggcaatgtcgacgagactggcaacaacccgtcagtgtcacttaaactggaagaatcaaaagccacgtcatcaagtaacccttcctctcctgctcctgattggtacaaagacttcgtgactgacgctgacgccgaagtcctggagcactccgggaagatggtactgctttttgaaatcctccgcatggcagaagaaatcggagataaggtgctcgtgttctcacagagcctgatctcgctcgacctgatcgaagacttccttgaacttgcgagcagagaaaagaccgaagacaaggacaaaccactgatttacaaaggcgagggaaaatggcttagaaacatagattattaccgactcgacgggagcaccacagcgcagagcaggaaaaaatgggccgaagagttcaatgacgagaccaacgtgcgcggacgcctcttcataatctcaacaaaggccggctctcttgggattaacctcgtggctgcaaatcgggtgatcatctttgacgccagttggaacccatcctatgatatccagtccattttccgcgtgtataggttcgggcagaccaagcctgtctacgtatatcgtttcctagctcaaggaaccatggaagacaaaatatacgatcggcaggtgaccaaacagtcactgagttttcgcgtcgtggatcagcagcaggtggagcggcattttactatgaacgaactgaccgaactctatacgtttgaaccagaccttctcgatgaccccaatagtgagaaaaagaagaagagagacactcccatgcttccaaaggataccatcctcgccgagctgctacagatccataaggagcatattgtggggtatcatgagcacgacagtctgcttgaccataaagaagaagaggagctcacagaggaagaaagaaaagcagcgtgggcagagtacgaggcagaaaagaaaggactgactatgagattcaatatccccacagggactaatctacctccagtgagttttaattctcagaccccctacatcccttttaacctgggcgcacttagcgctatgagcaaccagcagttagaggatctgatcaatcagggacgcgagaaggtggtcgaggctacaaattctgtaacagcagtgcggattcagcccttagaagacatcatcagtgccgtctggaaggagaatatgaatctttcagaggcacaggttcaggctcttgcactcagtagacaagcctcccaggagctggatgtgaaacgcagagaggcgatatataacgacgtgctgaccaaacagcagatgctcattagctgcgtgcaaaggatccttatgaacaggcggctacaacagcaatataaccagcagcagcagcagcagatgacctaccagcaggctaccttaggccaccttatgatgcccaagccacctaatttgattatgaatccttccaattatcagcagatcgacatgcgcggaatgtaccagccagtagccggcggcatgcaacccccgcctttgcagcgtgcccctcctcctatgcgaagcaagaacccaggccccagtcagggcaaaagcatgtag

SEQ ID NO: 22789 - DNA, 369 bp, synthetic construct
  misc_feature 1..369: note = Description of Artificial Sequence: Synthetic coding sequence
  source 1..369: mol_type = other DNA
atcaactacaaccgggacaagatcagcggcagcggcagcaacagcgacatgatggaaaactcaaaggaggaagggaccagttccagcgagaaatccaagtccagtggatcctcaaggagtaagcgcaagccgtccatcgtgacaaagtacgtggaaagcgacgacgaaaagcccttagatgatgaaacagtgaacgaagacgcaagcaacgaaaacagcgagaacgatataacaatgcagtccttaccgaagggcacagtgattgtccaacctgagcccgtcctgaatgaggataaagatgattttaagggccctgagttccgctctcggagcaagatgaagaccgaaaacttaaagaagagggggtag

SEQ ID NO: 22790 - DNA, 4038 bp, synthetic construct
  misc_feature 1..4038: note = Description of Artificial Sequence: Synthetic coding sequence
  source 1..4038: mol_type = other DNA
atgagcgagagcaagctgaacaccctggtgcagaagctgcacgacttcttggctcattcctccgaggaatccgaagaaacaagctctccgccgagactcgcaatgaatcagaacacagataagattagcgggtccggttcaaatagcgacatgatggaaaactcaaaggaggaagggactagttcttccgaaaagagcaaatcatctggcagctcccggtctaagcgaaaaccctctattgttaccaagtacgtagagtcggatgacgagaaaccgctggacgacgaaacagtgaatgaagatgcgtccaatgaaaacagcgagaacgacatcactatgcagtcactgccaaaggacggtctgcacggaatagtttcatgcaccgcctgtggacagcaggtgaatcactttcagaaagactctatatatcggcacccatcactgcaggtgttgatatgcaaaaactgcttcaagtattatatgtccgacgatataagccgggactccgatgggatggatgagcagtgtagatggtgtgcagaaggtggcaatcttatttgctgtgatttttgtcataatgccttctgtaaaaagtgtattctccggaatcttgggcgaaaggagctctccacgatcatggacgaaaataatcagtggtattgctatatctgtcatccagagcccctgctggacctagtaacagcctgtaacagtgtgtttgaaaatcttgagcaactcctgcagcagaacaaaaaaaagataaaggtcgactctgaaaaatctaataaggtgtatgaacacaccagccggttctcaccaaagaaaacctcctctaactgcaatggtgaggagaagaaacttgatgacagttgctcagggagcgtaacatattcctatagcgccctcattgtgccgaaggagatgatcaaaaaagctaagaagctcattgaaacaacagctaacatgaactcatcgtacgtgaagttcctgaagcaggccacggacaactctgaaatcagtagtgctactaaactgaggcagctaaaagcctttaaaagcgtactagccgacatcaagaaggcgcaccttgctctggaggaagatttgaacagcgagtttcgagccatggatgctgtcaacaaggagaagaacacaaaagaacataaggttattgatgcaaagtttgaaacgaaggccaggaaaggtgagaagccctgcgccttggaaaagaaagatatcagcaaaagcgaggccaaactatcccgaaagcaagtcgactctgaacatatgcatcagaatgtgccaacagaagagcagaggacaaataagtcaaccggtggggagcataaaaagtctgatagaaaagaggagccccagtacgagcctgctaatacttcagaagacctcgatatggacattgtgtcagtccccagctctgtccccgaagacatctttgaaaatcttgagaccgcgatggaagtccaatcttctgtagaccaccaaggggacggttcttctggaacggagcaggaggtcgagagtagcagcgtcaagttaaatatcagcagtaaggataataggggcggtgctgactgccaagaagttccgcaggacaaggatggatataagtcctgcgggttgaatcctaaattggagaaatgcggcctgggccaggaaaattcagacaacgaacacctggtcgagaatgaagtcagcctcctccttgaagaatccgatctcaggcggtctcctcgggtcaagactactcctctgcgccggcccactgaaacaaacccagtcacgtcaaattctgatgaagagtgtaacgagacagttaaagagaagcaaaaattatcagtgcccgtgagaaaaaaggacaagagaaattcttccgactcggccatcgacaacccaaaacctaacaaactacccaaatctaaacaatcggaaaccgttgatcagaacagcgatagtgatgaaatgcttgccatcctgaaggaggtgtcaaggatgtcacatagcagctcatcagatacagatataaatgaaatccatacgaaccataagacattgtacgacctcaagactcaggcaggtaaggacgataaaggaaaaaggaaacgcaagagctctacttctggcagcgactttgatacgaagaaaggcaaaagcgccaagagtagcataatctctaaaaaaaaaagacagacacagtccgagtcctccaattacgacagcgagctggagaaggagatcaagtctatgtccaaaattggagctgcgcgcacaaccaagaagcggatccccaatactaaagactttgacagctcagaggatgaaaaacactctaagaagggcatggacaatcaaggccataagaatctgaagacctctcaggagggaagcagcgacgatgctgagagaaaacaagaacgtgagacgttcagttctgcagagggtactgtagacaaggacaccacaatcatggagctgcgagatcggttgcccaaaaaacaacaggcaagtgcgtccaccgatggtgttgataagctgtccgggaaggagcagtcatttacctccctggaggtcaggaaagttgcggaaaccaaggagaagagcaaacacttaaaaaccaagacgtgcaaaaaagttcaggatggcctcagcgacatagccgaaaaattcctcaagaaggaccaaagcgatgaaacctcagaggacgacaagaagcaatcaaaaaaaggcaccgaagaaaagaagaagcccagtgacttcaaaaagaaggtgatcaagatggaacagcagtacgaatcatctagtgacggaactgagaagctaccagagcgggaggaaatctgccatttccctaaggggattaagcagatcaagaacgggacaaccgatggcgagaagaagagtaagaaaatccgcgataagacaagcaaaaaaaaggatgagcttagtgactatgccgagaagagtacaggcaaaggcgacagttgcgactccagcgaggacaagaagtcaaaaaatggggcatacgggcgcgaaaaaaagcggtgcaaactccttggtaaaagttcgaggaagagacaggattgtagctccagcgatactgagaagtactcgatgaaggaggacggatgtaactcttccgataaaagacttaagaggattgagctcagggagcgcaggaacctgagcagcaaacgcaacaccaaggagatccaatctggttcgtcctcttctgatgctgaggagagtagcgaggacaataagaaaaaaaagcagagaacttcatctaagaagaaggccgtgatcgtcaaggagaaaaagagaaattctctgaggacaagcacaaaacggaagcaggccgacatcacaagttcttccagttccgacatagaggacgatgaccaaaacagcataggtgagggttcttcagacgaacagaagatcaaaccagtgactgaaaatctcgtcctttcttctcataccggcttttgtcagagctctggagacgaagccctgagcaaatcagttccggtaactgtcgatgatgatgatgacgataatgatcccgaaaatcggatcgcgaagaagatgttattggaggaaatcaaggccaacctctccagtgacgaagatggctcatcagatgatgagcctgaagaagggaagaagcgtactggcaagcagaatgaagaaaaccccggagacgaggaggcgaagaatcaggtcaactctgaatccgattcagactctgaagagtcaaaaaagccaagatataggcaccgccttctgagacacaagctaacagtctctgatggagagtcaggcgaggagaaaaagacgaaaccaaaggagcacaaggaagtcaaaggccgcaaccggaggaaggtctcctcagaggatagcgaagattcggacttccaggaatccggcgtttctgaggaggtttccgagtcagaggatgagcagcgcccacgtacccggtccgctaagaaagccgaactggaagagaatcagaggagctag

SEQ ID NO: 22791 - DNA, 483 bp, synthetic construct
  misc_feature 1..483: note = Description of Artificial Sequence: Synthetic coding sequence
  source 1..483: mol_type = other DNA
tgacccgacttcgtggtgtgcgacgagggccacatcctgaagaacgaagcttctgccgtgagtaaagctatgaacagcataagaagtagacgacggattatcctgacagggacccctctgcagaacaacctcatcgaatatcattgcatggtcaacttcatcaaagagaacctccttggaagcataaaggaatttcgcaatcgatttatcaatcctatccagaatggtcaatgcgcagattccacgatggttgacgttagggtcatgaagaagcgggcccacatcctttacgagatgctagccggctgcgtccagcgcaaggactatactgctttaacaaaatttctgccccctaaacatgaatatgtacttgcggtgcggatgacctctattcagtgcaagctctatcagtactatctggaccacttgacagtgcttcacctgaacaaaatggggatgctgaagagtatcaagtatttctag

SEQ ID NO: 22792 - DNA, 2514 bp, synthetic construct
  misc_feature 1..2514: note = Description of Artificial Sequence: Synthetic coding sequence
  source 1..2514: mol_type = other DNA
atgaaccacctggagggcagcgccgaggtggaggtgaccgacgaggcggccggaggggaagttaacgagtcagtagaggccgacctggagcatccagaggtcgaagaagagcagcagcagccaccacaacaacaacattacgtgggtaggcatcagcgaggcagagcactggaggatctgagagcccagttagggcaggaagaggaggagaggggtgagtgcctcgctcggagcgcaagtacagaatctggcttccacaatcatacagacacagccgagggagatgtgattgctgccgcccgggatgggtacgatgccgaacgcgctcaagacccagaagacgaatccgcctacgcagtgcaatatcgccctgaagctgaggaatataccgagcaggcagaagcggaacacgctgaagcaactcataggcgggccctgccaaaccacctgcatttccactctcttgaacacgaggaggccatgaatgccgcgtattctggatatgtctacacccaccgattgttccatcggggcgaggatgagccgtactcggagccctatgctgactatgggggattacaagagcacgtgtacgaggagataggagatgctccagaactggatgcaagggacggtttgcgtctctacgagcaggaaagggacgaggccgcagcatatagacaggaagcacttggcgcacgactgcaccactacgatgaaagatctgatggagaatcagactctcccgaaaaggaagctgaatttgcgccctaccctaggatggactcctacgaacaagaggaggacattgaccagatcgtggcagaggtgaagcagtcaatgagcagtcagagtctagataaggctgctgaagacatgcctgaagccgagcaggatctggaaaggccccctacccctgcaggagggagaccagatagccccggcctgcaggcgccggccgggcagcagagagccgttggtcctgccgggggaggtgaagctggccagaggtatagtaaagagaagcgagatgccatcagcctggccataaaggatatcaaagaggccattgaggaggtcaaaacaaggacaatacggagcccttacacccccgatgaacccaaggagcccatctgggtaatgcgacaggatatctcccctactagagactgtgatgatcagcggccaatggatggggactccccctcccccggcagtagttccccactgggagctgagagttcatcaacaagcctgcatcccagcgaccctgtcgaggcttcaacaaataaagagtctcgtaaaagccttgcctcctttcctacctatgtagaggtgcccggtccttgcgaccccgaggatctgatcgacggtatcattttcgccgccaactacttgggtagtactcagcttctaagcgataagactccttctaaaaacgtcaggatgatgcaggcacaggaggcagtgagcaggattaagatggcacagaaactggcgaaaagtcgtaaaaaagcccccgagggggaatcgcaacccatgaccgaagtagatctcttcattagcactcagaggatcaaggttcttaatgcggacacccaagaaactatgatggatcatcccctcagaacaattagctacatcgctgacatcgggaacatcgtcgtgctgatggcacgacgacgcatgcctagatctaattcgcaagagaacgtagaggctagccaccccagccaggacggcaagaggcaatataaaatgatttgtcatgtgtttgagtctgaagacgctcaactgatcgcccaaagtatcgggcaggcgttttcggtcgcctaccaggaattcttgagagctaatggcatcaatcccgaggacctgagtcaaaaagagtactctgacctgcttaatactcaggacatgtataacgatgatctcattcatttctccaaatccgaaaattgtaaagacgtgttcatcgaaaagcaaaaaggcgaaatactgggggttgtgatagtggagtccggttggggctctatccttcctactgttatcattgcaaatatgatgcacggaggacccgcagagaaatcagggaagctaaatatcggcgatcaaatcatgtccatcaacggcacctctttggtaggactccctctttctacctgccagagtattataaagggtctcaaaaatcaatctcgggttaagctcaacattgtgaggtgcccacctgtgaccaccgttttgatcaggcggcctgaccttaggtaccagcttggctttagtgtccaaaacggcataatttgcagcctcatgagaggaggaatcgccgaacgaggaggtgtccgggtgggccatcgaatcatcgagatcaacggccagtccgtggtagcaactccacacgagaaaatcgtgcatattctgagcaatgctgtgggggagattcacatgaaaactatgcccgcggccatgtaccgcctgctcacggcccaagagcagccggtctacatttag

SEQ ID NO: 22793 - DNA, 2469 bp, synthetic construct
  misc_feature 1..2469: note = Description of Artificial Sequence: Synthetic coding sequence
  source 1..2469: mol_type = other DNA
atggccgccgccgtggtggtggccgagggcgacagcgacagccggccgggccaggagctgttggtggcttggaacaccgtctccaccggcctcgtgccccctgctgctcttgggttggtgtcttcaaggacctctggtgccgttccgcccaaagaagaggagctccgcgccgccgtggaggttctgcggggtcatggtctgcactctgtgttagaagagtggtttgtggaggtcttacagaacgacctgcaagcgaacatatcacccgagttttggaacgcaatttcacagtgcgagaatagtgcggacgaaccccaatgtctcctgttgctgctggacgcattcggactgcttgaatcgcggctggacccctaccttcgttctctcgaactgctggagaaatggactcgcctgggactgctgatgggtaccggcgctcagggcttacgcgaagaggtccatacgatgctgagaggggttctgttcttctctacgccacgcacatttcaagagatgattcagcgcctctacggatgtttcctgcgagtgtatatgcagagtaagaggaaaggagagggcggaacagacccagaactggaaggtgaactggatagtcgctacgctcggcggagatactacagactgctgcaatcaccactttgtgctggttgctcgagcgacaagcagcaatgctggtgccgccaagccctcgagcagttccatcagttatcccaagtgttacaccggttgtctttacttgagagagtatctgcagaagccgtgacaactaccctgcatcaggtgacacgggagagaatggaggaccggtgccgaggcgaatacgaacgtagttttcttcgggagttccataaatggatagagcgggttgttggctggctaggcaaggtcttcttacaggatggcccagcaaggccggcctcccctgaggcgggcaatacactgcgaagatggcgatgccatgtgcagagattcttttatcgtatatacgcctccttgagaatagaagaactgttcagtattgtgagagatttcccagattcaaggccagcaatcgaggacctcaagtactgcctggaacggactgatcaacgacagcagctcctggtctccctaaaggccgctctcgagaccaggctgctccatccaggcgttaacacttgtgacattattaccttatacatttcagccattaaggccctgagggtgttggacccgagtatggtgatactggaagtcgcttgcgagccgatccgtcgctacctgcgaaccagggaggataccgtcaggcagattgtagccggattgactggggatagcgacggcacaggagacctagcagtggagctttctaagactgatcccgcctctcttgagacaggtcaggatagtgaagatgactctggtgaaccggaggactgggtgcctgaccctgtagacgctgatccagggaagagctcaagtaaaagacgctcaagcgacatcatctctctgctggtgtctatatatggatcaaaggacctgtttattaatgaatacagaagtctgttggctgacagactgctacaccagttcagtttctctcctgagcgagagatccgcaacgtggaacttcttaagctgagatttggggaggctcccatgcacttttgcgaagtcatgctcaaggacatggcagacagtcgacggatcaacgcgaacataagggaagaagacgaaaagcggccagcagaggagcagccaccttttggtgtttacgccgttattctgtcaagcgagttctggcctccttttaaagatgagaaactggaggtcccggaggatataagggctgctctagaggcatactgtaagaaatatgaacagttaaaagcaatgagaacactatcctggaagcacaccttgggcctcgtgacgatggacgtcgagctcgccgaccgtaccctctctgtggccgttacccccgtgcaggccgtgatattgctgtatttccaggaccaggcaagctggactttagaggaactgtccaaggccgtgaagatgcctgttgctctgctgcgtcgccgcatgagtgtgtggctccagcagggtgtgttgcgggaagaaccgcctggtacgtttagcgttatcgaagaagaacgtccacaggatagggataacatggtgcttatcgacagtgacgatgaatctgatagtgggatggccagccaagctgatcagaaagaggaagagctcctgcttttctggacatatattcaagctatgctaacgaacttggaatcactctctctggaccgcatttacaacatgctaaggatgttcgtggtgaccgggccagctttagccgagatcgacctccaggagctccaggggtacctccaaaagaaggtgagggaccaacagcttgtatattcagccggcgtatatcgtttgcctaagaactgctcttag

SEQ ID NO: 22794 - DNA, 4863 bp, synthetic construct
  misc_feature 1..4863: note = Description of Artificial Sequence: Synthetic coding sequence
  source 1..4863: mol_type = other DNA
atgggcgccatcggcctgctgtggctgctgcccctgctgctgagcacagcagctgtaggctctggaatggggactggacagagagctggatctcccgcagccgggccacccctgcaacctcgcgaacctctctcttatagtaggctgcaaagaaagagcttggctgtcgacttcgtagtaccttcactatttcgcgtgtacgcacgggacctcctcctccctccaagctcttctgagctcaaagccggacgccccgaggccagaggttcactggctttggattgcgcgcctctcctacgcctgcttggcccagctcccggcgtgtcctggactgcagggtctccagcccccgccgaggccaggaccctatcacgggttctgaagggcgggtccgtccgcaagctccgccgggccaagcaactggttcttgagctgggcgaagaagctattttagagggttgtgtgggcccaccaggcgaggcagctgtgggacttttacaattcaatttaagcgagctgttctcttggtggatccggcaaggagaaggcaggttgaggattcggctgatgcctgagaagaaggcctcagaggtggggcgagagggcaggctgtcggcagcgataagggcctcccaaccccggttgctgttccagatatttggtacagggcactcgagtctggaaagtccgactaacatgccctctccctcccccgattacttcacctggaacctcacttggatcatgaaagactccttccctttcttgagccatcgaagtcggtacggactggagtgttcattcgacttcccttgtgagctggagtactccccccctctccacgatctgagaaatcagagctggagttggcggcgtattccaagcgaagaagccagtcaaatggatctattagacggccctggggcggaaagatcaaaagagatgccgcgcggttctttcctactgctcaatactagcgcggacagcaagcacactatcctgtccccatggatgaggtcctcttcagaacactgcacactggccgtgagtgtccatcgtcacttgcagccatcgggaagatatattgcccagctgctcccccacaatgaagcagcccgtgagattctgttaatgccaactcccgggaaacatggttggacagtgctgcagggacggataggcagacccgataaccccttcagagtggcgctggagtatatttcctctggcaacaggtccttgagcgctgtggacttcttcgcgctgaaaaactgtagcgaaggtacctccccaggaagtaaaatggctctgcagtcgtcttttacctgttggaacggcaccgtgctccagttaggccaagcatgcgactttcatcaggactgtgcccagggcgaggatgaaagccagatgtgtaggaagttaccagtcggattttactgcaacttcgaagacggcttttgtggctggacacagggcaccctgagtccgcacacaccccagtggcaagtgcgaacactaaaggatgcacgatttcaggaccaccaagatcacgcattgttgttgtcaacaacagatgtacctgctagcgaatccgccactgtcacgagtgccacatttccagccccaattaaaagcagcccctgcgaactgagaatgagttggctgatcaggggagtcctcaggggcaatgtgtcattggttctcgtcgaaaataaaactggcaaggaacaaggacgaatggtttggcacgttgcagcgtacgaagggctgtctctctggcagtggatggtgctgccactgctcgatgtctctgaccgtttttggctccagatggtggcttggtggggccagggcagcagagccattgtcgcctttgacaatatttccattagcctcgactgttaccttactatcagtggagaagataagatactgcagaacaccgcacctaagtcccgcaatctatttgagagaaatcccaacaaggaacttaagccaggtgaaaatagtccgcgacagacaccgatcttcgacccaactgtccactggctatttaccacgtgtggcgcctccggcccccatggaccgacccaggctcaatgcaacaacgcataccagaattccaatttgtctgtggaggtgggttccgagggcccattaaagggaattcagatttggaaggtgcctgcgaccgatacatattctattagcggttacggagccgcgggcggcaaagggggaaaaaacaccatgatgcgcagccacggagtctctgtcctggggatatttaacttagaaaaagatgacatgctttatatactcgtgggacagcagggtgaggatgcatgccccagtactaatcagcttatacagaaggtgtgcatcggtgaaaacaacgtcatcgaggaggaaattcgcgtcaataggtcggtccatgaatgggcggggggcggtggaggcggaggcggggccacatacgtgtttaagatgaaagatggggtgcctgtcccgcttattatagcagccgggggaggtgggcgggcgtatggcgccaaaacggacaccttccatcccgaacgactggagaacaatagttccgtgcttggacttaacggtaactcaggcgctgcaggtgggggcggagggtggaatgacaatacaagtctgctctgggctgggaagtccctgcaagagggggcaacgggaggtcactcgtgtcctcaggccatgaagaagtggggatgggaaactcgtggcggcttcggtggcggcggcggcggctgcagttcaggtggcggtggtggtggttatatcgggggaaacgccgcttcaaacaatgaccccgaaatggacggagaggatggggtctcctttatctcacctctgggtatcctgtacaccccagcattgaaggtgatggagggccacggtgaggttaacatcaagcactatctgaactgtagccactgtgaggtcgatgagtgccacatggatcccgagagccacaaggtgatttgcttctgtgatcatggtaccgtgttggccgaggatggagtgtcttgtatagtaagccccacgcccgaaccgcatctgccactgagtctgattctctccgtggtaacctcggctctggtcgccgccctcgtgttggctttctccgggataatgattgtgtatcggcgtaaacaccaagaattgcaagcaatgcaaatggagttgcagtcgcccgagtacaaattaagtaaactgcgtacttcgaccattatgacagattacaatcccaactactgcttcgcagggaagaccagcagtatttctgaccttaaggaggtccctcgtaagaacattacactcatcaggggcctgggtcacggtgcctttggtgaggtgtacgaaggacaggtgagtggaatgcctaatgacccgtcacccctgcaggttgctgtcaaaacccttcccgaggtctgttctgagcaggatgagctggattttctcatggaagcattgataatcagcaagtttaaccatcagaacatcgtaagatgcattggagttagtcttcagagcctccctcgcttcatcctcctggaactaatggcagggggggaccttaagtctttcttaagggagacccggcctagaccgagccagccatcctcgctcgccatgctagatctgttacacgtagcaagagatattgcctgtgggtgtcagtacttggaggagaaccacttcatccatcgcgacatcgccgccagaaactgcctgttaacgtgtccgggacctggacgggttgccaaaattggcgacttcgggatggcgcgcgacatctatcgcgcctcttactatcgtaagggcggttgcgctatgctaccagttaaatggatgccacctgaggcattcatggagggcatcttcacaagtaaaacagacacctggtcctttggtgttctgctatgggagattttttccctgggctatatgccatacccctcaaagagcaatcaggaagttctggaatttgtgaccagcggtgggagaatggatccacccaagaattgcccaggacccgtgtatcggatcatgacccaatgctggcagcatcagccagaggaccgcccgaacttcgctatcattcttgaacgcatcgaatattgtacacaggaccctgacgtgataaatacagctctgcctattgagtatgggcctttagtggaagaagaagagaaggtcccggtacgccctaaggaccccgaaggggtgcccccactgctggtgtcacagcaggccaaacgggaggaggagagaagtcccgccgctccaccccctcttcctaccacatccagcggcaaagctgccaagaagccaacggcagccgaaatcagcgtgcgggtccctcgcggtccagccgtcgagggaggtcacgttaacatggccttcagccaatccaatcccccatctgaactgcataaggtccatggatcccgaaataaacctacgtctctgtggaacccaacctatggatcctggtttacagaaaagccaaccaagaaaaacaatcccatagcaaaaaaagagccgcacgaccgggggaatttaggactggaaggctcctgcactgtgccacctaacgtcgccactgggaggcttccaggtgcaagcctcttgttagagccttctagtttgacagccaacatgaaagaggttcctctcttccggctgcggcatttcccgtgtggaaacgtgaactatggttatcagcaacagggtctgcccctggaggccgctacagcgccaggggctggacactacgaggacacaattctcaaatctaagaactctatgaaccaaccaggcccttag

SEQ ID NO: 22795 - DNA, 1353 bp, synthetic construct
  misc_feature 1..1353: note = Description of Artificial Sequence: Synthetic coding sequence
  source 1..1353: mol_type = other DNA
atgggcgccatcggcctgctgtggctgctgcccctgctgctgagcacagccgctgttggcagcggcatgggaacagggcagcgggctggcagtcctgctgccggccctccgttgcagccgcgcgagccacttagttattctaggctacaaaggaagtcactggcagtcgacttcgtggttccttccttattccgagtctacgcacgcgatcttcttctgccaccatcctctagtgagctgaaggcggggagacccgaagcgagaggcagcctggctctcgactgtgctccgctcctgaggttgctgggccccgctccaggggtatcatggaccgccgggagccctgcacctgcggaagcacgaaccctctcacgggtcctcaaaggtggtagcgttcgaaagctgaggcgcgccaaacagctcgtcctagaactcggagaggaagccatactggagggctgtgtcggaccgcccggggaggccgctgtggggctgcttcagttcaatctttcggagctgttttcttggtggattaggcaaggggaggggaggcttcgaatccgactgatgcctgaaaaaaaagcttctgaggtaggcagggaaggcaggttgagcgctgccatcagggcatcccaaccgcggctgttatttcagatttttggaacgggccactccagcctggagagccccacgaatatgccgtccccttcgcctgattattttacttggaatctgacgtggattatgaaggacagcttcccgttcctgtctcacagaagtcgctatggcaaggagcggtctccagccgcccctccaccgctgccaactaccagcagcgggaaagctgcaaagaagcccacggccgctgagatatctgtgagagttccccgcggaccggccgtggagggagggcacgtgaacatggcttttagccagagcaatccaccatctgagctccataaggtccatggaagccgcaataagcccacgtccctctggaacccaacatacgggtcatggtttactgagaagcccaccaagaagaacaatcctatcgccaaaaaggagcctcacgaccgtggcaacctgggcctggaaggtagctgcactgtaccgccaaacgtcgccactggacggcttcccggggccagcttactgttggagccatctagtctcacggctaatatgaaagaagttcctcttttccgcctgaggcactttccctgtggaaatgtgaactacggctaccagcagcaagggctgccattggaagcagcgactgcacctggggcgggacactacgaggatacgatcctgaagtcaaagaactcgatgaatcaacccgggccgtag

SEQ ID NO: 22796 - DNA, 1935 bp, synthetic construct
  misc_feature 1..1935: note = Description of Artificial Sequence: Synthetic coding sequence
  source 1..1935: mol_type = other DNA
atggaggtgcagctgggcctgggccgggtgtacccccggcccccctccaaaacatacagaggtgccttccagaacctcttccaaagcgtacgcgaggtcatccaaaaccctggtcccagacatcctgaagcagcctccgccgcaccgccaggggcatctctgcttttgcttcagcagcagcagcagcagcagcagcagcaacagcagcagcagcagcaacaacaacagcagcaacagcaggaaacttctccaaggcagcagcagcagcagcagggcgaagacggctccccccaggcacatcggagagggcccactgggtacctggtgctggacgaggagcagcagccgtctcagcctcagtctgctctggagtgccatcctgagagaggttgtgtcccagaacctggggcggccgtggcagcgagcaagggtctgccacagcagcttcctgctcctccagacgaggatgattcagccgccccttccacattgtccttgctggggcccacttttccagggctgtccagctgctctgccgatctcaaagacatcctatcggaggcttccaccatgcagctcctgcaacagcaacagcaggaggccgtgtccgaaggctcatcaagtgggagagcacgtgaagcctctggagcccccacgtcttctaaggataattatctgggaggcactagcacaatttctgacaacgcaaaagagctctgcaaggccgtaagcgtgtccatgggattgggcgtcgaagcattggaacatctatcgccgggggaacagttaaggggggactgtatgtatgcgccgctgcttggggttcccccggccgtgcgccctacaccttgcgctccactggccgaatgcaagggctcactactcgatgactccgccggcaagtcaactgaggacactgccgaatacagtccctttaagggaggatacacaaaaggcctggaaggcgaatctttgggttgcagtggatcagccgctgccggctcttctggaactctggagctgccgagcacgcttagcctttacaaatcaggagccctcgacgaggcggctgcatatcaaagccgcgactattacaattttcctctggccttggcaggccctccacctcccccccctccaccccatccccacgcccgcataaagctggagaaccctctggattatggttcagcctgggctgccgccgccgcacagtgcagatacggcgacctggcctcacttcacggggccggcgcagccggcccaggtagcggttctccgtccgctgccgcctcctcttcttggcataccctctttaccgccgaggaggggcagctatacgggccatgtgggggagggggcggcggcggaggcggtggcggggggggagggggtggaggaggaggtggcggagggggcgaagcaggagccgtagctccttatggatacacccggccgcctcagggcttggctggacaggaatccgacttcaccgctccagacgtgtggtacccaggtggcatggtctcacgcgtaccatatccgtcccccacttgtgtgaaatccgagatgggcccctggatggattcctatagtgggccttatggagatatgcggctcgagacagcccgcgatcatgtgctccctattgattactacttccctcctcagaagacgtgcctgatatgtggtgatgaagcctctgggtgtcattacggggccctgacatgtggttcttgcaaagtgttttttaagagagcagccgagggaaaacagaaatatctgtgtgcctcccgcaacgactgcactatagataagtttcgacgaaagaactgcccatcatgtcgtcttcgcaaatgctatgaagctggaatgaccctcggtgagaaatttcgagtcgggaactgtaaacacctcaagatgacccgtccctag

SEQ ID NO: 22797 - DNA, 1803 bp, synthetic construct
  misc_feature 1..1803: note = Description of Artificial Sequence: Synthetic coding sequence
  source 1..1803: mol_type = other DNA
atggaggtgcagctgggcctgggccgggtgtacccccggccccccagtaaaacctatagaggcgcattccaaaacctgttccagagcgtgcgcgaggttatccagaatccaggccctcgtcaccccgaagctgcttcagctgcccccccaggggcctcattactgctgctgcagcagcagcagcaacagcaacagcagcagcagcagcaacagcagcagcaacagcagcagcagcagcaagagacatccccacggcaacaacagcagcaacagggggaggatggcagtcctcaggcgcacagacgaggtcctactggctacttagtgttggatgaagagcaacaaccttctcaaccacagagtgccctggaatgccatcctgagagagggtgtgtgccagagcctggggctgccgtggcggcatccaaaggtctgcctcaacagctcccagcaccccccgatgaagatgatagtgccgctcctagcactttgagtctgcttgggccaactttcccggggctctcttcatgtagcgctgacttgaaggacatattatctgaggcatccacgatgcagctcctacagcagcagcaacaggaggccgtgtctgagggatcttcatctgggcgggccagggaagcctcaggtgcacctacgtcaagcaaggacaattatcttggaggcactagtacaatctcagataatgcaaaagagctctgcaaagctgttagtgtgtcgatgggcctcggcgtcgaggctctggagcacttgagcccaggtgagcagttaaggggcgactgcatgtacgctcctctgctcggcgtgcctcctgcagttcggccgacaccctgcgcccctttagctgaatgcaaagggtcgctcttggatgacagtgccggaaaatctaccgaagacactgcagaatatagtccgttcaagggcggttatacaaaaggcctggaaggcgaatccttgggttgctccggttccgctgcggccgggtctagtggcacactggaattgccgtcaactctgtcattgtataagagtggcgccctggatgaggcggctgcttaccaaagtagggactattataatttccctctggccttggccgggcctcctccacccccacctccccctcacccccatgccaggatcaagctagaaaatccactggactatggtagcgcctgggccgctgccgccgctcaatgtcgctatggcgatttggcctctctgcacggggccggcgctgccggacccggcagcggctctccatcagcagctgctagtagctcttggcacactctttttacggcagaggaagggcagctgtacggaccctgtggaggaggcggcggcggaggaggtgggggaggtgggggcggtgggggcggcggaggtggcggcggaggagaggccggtgccgttgcaccatacggttacacccgccccccgcaaggtctggccggacaggagagtgatttcacagctccagatgtatggtaccccggtggtatggtctccagagtgccttacccttcacccacctgcgttaagtccgaaatgggcccttggatggatagctacagcggaccatatggagacatgcgtctggagactgcccgcgaccacgtgttgccaatcgattactatttccccccccagaaaacctgtcttatctgcggggacgaggcgtcgggatgccactacggcgcattgacttgtgggagctgtaaggtgttcttcaaacgtgctgctgaaggattcttccggatgaataagttgaaggaatcgtag

SEQ ID NO: 22798 - DNA, 444 bp, synthetic construct
  misc_feature 1..444: note = Description of Artificial Sequence: Synthetic coding sequence
  source 1..444: mol_type = other DNA
atggtgatgggcctgggcgtgctgctgctggtgttcgtgctgggcctcgggctcaccccacctacactcgctcaggacaactcccgatatactcactttctgacgcagcactacgatgcaaaacctcagggcagggacgaccggtactgtgaatctattatgcgccggagagggttgacctccccctgcaaagatatcaacacgttcatccacggtaacaagcgatcaattaaagcgatatgcgagaacaagaatgggaacccccacagggagaatttgcggatttctaagtcatcgttccaagtcaccacctgcaaactgcacggtggcagtccctggcctccctgccagtacagggccaccgcagggtttaggaacgttgtagtggcttgcgagaatggcctgccggtgcatctggatcagagtatctttcgccggccctag

SEQ ID NO: 22799 - DNA, 444 bp, synthetic construct
  misc_feature 1..444: note = Description of Artificial Sequence: Synthetic coding sequence
  source 1..444: mol_type = other DNA
atggtgatgggcctgggcgtgctgctgctggtgttcgtgctgggcctcggactaacacctccaactcttgcccaggataacagccggtatacacacttcctcactcagcattatgatgctaaaccgcagggcagggacgatagatattgtgagagcatcatgagaagacgaggtctgaccagtccatgcaaggatattaacaccttcattcacggaaacaagcggtctatcaaggcaatttgtgaaaacaagaatgggaatccgcaccgcgagaacctgagaatctccaagagcagtttccaggtgactacatgcaagctccacggtggctcaccctggcccccctgccagtaccgggccaccgccggatttcggaatgtagtggtggcttgtgaaaatgggctgcccgtgcacttagatcagagtatattccggcgaccttag

SEQ ID NO: 22800 - DNA, 1494 bp, synthetic construct
  misc_feature 1..1494: note = Description of Artificial Sequence: Synthetic coding sequence
  source 1..1494: mol_type = other DNA
atgaccgtgttcctgagcttcgccttcctggccgccatcctgacccatatcggttgttccaaccagaggcgcagccctgagaattcggggaggcggtacaatagaatccagcacggccagtgtgcttatacctttattttgcccgagcacgacggtaattgcagggaaagcactacagaccagtataacaccaatgcactccagcgggacgctccccacgtcgaacccgactttagttcccagaagctgcaacacctggaacacgttatggaaaattacactcagtggctgcagaagctggaaaattacatagtcgagaacatgaagtctgagatggctcagatccagcagaacgcagtgcagaaccacaccgctacgatgctcgagatagggacaagtttgttgtctcagactgcagagcaaacaaggaaactaaccgatgtggagacccaggtgctaaatcagaccagcaggcttgagatccagcttttagagaacagtctgtcaacttacaagttggagaaacagctcctgcagcagaccaacgagatcctgaagatccacgagaaaaactctctgctagagcacaagattcttgagatggagggcaagcacaaagaggaattagacaccctgaaagaagagaaagagaatcttcagggcctggtaactagacagacttatatcatccaagagcttgaaaagcagctgaatcgagctacaacaaacaattcagttctgcaaaaacaacagctcgaactcatggatacagtccacaatttagtgaatctttgcacaaaggaggtgctcttaaagggcgggaagcgcgaggaagagaagcctttcagagattgtgctgatgtgtatcaggccggatttaataagtcaggtatctacaccatatacattaacaatatgccggagccaaaaaaggtgttctgcaacatggacgtcaacggaggcgggtggacggttatccagcaccgtgaagatgggagcctggacttccagagaggatggaaggagtataagatgggtttcggtaatccatcaggagaatactggttggggaatgaattcatcttcgctatcacgagtcagaggcagtacatgctccgcatcgagctgatggactgggaaggaaatagggcctattcccagtacgatcgttttcatatcgggaatgagaaacagaactataggctgtacttaaaaggccacaccggcacggctggcaagcagtccagtcttatcctacacggggcggatttctcaactaaggatgccgacaacgacaattgcatgtgcaagtgtgctctgatgctcactggagggtggtggttcgatgcttgcggaccatccaatctgaacggcatgttctataccgctggccaaaaccatggcaaactgaacgggattaagtggcattacttcaagggtccctcctacagcctgcgttcgaccaccatgatgattcgtcccctcgacttttag

SEQ ID NO: 22801 - DNA, 459 bp, synthetic construct
  misc_feature 1..459: note = Description of Artificial Sequence: Synthetic coding sequence
  source 1..459: mol_type = other DNA
accgtgagcaacctgctggagcacaagatcctggagatggagggcaagcacaaagaggagctggatacacttaaagaagagaaggagaatctacaggggctggtgacacgacagacttatattatccaggagctggagaagcagctgaatcgagcaaccactaataactcagtactacagaagcaacagttggagcttatggacaccgtccacaatctcgtgaacctgtgtactaaagagggagtactactgaagggtgggaaaagagaagaagaaaaaccttttagggactgtgcagacgtttaccaagcgggcttcaataaatctggcatttacaccatttacattaataatatgcctgaacccaagaaggtgttctgcaacatggacgtaaatgggggagggtggacagttattcagcaccgggaagatggtagcctggactttcagcgcggctag

SEQ ID NO: 22802 - DNA, 1497 bp, synthetic construct
  misc_feature 1..1497: note = Description of Artificial Sequence: Synthetic coding sequence
  source 1..1497: mol_type = other DNA
atgaccgtgttcctgagcttcgccttcctggccgccatcctgacccacataggttgcagtaatcaacgacgatcacccgagaactctggccgcagatataataggatccagcatgggcagtgtgcctatacattcatcctgcctgagcatgacggaaactgcagggaaagtaccactgaccagtataacacaaacgccctccagcgagacgcgcctcacgtagagcccgacttttcctctcagaaattgcagcaccttgagcacgttatggaaaactatacgcagtggttgcaaaagctcgaaaactatatcgtagagaatatgaagtccgagatggcccagattcagcagaatgcagtccagaatcatactgctactatgttagaaatcggtacttccctactgagccaaaccgccgagcagacacgcaagctgacagacgtcgaaacacaggtcctgaatcagacgtccagacttgagatccagctactggaaaactcgctatctacgtacaagctcgaaaaacagctactgcagcagaccaacgagattctgaagattcacgaaaagaacagcctgttagaacacaagatcctcgaaatggaaggtaaacataaagaggaactggacactctgaaggaggagaaagagaacctccaggggctggtgactcggcagacatatatcattcaagaactggagaaacagctgaatagagccactactaataattctgtgctgcaaaagcagcagttggaactgatggacacggtgcataacctggtcaatctgtgcactaaggagggcgttctgctgaaaggaggaaagagggaggaggaaaaaccatttcgcgactgcgccgacgtttatcaggctgggtttaacaagtctggaatttacacgatctacatcaacaatatgcccgaaccaaagaaggtcttctgcaacatggacgtgaacggggggggctggacagtgatccagcatcgggaagacggcagtctggactttcagagggggtggaaggagtacaagatgggcttcgggaatccttctggagagtactggctgggcaatgagtttatcttcgccattaccagccagcgtcagtatatgctgagaattgagttgatggattgggaaggcaatcgtgcttactctcaatatgataggtttcacatcggcaatgaaaagcagaattatcggctgtatctgaagggacatacggggaccgccggcaaacagagcagtctgatccttcacggcgcagatttctctacaaaagatgccgataacgataactgcatgtgtaaatgtgcccttatgctcaccggtggctggtggtttgacgcttgcggccctagcaacctgaacgggatgttctataccgctggccagaaccatggcaagctaaatggcattaaatggcattacttcaaagggccctcgtacagtctccggtccaccactatgatgataaggccactggacttttag

SEQ ID NO: 22803 - DNA, 894 bp, synthetic construct
  misc_feature 1..894: note = Description of Artificial Sequence: Synthetic coding sequence
  source 1..894: mol_type = other DNA
atggagggcaagcacaaggaggagctggacaccctgaaggaggagaaagaaaacctccaagggctagtcacgcggcagacctacatcattcaggaactggagaagcaactgaatcgggccaccactaacaactctgtgctgcagaaacagcaacttgaactcatggatacagtgcacaacttagtgaacctttgtaccaaggaagtacttcttaaaggtggcaagcgggaggaggagaaaccttttcgtgactgcgcggatgtttatcaagctgggtttaataagtctgggatctataccatttatatcaacaacatgcccgagcctaaaaaggtattctgtaatatggatgtgaatggcggcggatggacagtgattcagcaccgagaggatggtagtctggattttcaacgaggctggaaagagtataagatgggctttgggaacccttccggagaatactggttaggaaatgagtttatcttcgccatcactagccagagacagtacatgctgaggatcgaactcatggactgggaggggaaccgggcatactcccagtacgatcgattccacatcggcaatgaaaaacagaactaccgactatatctcaaaggacacaccggtaccgccggtaagcagtccagtctgatactgcacggcgctgattttagcactaaggatgccgacaatgacaactgcatgtgtaaatgtgccttgatgttgacagggggctggtggttcgacgcctgtggcccctccaacctaaatgggatgttttacaccgcaggccagaaccacgggaaattaaatggaatcaaatggcactatttcaagggtccctcttatagtctcagatccactacaatgatgattaggccattagacttttag

SEQ ID NO: 22804 - DNA, 897 bp, synthetic construct
  misc_feature 1..897: note = Description of Artificial Sequence: Synthetic coding sequence
  source 1..897: mol_type = other DNA
atggagggcaagcacaaggaggagctggacaccctgaaggaggagaaggaaaatctgcagggattggttaccaggcagacttatattatccaagaactcgagaaacaactcaatagagccacaaccaataacagtgtgcttcagaaacagcaactggaactcatggataccgtccacaaccttgttaatctgtgcactaaggagggagtgctgctgaagggcgggaagagggaggaggagaaacccttccgcgattgcgccgatgtgtaccaagccggatttaacaagagcggtatctacaccatttacattaacaacatgccagagcctaagaaagtgttttgcaacatggacgtgaatgggggaggatggacggtgattcagcatagagaggatggaagtctggattttcagcgtggatggaaggaatacaaaatggggtttggaaacccaagcggtgaatattggctgggaaacgagtttattttcgcaatcaccagtcaacgccagtatatgctcaggattgaactgatggactgggaagggaaccgcgcttacagccaatacgataggttccacatcggcaacgaaaaacagaactatcgattgtatctgaaaggccatactggaaccgccggcaagcaatcttctcttatcctccatggcgctgatttctccacaaaggatgcagacaatgataattgtatgtgtaaatgtgccctaatgcttacaggggggtggtggtttgacgcttgcggccccagtaaccttaatggcatgttttacactgcaggtcaaaatcacggtaaactaaatggaatcaagtggcattacttcaaaggcccgagctattcccttaggagcacaacaatgatgattcggcctcttgatttttag

SEQ ID NO: 22805 - DNA, 1491 bp, synthetic construct
  misc_feature 1..1491: note = Description of Artificial Sequence: Synthetic coding sequence
  source 1..1491: mol_type = other DNA
atgtggcagatcgtgttcttcaccctgagctgcgacctggtgctggctgctgcatacaataacttcagaaaaagtatggatagtattggaaaaaagcagtatcaggtccagcacggatcctgcagctacaccttccttttgcccgagatggacaattgccggtcctctagtagcccatatgtgtcgaatgccgtgcagagggatgccccgcttgagtacgacgattctgttcaacgcctccaggtgctggagaatatcatggaaaacaacacacagtggcttatgaagttagagaactacatccaggataatatgaaaaaggaaatggtggaaatccagcagaacgcagtccagaaccagaccgcggtgatgattgagatcggtaccaacctcctgaaccagactgcggagcagactcgcaagctgaccgacgtggaagctcaagtccttaaccaaactacaaggttggagcttcagttactcgagcacagcctctctactaataagttggaaaagcagattttggaccagacttccgagataaataagctgcaagacaaaaattcattcctggagaagaaggtgttagccatggaagataaacatattatacaactgcagtccatcaaggaagagaaggatcagctccaggtgctggtcagcaagcagaacagcataatagaggaattggagaaaaagattgtgacagccaccgttaataactctgtgttgcaaaaacagcagcatgacctaatggaaacggtgaataatctgttgaccatgatgagtacatcaaatagcgccaaggatcctacagtggccaaggaggaacaaatctcattccgagactgtgccgaggtgtttaagtctggacacaccactaatggtatctataccttgacgttccccaacagcaccgaagagatcaaagcctattgcgatatggaggcaggcggtggcggctggacaatcattcagcggcgagaggatggaagcgtcgactttcagagaacttggaaggaatataaggtagggttcggcaatccttccggagaatattggctggggaatgagtttgtatcgcaactgacaaaccaacagaggtacgttctcaagatacacctcaaagactgggagggcaacgaagcctattctctctacgaacatttttacttgagctctgaggagctgaattaccgcatacatttgaaggggctgacagggaccgccggaaagatatcctccatctcccagcccggcaatgatttcagcacgaaagacggcgacaacgataagtgtatctgcaaatgctcccagatgctcaccggcggctggtggtttgacgcctgcggcccatccaacctcaatggcatgtattatcctcagcgccaaaatacgaataaatttaacggaatcaagtggtactattggaaaggcagcgggtatagcctgaaagctaccacgatgatgatccggcccgccgacttctag

SEQ ID NO: 22806 - DNA, 1488 bp, synthetic construct
  misc_feature 1..1488: note = Description of Artificial Sequence: Synthetic coding sequence
  source 1..1488: mol_type = other DNA
atgtggcagatcgtgttcttcaccctgagctgcgacctggtgctggctgccgcttacaacaacttccgaaaaagcatggattccatcggcaaaaagcagtatcaggtgcagcacggatcttgctcatataccttcctattgccggagatggataattgccggtcttcctcttcaccatacgtctctaatgctgtgcaacgagacgcacccttagaatatgatgacagcgtacagaggctgcaggtgctggagaatataatggagaacaacacccagtggctgatgaaactggagaattacatccaggacaatatgaagaaggaaatggtggaaatacaacagaacgccgttcagaaccagactgcagttatgattgaaatcggcacgaatttgctgaatcagaccgctgaacagacccgtaaactgactgatgttgaagcacaggtcctgaatcagacaacgcggctggaattgcagttgctggagcattctctctctactaataagctcgagaaacagattttggaccaaacaagcgagatcaacaagttgcaagacaagaattcttttctggaaaaaaaagtgcttgcaatggaagataagcatatcatccagctgcaatcaatcaaagaggagaaagatcagctgcaggtgttggtgagcaaacagaactccattatcgaggaacttgaaaagaaaatagttactgccacggtcaataattcagtgttgcagaaacagcagcacgacctgatggagaccgttaataacctcctgacaatgatgtctaccagtaacagtaaagaccctactgtggcaaaggaggagcagatatcgttcagagactgcgctgaagtgttcaaaagcggccacaccacgaacgggatatacacgctcacgtttcccaattccactgaagagatcaaagcctactgtgatatggaagctggtggcggggggtggactatcatccagaggagggaggatgggtctgttgacttccagagaacctggaaagagtacaaggttggattcggtaatccctcaggagaatattggctggggaacgagtttgtgagccagctaaccaatcaacagcgctacgtcctgaagatacacctcaaagactgggagggaaatgaggcctattctctctacgagcatttttacctgtcatccgaggaactaaactaccgtatacatcttaagggactcacaggcactgccggcaagatctctagcatctcgcagcccggcaatgatttctccacaaaggacggggataatgacaaatgtatctgcaagtgtagccagatgctcacaggaggttggtggttcgacgcatgcggaccatcaaatctgaacggaatgtattaccctcagcgccagaacacaaacaaattcaacgggatcaaatggtactattggaaggggtccggctatagcctgaaggcaacgacgatgatgatacgccctgccgacttctag

SEQ ID NO: 22807 - DNA, 1335 bp, synthetic construct
  misc_feature 1..1335: note = Description of Artificial Sequence: Synthetic coding sequence
  source 1..1335: mol_type = other DNA
atgtggcagatcgtgttcttcaccctgagctgcgacctggtgctggcagctgcctacaacaacttccgcaagtctatggattccatcgggaagaagcagtaccaggttcagcacgggagttgcagctacacatttttgctcccggagatggataattgccgctccagcagttccccctacgtgtctaatgcagtacaaagggacgcgccccttgagtacgacgacagcgtccagaggttgcaggtgctggagaacatcatggaaaacaacactcaatggctgatgaaggtgcttaaccagactactcgactggaattacagctgctggaacacagcctgagtaccaacaaacttgagaaacaaatcctggatcagacgtcagaaattaacaaactacaagacaagaacagtttcctggagaagaaggtcttggccatggaggataagcacattatacaactccagtccatcaaggaagaaaaagatcagctgcaggtgctggtctcaaagcagaattccatcatcgaggaactggaaaagaagattgtcaccgctaccgtgaataacagcgtgctccaaaagcagcaacatgatttgatggagaccgtcaataatctgctgacgatgatgtctacttctaattctgcaaaggaccctacggtggcaaaggaggagcaaatctccttcagggactgcgcagaggtgtttaaaagtggacacacaacaaatgggatctacaccctgacatttcccaactccacggaggaaattaaagcgtactgtgacatggaggcgggggggggtggatggaccatcatccagaggcgggaagatggtagcgttgattttcaaaggacatggaaggagtataaggtggggttcggcaacccaagcggcgagtactggttggggaatgagttcgtgtctcagctgaccaatcagcagcgatacgtcctgaaaatccatctgaaggattgggagggtaatgaggcctactcactttatgagcacttctacctctcatctgaggaattgaactatcgaattcaccttaaagggctcaccggtactgcgggcaaaatcagcagcatcagtcaacccggcaatgacttctcaacgaaagacggggacaacgacaaatgcatttgcaagtgttcgcaaatgctgaccggaggctggtggttcgatgcatgcgggccttctaatctcaacggcatgtactaccctcagagacagaatactaataaatttaatggaatcaagtggtactattggaaaggatcaggatactccttgaaggctacaactatgatgatccggccggccgacttttag

SEQ ID NO: 22808 - DNA, 1221 bp, synthetic construct
  misc_feature 1..1221: note = Description of Artificial Sequence: Synthetic coding sequence
  source 1..1221: mol_type = other DNA
atgagcggcgcccccaccgccggcgccgccctgatgctgtgcgccgccactgccgtgttgctctctgcgcaaggcggtcctgttcagagcaaatcccctaggtttgcgagctgggatgagatgaacgtgctcgcccatgggctgctgcaactgggccaggggttgcgtgagcacgctgagaggactcgttcacaactgtcagcactcgaaagaagactgtcagcctgcggcagcgcttgccagggaactgagggatccaccgatctgccactggcccccgaaagtcgggtggaccctgaagttctacacagcctccagacccagctcaaggcccaaaatagtcgcattcagcagttatttcataaggtggctcagcaacagcggcacttggagaaacagcatctaaggatccagcacttacagtctcagtttggactgttagaccataaacacttagatcacgaagtcgcaaagccagcaagaagaaaacgcttacccgagatggcccaacccgtggatcctgcccataacgtcagtagactgcaccgcctgcccagggattgccaggagctcttccaggtgggcgagcggcaaagtggcctgtttgaaattcagccacagggaagtcctccatttctagtgaattgcaagatgacgtccgacggaggatggacagtgatccaaaggcgacatgatgggagtgtggacttcaaccgtccttgggaggcctataaggctggctttggcgatccacacggcgagttttggctcggactcgaaaaagtgcattctatcaccggcgatcgcaacagcaggctggccgtgcagctacgagactgggacggcaatgcagaactgctccagttttccgtgcacctaggcggtgaagacaccgcctacagcttgcagctgacggcacccgtagccggtcagctgggggctactactgtgccaccgtctggcctttcggtcccattctccacctgggaccaagaccacgacttacggcgggataagaattgcgcgaaaagcctgtctggcggttggtggttcggtacctgctcccactccaatctgaacggacagtatttccggtctatacctcaacagagacaaaagctgaaaaaaggcattttctggaaaacatggagaggacggtactacccccttcaagccaccacaatgctcatccagcccatggccgccgaagctgcctcttag

SEQ ID NO: 22809 - DNA, 1107 bp, synthetic construct
  misc_feature 1..1107: note = Description of Artificial Sequence: Synthetic coding sequence
  source 1..1107: mol_type = other DNA
atgagcggcgcccccaccgccggcgccgccctgatgctgtgcgccgcaacagcagtgctcctgtccgcccaaggcgggcctgtgcaatccaagagtcctcggtttgcctcatgggacgaaatgaatgtactcgcccatggcctgcttcaactgggccaggggctccgcgagcacgctgagcgtactcgctcacagctgagcgcattggaacgtcggctcagcgcctgtggatcggcttgtcagggcactgaaggctccaccgatctcccactcgctcctgagtcccgggtcgacccagaagtgttgcacagcttgcagacgcaattgaaggcacagaactcacggatccagcagctctttcataaagtcgctcaacagcagaggcacctggaaaagcagcatcttaggattcagcatctgcagagccagtttgggttgttagatcacaagcatcttgaccacgaggtggcaaaacccgcccggaggaaaagacttcctgagatggcccagccggtggaccccgctcacaatgtgtcaaggttgcaccatggaggctggacagtgatacaacgtcgccacgacggatcggttgacttcaacaggccttgggaggcctataaagccggctttggtgaccctcatggagagttctggctgggcctggaaaaggtccatagtatcaccggagatcggaatagcagactggcggttcaactcagggattgggatgggaacgctgagttattgcagttttccgtgcacttggggggcgaggacacagcctacagcctccagcttacagcccccgtcgctgggcaattaggtgcaaccaccgttcctccaagtgggctctctgtcccattttccacctgggatcaagatcacgacttgcgtcgcgataagaactgcgccaagtccctgagcggtgggtggtggttcggcacctgcagccacagcaacttgaacgggcagtacttccggagcatacctcagcagcgccagaaacttaagaaaggaatattctggaaaacctggagagggagatactatccccttcaggctacaacaatgcttattcagcctatggccgctgaggccgcctcttag

SEQ ID NO: 22810 - DNA, 720 bp, synthetic construct
  misc_feature 1..720: note = Description of Artificial Sequence: Synthetic coding sequence
  source 1..720: mol_type = other DNA
atggcccagcccgtggaccccgcccacaacgtgagccggctgcaccgtttacctcgggattgccaggagctgtttcaagtgggcgagcgtcagagtggcttgttcgagattcagcctcagggctcacctccctttctggtgaattgtaagatgacctcagatggggggtggacagtgatacaacggaggcacgacggaagtgtagatttcaatcggccttgggaggcctataaagctggcttcggggatccgcacggcgagttctggctcggactggaaaaagtgcattctattacgggggaccggaatagcaggctggctgtgcagttacgtgattgggacggcaacgccgaattgctgcagttctcggtacatctgggcggcgaggatactgcatactcacttcagctgaccgcccctgtcgccggccagctgggcgccaccacagttcccccaagtggtctatccgttccattcagcacgtgggaccaggatcatgacctgaggcgtgacaagaactgcgcgaagtcactgtcaggaggatggtggtttgggacctgtagccattcaaatctaaatggacagtactttaggtccatacctcagcagagacagaagttgaagaagggcatattttggaaaacatggcggggccgatactatcctttgcaggctacgaccatgctgatccagcctatggccgctgaagcagcgtcatag

SEQ ID NO: 22811 - DNA, 837 bp, synthetic construct
  misc_feature 1..837: note = Description of Artificial Sequence: Synthetic coding sequence
  source 1..837: mol_type = other DNA
atggagccccgggccgccgacggctgcttcctgggcgacgtgggcttctgggtcgaaagaacacctgttcacgaggccgcgcagcgaggcgaaagtctgcagctgcagcagttaattgaaagtggtgcgtgtgttaaccaggtgaccgtggattccatcacaccactccacgcagcttcactgcaaggccaagcgcgatgcgtacagctcttgttagccgcgggagcccaagtagacgctaggaacatcgatggtagcactccactgtgcgatgcctgtgccagcgggtccattgaatgtgttaagctcctgctctcgtacggtgctaaggttaacccccctctgtacactgcttcaccactacatgaagcatgcatgtcaggatcctccgagtgcgtgcgcttgttgatcgatgtgggagccaacttggaggcacatgattgtcattttggcactccactgcacgtggcctgcgcccgagagcatttggactgcgtcaaagtactactcaatgccggcgctaacgtgaatgctgctaagttgcatgagacggctctccatcacgccgctaaggtgaagaatgtagatcttatcgaaatgctcatcgaatttggcggcaacatctatgctcgggacaatcgcggaaaaaaaccctcagactacacctggagttcatcggcccctgctaaatgtttcgagtactatgagaaaactcccctgaccttgtcccagctctgtagagtgaacttgagaaaagcgaccggagttagggggctggagaaaattgcaaaattaaacattccacccagactcatcgattacctttcctataattag

SEQ ID NO: 22812 - DNA, 396 bp, synthetic construct
  misc_feature 1..396: note = Description of Artificial Sequence: Synthetic coding sequence
  source 1..396: mol_type = other DNA
atggagaagatccccgtgagcgccttcctgctgctggtggccctgtcctatactctggctagggacacaactgtcaaaccaggggccaagaaggatacaaaagattctcgtcctaagcttccacagacactgtcacggggttggggggatcaactcatctggacacagacctacgaagaggctctgtataagtctaaaacatcaaataaaccgcttatgattatccaccacctggacgaatgcccccattctcaggccctgaaaaaggttttcgccgagaataaggaaatccagaaactggctgaacaattcgtgctactgaatctggtatatgaaaccacagataaacacctctcaccagatggtcagtatgtgccaagaataatgtttgtgtag

SEQ ID NO: 22813 - DNA, 528 bp, synthetic construct
  misc_feature 1..528: note = Description of Artificial Sequence: Synthetic coding sequence
  source 1..528: mol_type = other DNA
atggagaagatccccgtgagcgccttcctgctgctggtggccctgagctacactctggccagggatacaacagtaaaacccggtgcgaaaaaagacaccaaggatagccgccccaaattgccccagactctctcccgcggctggggagaccagctgatctggactcagacctacgaggaggctctgtataagtcaaagaccagcaataaacctctcatgattatacaccacctcgatgaatgcccccacagtcaggccctgaagaaggtcttcgctgaaaacaaggaaatccaaaagctggctgaacaatttgtgctgctgaacctagtgtatgaaacgaccgacaagcacttgtcccccgatgggcagtacgtcccgagaattatgttcgtggaccccagcttaaccgtgagagctgacattacaggccgatatagcaaccgcctgtatgcgtatgagcccgccgatacggccctgttattagataacatgaagaaagctctgaagctgttaaaaacggaactttag

SEQ ID NO: 22814 - DNA, 588 bp, synthetic construct
  misc_feature 1..588: note = Description of Artificial Sequence: Synthetic coding sequence
  source 1..588: mol_type = other DNA
atgagcaactacaccgacgccgagagcagcttcagcaagcaggagatcatccgagtggccatggagaaaatcccagtttcagcatttctcctgttggttgccctgtcttatacgctcgcccgcgataccacagtgaaacctggcgcaaagaaagacaccaaggatagccgccctaagctgccccagaccttatccagagggtggggagaccagctgatctggacacagacatacgaggaagctttatataaaagcaagactagtaataaaccgctgatgataattcaccacctggatgaatgcccgcattcacaggccttaaagaaggtattcgccgaaaacaaggagattcagaaattagccgagcagtttgtccttcttaacctggtgtacgaaactaccgataagcacctgtcgcccgacggccaatacgttcctagaataatgttcgtggacccaagcctgacagtgagagcagacatcacaggaaggtactccaataggctctacgcctatgaacccgctgacacagcactgctcttggataacatgaaaaaagcgttgaagttgctaaaaaccgagctgtag

SEQ ID NO: 22815 - DNA, 1251 bp, synthetic construct
  misc_feature 1..1251: note = Description of Artificial Sequence: Synthetic coding sequence
  source 1..1251: mol_type = other DNA
atgtggcccacccggcggctggtgaccatcaagcggagcggcgtggacggtccccactttcccctttccctcagcacctgcctgtttggcaggtatgagaacgaatcgctgcagaatggacgcaaaagcactgagttccccagaaagattagggaacaggagcccgctaggagggtttccagatctagtttctcttccgaccctgacgagagcgagggaatcccgttgaagaggaggcgggtgagctttggaggccacttaagacctgagcttttcgatgagaatttgccgccaaatactcctttgaagcggggggaggctccaactaaacggaaatcgctcgtcatgcacaccccaccagtgctgaaaaaaatcattaaagaacaaccacagccttccgggaaacaggagagcggcagcgaaatccatgtggaggttaaagcgcaaagcttggtgataagccccccagcaccatcaccacgtaaaacccccgtagcaagtgaccaacgccgacgctcatgtaagaccgcccccgcctcctcgagtaagtcccaaactgaagttccaaagcgggggggccgaaagtccggaaacctgccctcaaaacgagtgagcatctcgagatcacagcacgacatcctccaaatgatttgctccaagaggcgttctggcgcttccgaggcaaatctcattgtggcaaagagttgggccgatgtggtgaagctgggagcaaagcagactcagaccaaggtgatcaagcacggcccccagagatcaatgaataaacgccagaggcgcccggcgactcccaagaagcccgtgggcgaggtgcactctcaattctcaaccgggcacgctaacagcccttgcaccatcataatcggaaaggcccacacagagaaggtgcacgtgccggcgcgaccttacagggtactcaataactttatttccaaccagaagatggattttaaggaggacttgtctggtatagctgagatgtttaaaacaccagtcaaagagcagccccagctcacctctacatgccatatagccattagcaattctgagaatctgctcggcaagcaatttcaaggcactgatagtggtgaagagcccctgctccccactagcgaatcattcggaggcaatgtgtttttctctgcccagaacgcagccaagcagcctagcgacaaatgctcggctagcccaccactgaggaggcagtgcatccgagagaacggcaacgtgtag

SEQ ID NO: 22816 - DNA, 8691 bp, synthetic construct
  misc_feature 1..8691: note = Description of Artificial Sequence: Synthetic coding sequence
  source 1..8691: mol_type = other DNA
atgtggcccacccggcggctggtgaccatcaagcggagcggcgtggatggacctcactttccactgtcactttcaacctgcttatttggcaggggtattgaatgcgatattcgaatccagctgcccgtggtgagcaagcaacactgtaagattgagatacatgagcaggaggcaatccttcacaacttttcttccaccaatcctacacaggtgaacgggtccgtgattgacgagcctgtgcgcttgaagcacggtgatgtaattaccatcatcgatcggtctttccgctacgaaaacgagagcctgcagaacggacggaaatctaccgagttccccagaaaaattcgagagcaggagcctgcccggagagtctccagatccagcttctcgtccgaccctgatgagtctgagggcatcccgctgaagcggcggcgggtgtcgtttggcggtcacctgcgtcctgagcttttcgatgagaacctgcccccaaacactcctctaaaacgtggggaggctcccacaaagcggaagtctctggtgatgcatactcctccagttttgaaaaagatcatcaaagagcaaccccagccaagcggtaagcaggagtcggggtctgagattcacgtggaggttaaggcccagagcctggtaatttccccacctgcccctagccccaggaaaactccagtcgcgtcagaccagcggagacgatcctgcaagaccgcgccggccagctcaagcaagtcccagaccgaggttcctaagcggggaggacgcaagtccgggaatttgcctagcaaacgagtttcgatatcgcggagccaacacgatattttgcagatgatatgttcaaagcgccggtcaggcgctagcgaagcaaatcttattgtggccaagagctgggctgatgttgtgaaactgggcgcaaaacagacacagactaaagtcattaaacacggcccacagagaagtatgaacaagcgccagagaagacctgccacgccgaagaagcctgtgggagaggtgcatagtcagttttctaccggtcacgcgaattccccatgtaccatcatcattggcaaagcccatactgagaaggtgcatgtgcccgctaggccatacagagtgctgaacaatttcatctcaaaccagaaaatggattttaaagaggacttatccggcatcgctgagatgttcaagacacccgtgaaggagcagccccaacttacctccacctgccacattgcaatttccaatagcgaaaatctgctggggaagcaattccagggtactgatagcggagaggaacctttgctccccacgagcgaatcctttggggggaatgtgtttttctctgcacaaaacgctgctaaacagccatccgacaagtgttcagcctctccacctctcagacggcagtgcattagggagaacggcaacgttgcgaagacacccaggaacacctacaagatgacaagtctggagacaaaaactagcgacaccgagactgagccttcaaagaccgtatcaaccgccaatcggtctggaaggtcgactgaattccggaatatccaaaaactacctgtagagtccaaatccgaggagaccaacacggaaatcgtcgaatgtatcctcaagaggggtcaaaaagccaccctgcttcagcaaaggcgcgagggcgagatgaaggaaattgaaaggccttttgagacatataaggagaatattgagctgaaggagaacgacgagaagatgaaggccatgaagcggtcacgtacatgggggcagaagtgcgcacctatgtccgacttaaccgatctgaagtcgctccccgatactgagttgatgaaggatactgcacgaggacagaatctgctccagacccaagatcatgcaaaagcacctaaaagtgagaaggggaaaattaccaaaatgccttgtcagtccctgcagcccgaaccgatcaacacccccacccataccaagcagcaattgaaggcgtccctgggaaaggtgggcgtgaaagaagaacttctagccgtgggcaagtttactaggactagtggcgagacgacacatacacatcgcgaaccagccggcgatggcaaaagtatcaggacttttaaggagtcaccgaagcagatacttgatcccgccgccagagtgactggcatgaagaagtggcccaggaccccaaaagaagaggcccagagcctcgaagacctggccggcttcaaggaactattccaaactccagggccttccgaagagtccatgacagacgagaaaaccaccaaaatagcctgtaagtcacccccacctgagagcgtggacactcccacgagcacaaagcagtggccaaagaggtccctgagaaaagcggacgtcgaagaggaatttctggctctaagaaaacttactccaagtgctggaaaagcgatgctgacaccaaagcccgctgggggcgatgagaaagatatcaaggctttcatggggaccccagtccagaagttggacctggccggaaccctgccgggctctaagagacagctgcagacccccaaagaaaaagcccaggcgctggaagacctggcagggtttaaggaactgttccaaactccaggccatacagaggaattggttgccgctgggaagaccaccaaaatcccttgcgactcacctcagagcgacccagtagacactcccactagcacaaagcagaggcccaagcggagcatcagaaaagccgacgttgagggggaactgctggcctgccgcaatctcatgccctcagcagggaaggcaatgcatactcctaagccctccgtaggcgaggagaaggacatcatcatctttgttggcactcccgtccagaagctcgaccttaccgagaacctcactggctcgaagagaagacctcaaacacccaaagaggaggcccaggctctggaggatttgaccggcttcaaggagctgttccagacacctgggcatacagaggaggcagtggcagcagggaagacaactaagatgccctgcgagtcatccccccctgaaagtgctgatacccctacaagtacacgacgccaaccaaaaactccattggagaaaagggacgtacagaaggaattaagcgcacttaagaagcttacccagacttctggggagactactcacacagacaaggttcctggcggcgaggataaaagtataaatgcgttcagggaaactgccaaacagaaactggatccagctgcaagtgttacggggtctaagcgacaccccaaaacaaaagaaaaggcccagccccttgaagacttggcagggctgaaagagctgttccagactcctgtttgtacagacaagcccaccacccacgagaaaacgaccaagatcgcctgcagatcgcagcctgatcccgtcgatacccccacctcctccaagccccagagtaagcgttctctccgtaaggttgacgtggaagaagagttctttgccttgaggaagcgaacacctagtgctggtaaagccatgcacacccctaagcccgctgttagcggcgaaaaaaacatctatgcgtttatgggaactccagtgcagaaactggaccttactgaaaatcttaccgggtctaaaagaaggttgcagacccccaaggagaaggcacaggcattagaggatctcgctgggtttaaggaactgtttcagaccagagggcatactgaggaatcaatgaccaacgataagaccgctaaagtggcctgcaaatcaagtcagcccgatcccgataagaatcccgcttcgtctaagcgaaggctcaagacaagcctgggaaaagtcggagtgaaggaggaactgctggctgtgggcaagctcacccagacctctggcgagactacccacacccatacggaacccaccggagacgggaagagcatgaaggcctttatggaatctcctaagcagatcctcgattctgctgcctctcttaccggaagtaagagacaattgagaacacccaagggtaagtcggaagtcccagaagatctggcaggttttatcgagctcttccaaacacctagtcacaccaaagaatctatgaccaacgagaaaactactaaggtttcctaccgcgccagccagcccgacctagtggatacgccaacctcaagtaaaccacagcctaaaagatctctgcgaaaagccgacaccgaggaagagttcctggcatttaggaagcaaactccctctgctggaaaagcaatgcacaccccaaaaccagctgtcggcgaggaaaaagacatcaacaccttcctgggaacccctgtccagaagctagaccaacccgggaatctgcccggcagtaatagaaggctgcagacacggaaagagaaagcgcaggccctagaggaattaaccggcttccgagaattattccagactccctgtacggataaccccaccactgatgagaagaccacaaagaagatcctttgcaaatctccccaatctgacccagcggataccccgaccaacaccaagcagcgacccaagcgctctttaaaaaaggcggatgtcgaagaggagttcctcgccttcagaaagctgaccccttccgcaggcaaagccatgcatacccccaaggctgctgtcggagaagagaaggacatcaatacgttcgttggaacaccggtggagaaactggatctgctggggaacttgcccggctccaaacggcgtccccagacacccaaggagaaggccaaagcacttgaggacttagcggggtttaaagaactttttcagacccccggacataccgaggaaagcatgaccgacgacaagattacagaagtctcatgcaaatccccccaaccagatcctgtcaaaactcccacctcctctaagcagcgtctcaaaatcagcttaggaaaagtcggggtgaaggaagaagtgctgccggtgggcaagctgactcagacgtcagggaaaaccacgcagacccaccgcgaaaccgccggcgacgggaagtctattaaggcttttaaagagagtgccaaacagatgttggatcctgctaattacggaacgggaatggagcggtggccaagaacaccaaaggaagaggctcagtccctagaagatcttgctggcttcaaagagctcttccagactcccgaccacacggaagaatctaccaccgatgataagaccactaagatcgcttgtaaatccccaccgccggagagtatggacacacccacttcgacacgaaggaggccaaaaaccccattgggcaaacgggacatcgttgaggaattaagcgcccttaagcagcttactcagacaacccacactgataaggtgcctggcgacgaagataagggcattaatgtctttcgtgagacagccaaacagaagctggatcccgcagcgtcagtcacggggtcgaagagacagccccgcacacccaaagggaaggcccagcccctggaggatcttgctggcctgaaggaactgtttcagaccccaatctgcactgataaacctactactcacgagaaaactacaaaaatagcatgccggagtccacagcctgatccagtcgggacgcccacaatctttaaacctcagtcgaagaggtccttgcgcaaagccgatgttgaggaggaatctttggctcttaggaagcggacgccttccgttggaaaagctatggacacccctaaaccagcaggaggcgatgagaaagacatgaaggccttcatgggcacccctgttcagaagctggacctccctgggaatctccccggaagtaaacgatggcctcagactcctaaagagaaggcacaggcattggaggacctggccggcttcaaggagctctttcaaaccccgggtaccgataagcccacaaccgatgaaaagacaaccaaaatcgcctgtaagtccccacagcccgacccagtcgatactcctgcaagtacaaagcaaagaccaaagcgcaatctcagaaaggcagacgtcgaggaggagttcctggctctgaggaagagaacacccagcgccggcaaggcgatggatacacctaagccagctgtgagcgatgagaagaatatcaatactttcgtggaaacgccggtccaaaagctggatctgcttggaaatctgcccgggtccaaaaggcagccccagacccctaaggaaaaggctgaggctctggaagatctggttggctttaaggagctgtttcagacacccggccatacagaagagtccatgacggacgacaaaatcacagaggtgtcatgtaaaagcccccaacccgagtctttcaaaacgtcccggtccagcaagcagagattgaagataccccttgttaaggttgatatgaaagaggaacctctagcagtttccaaactgacccgcacctccggtgagaccacccagacacacacagagccaacgggagacagtaagtccataaaagcgtttaaggagtcaccaaagcagatcctggaccccgccgccagtgtgactggctctcgacggcagctgaggacaagaaaagagaaggcccgggcgctggaggacttggtcgattttaaggagcttttctccgcccccggccataccgaagagtccatgacaatcgacaagaacaccaaaattccctgtaagagtccccccccagaactcactgatacagccaccagcaccaagagatgtcctaaaacacggcccaggaaagaggtgaaagaggagctgagcgctgtcgaacgactcacacaaaccagcggccagtccacacatactcacaaagagcctgccagcggggatgaagggatcaaagtgttaaaacagcgggctaaaaagaaacccaaccccgtggaggaggaaccatctcgccggagaccaagggccccaaaagaaaaggcccaacctctcgaggatcttgccgggtttacagagctgtccgagactagcggccatacgcaggaatcactgaccgccggaaaagcaactaagatcccctgcgaatcacccccgctcgaggtcgtagacactacagcctccacaaaaaggcatttgcggacacgcgtgcagaaggttcaggtgaaggaggaaccctcagctgttaaatttacacagactagcggtgaaacaaccgacgcagacaaagagcccgccggggaggacaaaggaattaaagccttgaaggaaagcgccaagcagacaccagcccctgccgcttctgttactggcagtcggagaagacctcgggccccccgagagtccgctcaggcaattgaagaccttgctggctttaaagatcctgctgctggacatacggaggaatccatgactgacgacaagaccaccaagatcccttgcaagtcaagccctgaactcgaggacaccgctacatccagcaaacggaggcctcgcacaagggcccagaaggtggaagtcaaagaagagttactggctgttggcaaactgacccaaaccagtggggagaccactcataccgacaaggagcccgtgggagaaggaaaaggaaccaaggccttcaagcagcccgccaagaggaaactggacgcagaggatgtcatcggtagtaggcggcagcctcgggcaccaaaggagaaggctcaaccgctggaggatctggccagctttcaggaactgtcgcagacgcccggacacaccgaggagcttgcgaatggtgcagccgattcctttacctccgcacctaagcaaactcccgacagcggcaaaccactgaagatcagccgccgggtcttgcgcgcaccaaaggtcgaaccggtcggagacgtagtttcaaccagagacccagtgaagagtcaaagcaaaagcaacacaagcttgcctccactgcctttcaagagaggtggcggaaaagacggcagtgtcaccggaactaaaaggctgaggtgcatgcctgctcccgaggagatcgtcgaggaattacccgcttctaaaaagcagcgggtcgcaccacgggctcgggggaagtcctccgagccagtggtgatcatgaagcgatccctaaggacttcagctaagcggatcgagcctgccgaggagctgaacagtaacgacatgaaaacaaacaaagaggagcacaagttacaggacagcgtccccgaaaataagggaatttcactccgcagcaggcgccaaaacaaaaccgaggctgagcagcagatcactgaggtgtttgttctggcggagcgcatcgagatcaacagaaacgagaagaaaccgatgaagactagtccggagatggatattcaaaatccagatgatggagcgaggaaaccaatccccagggacaaggtgacggaaaacaaacgatgtttgcgcagtgcaagacaaaacgaaagctcccagcctaaggttgccgaagagtctggcgggcagaagagcgccaaggtcttgatgcaaaaccaaaaggggaagggagaagcgggcaactcagacagcatgtgtctcagatcacgcaaaaccaaatcccagcccgccgcttctacactcgagtcaaagtctgtccagagggtgacaaggtctgttaagcgttgcgctgagaatcctaagaaggctgaggacaatgtgtgcgtgaaaaaaattcgcacgaggtctcaccgggattcagaggacatctag

SEQ ID NO: 22817 - DNA, 9771 bp, synthetic construct
  misc_feature 1..9771: note = Description of Artificial Sequence: Synthetic coding sequence
  source 1..9771: mol_type = other DNA
atgtggcccacccggcggctggtgaccatcaagcggagcggcgtggatgggccacatttccccctgtctctgagtacatgtttgtttggccggggcatcgagtgcgatattaggattcagttaccagtggtgtccaagcagcactgcaagattgaaattcatgagcaggaggccatattgcataatttctcgagtacaaatcctacacaggtgaatggaagcgtaatcgacgagcccgtaaggctcaaacacggtgacgtgattactataatcgacaggtcatttcgatatgagaatgagtccctgcagaacggacggaagtcaaccgagttccccaggaaaatccgggagcaggagccggcccgtcgggtgagcagatcttccttttcatctgacccagatgagaaggcgcaggactctaaggcctactccaagatcaccgagggcaaagtttcaggcaaccctcaggtgcacatcaaaaatgtaaaggaggattccacagcggatgacagcaaagattcagtcgcccaaggcacaacaaacgtccatagctccgaacacgccggccggaacggcaggaatgccgccgatccgatcagcggagattttaaggagatttcatccgttaagttagtgtccaggtacggcgagctcaagagtgtcccaactacccaatgcctggataatagtaagaagaacgaatcacctttttggaagctttacgagtccgttaagaaagaattggatgttaagagtcaaaaagaaaacgtgcttcagtactgtaggaagtccggcctgcagaccgattatgcaaccgaaaaggaatcggccgacggcttacagggagaaacacaattgctggttagtagaaaaagtaggcctaaatcaggagggagcggacacgccgtggcggagcccgcatcacccgaacaagagctcgatcagaacaaggggaagggcagggacgtggaatctgtccagaccccctcaaaggccgtaggcgcatcgtttccattatacgagcctgctaagatgaagacacccgtgcaatactctcagcagcaaaacagccctcaaaagcataagaataaggatttgtatactacaggtcgccgtgagagtgtgaatcttggaaagagcgagggctttaaggctggagacaagaccttgaccccccggaaactcagcacgcgcaacagaactcctgcaaaagtagaagatgccgccgactctgctaccaaacccgaaaatctttcgtctaaaacacgcggctctattcctaccgatgtggaggtactcccaacagaaacagagatccacaatgaacccttcttaaccctctggctgacgcaggtggagcggaaaatacagaaggatagcttgtccaaacccgagaaattgggtacgactgccggccagatgtgttccgggctccctggactgagctccgtcgacatcaacaatttcggagactccatcaacgaatccgaaggcatcccattgaaaaggcgacgggtgtcctttggtggtcacctgagacccgagttgtttgacgagaatctgccacccaacactccactgaagcgaggtgaggctccaaccaagaggaagtccttagtcatgcacacaccccccgtcttaaaaaagatcatcaaagaacagccacagcccagcggaaaacaagaaagcggaagcgaaatccacgtcgaggtcaaagctcagtccttagtcatatcaccccccgcgccctcaccgaggaagactcctgtggcgtccgaccagcgcaggagaagctgcaaaacagcaccagcatctagctctaagagccagaccgaagtccccaaacgcggggggaggaaatccggaaacctgcctagtaagcgcgtgagtatcagtcggtcacagcatgatatcctgcagatgatctgctctaagagacgcagtggtgcaagcgaagccaacttaatcgtggccaagagctgggctgatgtggtgaagctgggcgcaaaacagacccagacaaaggtaatcaagcatgggcctcagagatcgatgaacaaacgtcaacgccggcccgctacccccaagaaacccgtaggcgaagtgcactctcagttttccacagggcatgctaatagtccgtgcacaatcattatcggcaaggctcacacggagaaagtgcacgtccctgcacgaccgtatcgggttcttaataatttcatttccaatcagaagatggatttcaaggaggatctgtctggaatcgccgaaatgttcaagactcctgtgaaagagcagccacaactcaccagcacctgccacattgctatttctaattccgagaatctcttggggaagcaattccaaggtacggattccggcgaggagccactgctgcccacctctgaaagctttggcggcaacgttttttttagcgcgcagaacgccgcgaagcagcccagtgataaatgcagcgcaagccctccactaagaaggcaatgtataagggagaacgggaatgtggcgaagactccacggaacacgtataagatgacaagccttgaaaccaaaacaagcgacaccgagacggaaccgtccaagactgtcagcaccgccaatagatcaggaagatctacagagtttcgcaatatccaaaagctcccagtcgagtctaaatctgaggaaacaaacacagagatcgtggaatgcatcctcaagcgcggacagaaggccaccttgctgcagcagcgtcgcgaaggcgagatgaaagaaatcgagcgcccattcgagacttataaggaaaacattgaactcaaggagaatgatgaaaagatgaaggcaatgaagagatcaagaacctggggtcagaaatgtgcccctatgagcgatctcaccgacctgaagagcctgccagacaccgagctcatgaaggatacggctcgcgggcagaatcttctgcagacacaggatcacgcaaaggcacctaagtctgagaagggaaagatcactaaaatgccttgtcaaagtttacagcctgagcccatcaacacgcctacccataccaaacaacagctcaaggcaagtcttgggaaagtgggggtgaaagaggagttactggctgttggtaagtttacaaggacgtcgggcgagaccacccatacccatcgtgagcccgcgggagatggtaaatctattcgtaccttcaaggaatctccaaagcaaatacttgatcccgcagctcgagtgacaggaatgaagaaatggcccaggaccccaaaagaggaggcccagtctttagaagacttggcaggttttaaggagctcttccaaacgcccggaccctccgaggaatctatgaccgacgagaagaccactaagattgcttgcaagtctcccccccctgaatccgtcgacactccaacatcaacaaaacaatggcccaaaaggagtcttcggaaagcggacgtggaggaggagttcctggcactaagaaagctgacgccatccgctggaaaggctatgttgacccctaaaccagccggaggggacgaaaaggacataaaagccttcatggggactcccgtgcagaagctggatctagcagggacactgcccggaagtaagcggcagttgcagacacccaaggaaaaagcgcaggcactggaagacctcgctggctttaaggagttatttcagacacccggccacaccgaagaactcgtcgcggccggaaagaccacgaagatcccttgtgattccccccagtcagatcccgttgacacccccactagtactaagcaacggcccaaacgtagtatccgaaaagccgatgtggaaggcgaactgttggcctgcaggaacctgatgccctctgcaggaaaagctatgcacacccctaaaccctcagtgggggaggagaaggacataatcatctttgtgggtacacctgtacagaagcttgaccttactgagaatctgactggtagtaagcgccggccgcagactcccaaggaggaagcacaggccttagaagatctgacaggatttaaagagctgttccagacacctggacatactgaagaggcagtcgcggccgggaaaacgaccaagatgccctgtgagagtagtcctccagaatcagccgacacacctaccagtaccagaagacagccaaagacccccctggaaaagcgcgacgttcagaaagagctgtctgctttgaagaagctcacccagacctcaggcgaaacgactcacactgacaaggtgccggggggtgaggacaaatccattaatgcattcagagagaccgcaaaacagaagttagaccctgccgcctctgtcactggaagtaagagacaccctaagaccaaagagaaagcccagccattggaggacctggccggcctcaaagagctcttccaaacgcctgtctgcaccgataaacctaccactcatgagaagacaacaaagattgcatgccgttcccaaccggaccctgtggacactcccaccagtagcaagccccaaagcaaaagatccttgagaaaagtggacgtggaggaagagttcttcgctctgcgaaagcgtactcccagcgctgggaaagccatgcacactcctaagcccgcagtctctggggagaaaaatatctacgcattcatgggtacaccagtacagaagctggatctcactgagaatctcacagggagtaaaagacgcttgcagactcccaaagagaaggcccaagccctcgaagatctcgccggcttcaaggaactgttccaaacccggggacataccgaagaaagcatgaccaatgacaaaaccgccaaagtcgcctgtaaaagcagccagcctgatcctgacaagaatccggcttcctccaaaagaagactcaagacatcccttggaaaggtcggggtgaaggaggaactgcttgccgttggcaaacttacccagacctccggcgagacaacccacacacacactgaacccaccggagacggcaaatcaatgaaggcgttcatggagtcaccaaagcagatattagattccgctgcaagcctcacaggaagcaaacggcagctgaggacccctaaagggaaaagtgaggttcctgaggatctggccggcttcattgagcttttccaaaccccgtcacacaccaaagaaagtatgactaacgaaaagacaactaaagttagctacagggcttcccagccggacctggtggatacaccaactagcagtaaacctcagcctaagcggtctctgcgcaaggcagatactgaagaggagttcctagccttccgaaagcaaacaccctctgctggcaaggccatgcacactcccaaacctgcagtcggggaagagaaggatatcaacacatttcttggaacaccagtgcaaaagctggaccagccagggaatctgccagggtccaatcgccgcttgcagacccgtaaagagaaggctcaggctttggaagagctaacagggttcagagagttgtttcagaccccttgcaccgacaaccccacaacagatgagaaaacaaccaagaagatcctgtgcaaatccccccaatcagaccccgctgacactcccaccaacaccaaacagcggccaaagcgttccctgaagaaagccgatgtggaggaagagttcctcgcattcaggaagttaactccctccgcaggtaaagctatgcatacccccaaggccgcagtgggtgaagaaaaggacatcaatacatttgttggtacacccgttgaaaagcttgatctgttggggaatctccctgggagcaaacggcggccccaaactcctaaggaaaaggctaaggccctggaggacctcgccggcttcaaagaactctttcagaccccaggccatactgaagaatcaatgacggacgacaaaatcaccgaggtcagctgcaagtccccccagccagaccccgtgaagacacctacatcatcgaaacaacgacttaaaatatccttgggaaaggtgggcgttaaggaggaagtccttcctgtgggaaagctcactcaaaccagcgggaaaacaactcagacacatagagaaactgccggcgatggcaaaagcattaaagcctttaaggaaagcgcgaagcaaatgttggaccccgcaaattatggtactgggatggagcgctggccccgaactcccaaggaggaggcccagtcactggaagacctggcagggtttaaagagttgttccagacacccgaccacacagaggaaagcaccacagacgataaaactacgaagatcgcctgtaagagcccgcctcctgagtcaatggatacgcccacaagtactcgccgcaggccaaaaactccccttggaaaacgggatatagtcgaggagctctccgctcttaaacagttaacgcagaccacccacactgataaggtgcctggagacgaggacaaaggcatcaatgtttttcgggaaaccgccaaacagaagctggatcccgccgcatctgtgactgggtctaagagacaacctcgtacacccaaaggcaaagcgcagcccttggaagatctggccgggcttaaagagctgttccagacaccaatctgtacggataaacccactactcacgaaaagaccacgaagatcgcgtgtaggtcgccacagcctgaccctgttggcaccccaacaatctttaagccacagtccaagcgctcccttagaaaggctgacgtcgaagaggaatccctggccctaagaaaaaggacaccttccgtgggtaaagctatggacactccaaaacccgctggtggtgacgagaaggacatgaaggcctttatgggaaccccggtgcagaagctggacctgcccggaaatctgcccggaagcaaaaggtggccccagacccccaaggaaaaagcacaagctctggaggatctagcaggatttaaggagttattccagacgcctggtactgacaagcccactaccgatgagaaaaccaccaaaatcgcatgtaagagccctcagcccgacccggtagatactcccgccagcactaaacaacgtcccaaacgaaacttgcggaaggctgacgttgaggaagaatttttggcgctgaggaagcgtacgccctcggcgggcaaggccatggacacccccaagccagcagtgtccgacgagaagaacattaacaccttcgtagaaactccagtgcagaaacttgatctcctgggaaacctcccagggagcaagcggcagccacaaacgcccaaggagaaggctgaagccctggaagatctagtggggttcaaagagttgttccagacacctggccatacagaggaatctatgaccgacgacaagataaccgaagtgtcctgtaagagtccacagcccgagtcatttaagaccagtagatcatcgaagcagcgcctgaagatacctctggtgaaagttgatatgaaggaggaaccactggctgtctcaaagctgacgcgcaccagtggcgagaccacacagacccacaccgagcccactggcgactctaagtccattaaagccttcaaggaatcccctaagcagatacttgatcccgctgccagtgttaccgggagccgaagacagttgcgcactcggaaagagaaggccagagcactggaggacctggtggatttcaaggagctcttctcagccccgggccacaccgaagagagcatgacaattgacaaaaacactaaaatcccctgtaagtctccgccccccgagctgaccgacactgccacaagcaccaaaaggtgtccgaagactagaccccgcaaagaggtcaaggaggagctgagcgctgtcgagagactgacccagaccagcgggcagtccactcacacccataaagagccggcatctggtgacgagggcatcaaggtgctcaagcaaagggcgaagaaaaagccaaatcccgttgaagaagagccgtcgaggcgccgaccaagggctccaaaggaaaaggcccagcccctggaggacctggccggatttactgaactatccgaaacctctggacacactcaggagagtctgacggctgggaaggccaccaagatcccctgcgaaagcccgcccctggaggtcgtggacacaactgcttccactaagcgtcatctgcgaactagggtgcagaaggttcaagtaaaggaggaaccctctgcggtgaagtttactcagacgagtggggagaccacagacgccgacaaggaaccagccggtgaagataaaggcatcaaagctctaaaagaaagcgctaaacagacccccgcaccggcagcctcagttaccggcagtcgacgacgcccacgagctcctcgcgagtccgctcaggccattgaagatctcgccgggttcaaagaccctgctgctggtcacactgaggagtctatgacagacgataaaaccaccaagatcccatgtaaatcttcaccagaactggaggacactgcgaccagcagcaaacgtcggccgagaactagggcgcaaaaagttgaagtgaaagaagagcttctggcggtgggcaagctcacacagaccagcggcgagaccacacacaccgacaaagagccagtcggggaaggtaagggcacaaaggccttcaaacagcccgccaaaaggaagcttgatgccgaagacgtcatcggctccaggagacagccaagagctcccaaagaaaaggctcaacctctggaagatctggcttcttttcaagaactctcacagacaccaggccacactgaagaactggccaacggcgccgctgatagttttacatctgcccctaagcagacacccgactcggggaaaccattgaagatttcccgcagagtgttgcgggcccccaaggtggagcctgtgggagatgtggtgagtacacgggaccccgtgaaatcccaatctaaaagtaacacgagcctccctcccctgcccttcaagcgcggcggtggaaaagacggcagcgtaacagggaccaagcgcctcaggtgcatgccggcccccgaagagatcgtcgaggagctgcctgcgtcaaagaaacagcgggtggccccaagagcccgtggtaagagttccgagccagtggtaataatgaagcgctcactgaggaccagtgctaaaagaatagaaccggccgaagagctgaatagcaacgacatgaaaacgaacaaggaagagcacaagctccaggattcagtaccggaaaacaaaggcatttcgctgcgcagcagacgccagaataaaactgaagccgaacagcaaatcaccgaagtctttgtgctcgctgagagaattgagatcaacaggaacgagaaaaagcctatgaaaaccagccctgagatggacatccaaaatcctgacgacggtgccaggaaacctataccacgagacaaggtaaccgagaataagcgctgtctacgcagcgccaggcagaacgagtcttctcagcctaaagtggccgaggagtcgggcgggcaaaagagtgctaaagtgctgatgcagaaccagaaggggaagggagaggccgggaactccgactccatgtgcctgcgctcacgaaagacaaagagccaacccgccgctagtacactggaatccaagtccgttcagcgggtaactcggagtgttaagcggtgcgcagagaaccctaaaaaagccgaagacaacgtatgcgtgaagaagatccgaaccagatcacaccgtgattctgaggacatctag

SEQ ID NO: 22818 - DNA, 9768 bp, synthetic construct
  misc_feature 1..9768: note = Description of Artificial Sequence: Synthetic coding sequence
  source 1..9768: mol_type = other DNA
atgtggcccacccggcggctggtgaccatcaagcggagcggcgtggacggccctcatttcccgctgtccctgagcacgtgtctcttcggacgtggaattgagtgtgatattagaatccaactacccgtcgtaagcaaacagcattgcaaaatcgagatccacgaacaagaagcaattctccataatttttcgtccacaaatcccacacaggtcaatggctccgttattgacgagccagtgcgtctgaaacacggcgatgtgataaccattattgaccgcagctttaggtacgaaaatgagtctctgcagaacggccgtaagtccacagaattcccccggaaaatccgagagcaagagcccgccaggcgcgtatctcgttcaagcttttccagcgaccccgatgagaaggcccaagactctaaagcctattccaagattacagaaggcaaggtgagcggtaatcctcaagtgcacatcaaaaacgttaaagaagactccacagctgatgattctaaagactcagtcgctcaaggaacaaccaatgtccacagtagcgagcatgcaggaaggaatggacgcaatgcagctgacccaattagcggagactttaaagagatttcatctgtgaagctcgtttcacgttatggtgagctcaaaagcgtccccacaacgcagtgcctggacaattccaaaaaaaacgagtctccgttctggaaactgtacgaaagcgtgaagaaggagcttgacgtgaaatcacaaaaggagaacgtcctacagtactgtaggaagtctgggctgcaaactgattacgcaacagaaaaagaaagtgccgatgggctgcagggcgagacccagttacttgtgagtagaaaatcccgaccaaagtccggcggctcgggccatgcagtcgctgaacccgcttcacctgagcaggagttggatcagaacaagggtaaaggacgtgatgttgagagtgtgcaaacacctagcaaggctgtcggagcgtcgttccccctttacgagccagccaagatgaagacgccagttcagtattcccagcagcaaaactctccacagaaacacaagaacaaagatttgtacactacagggcgcagggagtccgtgaatctcggcaagagtgaaggattcaaggccggggacaagaccttgacccctcgaaagctgagtacgcgcaaccgtacccctgctaaggtggaggacgcagccgactccgcaacaaaaccggagaacctgagcagcaaaacgaggggcagtataccaactgatgttgaagtattacccacagagacagagattcacaatgagccattccttaccctttggcttacccaggtagagaggaagatacagaaggactcattgagcaagccagaaaaattggggacaactgccgggcagatgtgttccggactcccagggctttcctccgtagacatcaacaattttggcgattctattaatgagagcgaagggattcctctgaaaaggcgccgcgtgagttttggcggacacctccgccccgagcttttcgacgagaatctgccacctaatactccccttaagcgaggtgaggccccgaccaaacggaagagtttagtcatgcacacaccaccagttcttaagaaaatcatcaaagagcaaccgcagccctccggaaaacaggagagcgggtcagagattcatgtggaggtaaaagcccagagtttggtcattagcccccctgcccccagcccaagaaaaaccccagtggctagcgatcagcggcgcagatcctgtaagacagctcctgcatcttcaagtaagtctcagaccgaagttcccaagcgcgggggagaacgggttgccacatgcctgcagcgggtttccattagtcggtcccagcacgacatcctgcagatgatatgtagtaagcgaagatcaggcgccagcgaagccaaccttatcgtagccaaaagttgggctgacgtggtaaagcttggagctaagcagactcagacaaaggttattaaacatgggccgcagcgatctatgaacaaacgacagcggcggccagcaacccccaagaaaccagtgggggaggtacactctcagttttctaccggtcacgccaatagcccctgcaccatcatcatcggcaaggcgcacaccgaaaaagtgcacgttccagcaagaccatacagagttctgaacaacttcatctccaaccagaagatggattttaaagaagacctgtctgggattgctgaaatgttcaagacgcccgtaaaggaacagccccagttaacttctacatgtcatatagcgattagtaacagtgagaatttgctcgggaaacagttccaaggaaccgattccggagaggaacccctcctgcctacatccgagtccttcgggggaaatgtgttcttttcggctcaaaacgctgctaagcagccgagcgataagtgctcagcctctcctccactccgtcggcagtgcatcagggaaaacggcaatgtcgcaaagacgccacgcaatacttacaaaatgacctcgttggagactaaaaccagcgacaccgaaactgagccctcaaagaccgtgtccacagctaataggtctgggcggtctaccgagttcaggaatatacagaagctgcctgttgagagcaagtctgaggaaaccaataccgaaatcgtggaatgcattcttaagagggggcaaaaagctaccttgctccagcagagacgggagggggagatgaaagagattgagcggccatttgaaacatacaaagaaaatatcgaactcaaggagaacgatgaaaagatgaaagccatgaaacgcagcagaacatgggggcagaaatgtgcacctatgtcggatttgacagatctaaagagtctaccagataccgagctgatgaaggataccgcccgtggccaaaacctgctgcaaacgcaggatcacgcgaaggcacctaaatcggagaaaggcaaaatcaccaaaatgccctgtcaatctttacagccagaacccatcaatactccaacacacacaaaacagcaattaaaagcttctttaggcaaggtgggcgttaaggaggagctgctcgccgtaggtaaattcacccgcacgtccggagaaaccacccatacgcacagggagccagcaggcgacgggaagtccatcaggacatttaaggagtccccaaaacagatccttgaccccgcagctagggtgacgggcatgaagaagtggccccgcacccccaaggaggaggcacagtccttagaggatctggctggctttaaggaattgttccagactcctgggccgtcggaggaatctatgacagacgaaaagaccaccaagattgcatgcaaatctccccctccagagtccgtcgacactccaacaagcacgaaacaatggcctaaacgcagtctccggaaggccgatgtggaggaagaatttctggccctacgtaagctcacaccgagcgctggaaaggccatgttgacccccaagcccgccggtggggacgaaaaagatattaaggctttcatgggcaccccagtccagaaactggatctggctggcaccctacccggctctaaacggcaactccaaacgcctaaagagaaggcacaggccctggaagatttggctggtttcaaagagttgtttcagacacccggccatacagaagaacttgttgccgctggaaaaaccacgaagatcccctgcgattcgccccagtccgatccagtggacacccccacgtcaactaagcagcgcccaaagagaagtatccgtaaggctgatgtcgagggcgaattgttggcatgtcgcaatctcatgcccagtgcaggtaaagctatgcacacccctaaaccgagcgtaggcgaggaaaaagatatcattatctttgtgggcacacctgtacagaagctggatcttaccgagaacctaacgggttcaaaacggcggccacagactcccaaggaagaggcccaggccctcgaagacttgacaggcttcaaggagctctttcagacgccaggacacaccgaagaagctgttgctgccggcaaaacgacaaagatgccttgcgagtcttcacctccagagagtgccgatactccaacaagtactcgcaggcagcctaagacgccacttgaaaagcgagacgtccagaaagaattgtcagccttaaaaaaactcacacagacttctggggagacgactcatacggacaaggttcccggaggtgaggataagtccatcaacgcatttagggagaccgcaaaacaaaagcttgatcccgctgcctctgtcactgggagcaagcgacaccccaaaactaaggaaaaagcccagccgctggaggacttagccggtttgaaagaattgtttcaaactccagtgtgcaccgacaaacctacgactcacgagaagacaacgaagattgcctgtagatctcagcctgatcctgtcgacacgccgactagttctaaacctcagtccaaaagatccctgcgcaaagtcgatgtagaggaggaattcttcgcactaagaaagcgcacaccatctgccggcaaggccatgcacactccaaagcctgcggtctccggcgaaaagaacatctacgcatttatggggacacctgtacagaagttagatttgactgagaacctgacggggtctaaacgccgattacagaccccaaaggagaaagctcaggcattagaagatctcgcggggtttaaggagctatttcagacccgcgggcacacagaggaatcaatgaccaacgacaagaccgccaaggtcgcttgtaagagctcacaacctgatccggacaagaatccggcttcaagtaagcgtcggctcaaaactagcttgggcaaagtgggtgttaaggaggagcttcttgcagtggggaagttgacccaaacttcaggagaaactacacatactcacactgagccaacaggggatggcaagtccatgaaagccttcatggaatcaccgaaacagatcctggactcggccgcttcactcactggctcaaaaagacagctccggacccctaagggcaaatcggaagtgccagaggacctcgcaggattcatcgagctgttccagaccccgagccataccaaggaatccatgaccaatgaaaagaccactaaggtgagctaccgggcaagtcagcctgacctggtagatactccgacatcttccaaaccgcagcccaaacgaagcctccggaaggctgatacggaagaagagttcctggctttcaggaaacaaacacctagcgcagggaaagctatgcacacccctaaacccgccgtgggtgaggagaaagatatcaacaccttcctggggactcctgttcagaagctggatcaacctggcaaccttccaggctcaaacaggcgattgcagacccgaaaggagaaagcccaggcgcttgaggagctgacagggtttcgggaattattccaaaccccctgcaccgacaacccaacgacagatgaaaaaactactaaaaaaatcctctgtaagtctccacaatcagacccggccgatacccccacaaatacaaaacagagaccaaaacgctctcttaagaaagccgatgtagaggaggagtttttggcgttccgcaaactcaccccctccgcaggaaaggcaatgcatacaccaaaagcagcggtgggcgaggagaaggacattaacacttttgtaggaactccagttgaaaagctggatctactcggtaatctccctggctctaagagaagaccgcagacaccaaaagaaaaagccaaggccctagaagacctggccggatttaaggagttgttccagacaccgggccacaccgaggagagcatgaccgatgataaaatcacagaagtctcctgcaaatctcctcaacctgatcctgttaaaactccaacctcatccaagcagcggcttaaaatctccttgggtaaggttggtgtaaaggaggaagtgcttcctgttggcaagttgacgcagacgtctggcaaaactactcagacacatagggagaccgctggtgacggcaagagtatcaaagctttcaaagaaagcgcgaaacagatgctcgatcctgctaattatgggacaggcatggaacgctggcccaggactccaaaggaagaggctcagtccttggaggacctggctggtttcaaggagctgttccagacgccagatcacacagaagagagtacaacggacgacaagaccacaaagatcgcttgtaagtccccacccccggaaagcatggataccccaacttctacacgtcgtagacccaagactccactgggcaagcgcgacattgtggaggaattatccgctctgaagcagcttacacaaaccactcacaccgacaaggttccgggggacgaggacaaggggatcaatgtcttccgggaaacagctaaacagaagctggaccctgccgcatccgtcacgggtagcaaacgacaaccgagaactcctaagggtaaggcccaacctctggaggatctggcagggctcaaggagctgttccagactcccatatgcacggacaaacctactacacacgaaaaaaccaccaaaattgcctgccgcagtccgcaacccgacccagtggggacccccactatttttaaaccgcaatctaagaggtctctgcgtaaggccgacgtggaagaggaatctctggcactgaggaaaagaactccaagcgtaggaaaagccatggatacgcctaagccagcaggaggggacgaaaaagacatgaaagcctttatggggacaccggtccagaaattggacttgcctggcaatctgcctggttccaaaagatggccccaaactcccaaggaaaaagcccaggcactcgaagatttagcaggattcaaagaattatttcaaactccagggaccgataaacctactaccgatgagaaaaccaccaagatcgcgtgtaagagtccgcagcctgaccccgtggacacccccgcatcgacaaagcagagacctaaaagaaacctccggaaggcagacgtggaggaggagtttctggctctgcgaaagcggacaccttccgctgggaaggctatggacacacctaagcccgctgtcagcgatgagaagaatatcaatactttcgtcgaaacgcccgtccagaaactggaccttctgggcaacctaccaggctcaaaacgacagccccagacaccgaaggaaaaggccgaggccctggaggatttggttggatttaaagagttgttccagacccctggccacaccgaggaaagcatgacagacgacaagatcaccgaagtatcttgcaaatctccccaacccgaatccttcaaaacctcccgttcctcaaaacaacggctcaagatcccactcgttaaagttgatatgaaggaagaaccgctggccgtatcaaagctaacgcgcacttctggtgagactactcagacccatactgaacctactggcgactctaagagtattaaggcgtttaaggagagcccaaagcaaatcttggatccagcagctagcgtcacaggatctagaagacagctccgcacgagaaaagagaaggcccgcgcgttggaagacctggtggactttaaagagctgttctcagctcccggccacacagaagagagtatgaccatcgacaaaaacaccaaaatcccatgtaagagcccaccccccgagctgaccgacacagctacttctacaaaacggtgcccaaagacaagacctcgcaaagaagtgaaggaggagctgtccgcagtggagagattgactcagacaagtggacaatctacacatacccataaggagccggctagtggagatgaaggcatcaaggtgctcaagcagcgcgcgaagaagaagcctaaccccgtggaggaggaaccctcaagacggcggcccagagcccctaaggagaaagcccagcccctggaagatttagcgggattcacagaactgtctgaaacaagcggacacacacaggagagtctaactgccggaaaggctaccaagataccttgcgaaagcccaccactcgaggtggtggacaccaccgcctcaacaaagcgacaccttcgaactagagttcaaaaagttcaggtaaaggaggagccctctgccgtgaagttcactcagacctccggagaaaccaccgatgcggataaagagccagccggggaggacaaggggatcaaagctctgaaggaatccgcaaaacagaccccagctcctgctgcctctgtgacggggagcagaagaaggccacgggcccccagagagagtgcccaggcaattgaggacttagcagggttcaaggatcctgcggccggccatacagaagagtcaatgactgacgataagacaaccaagatcccatgtaagtcttctccagagctggaagacaccgccacctctagcaaaaggcgaccccggaccagggctcaaaaggtggaagtgaaagaggagttgctggctgtgggcaagctgactcagacgtctggcgaaacaacccacacagataaggaacccgtaggagagggaaagggtacaaaagcctttaagcagcctgccaaacgtaaattagacgccgaagatgtgatcggctctcgacggcagccaagggcccctaaggaaaaggctcagcccctggaagatctagcgtcatttcaagaactgtctcaaacccccggacacacagaggaactcgcgaacggagctgccgactcttttaccagcgcacccaagcagacgcccgacagtggaaagcctctcaaaatctctcggcgcgtgcttcgtgctccaaaggtggaacctgtgggcgacgtagtatctactcgagacccagtcaagtcgcagagtaaatccaacacttcactgccacccttgccctttaagcgtgggggcggcaaagatggctctgttacaggcacaaaacggctgcggtgtatgcccgcacctgaagagatcgtggaagagcttcccgcttctaagaaacagcgggtcgcaccacgagccagagggaagtcatccgagccagtggttatcatgaagaggagcttgcgcaccagtgccaaaagaatcgagcccgcagaagagctgaacagtaacgacatgaaaaccaataaagaggagcacaaactccaggattccgtccccgaaaataaggggatctcactccgttcacgcaggcaaaacaaaacggaagcggagcaacagatcaccgaagttttcgtactcgccgagagaatagagattaatagaaatgagaagaaacctatgaagacctctccagagatggacattcagaatcccgatgacggtgcacgaaaacctattcctcgggacaaggtgaccgaaaataaaagatgtctgaggtccgccagacagaacgagtcctctcagcctaaggtcgccgaggagtccggggggcaaaagtcagccaaggtcctcatgcagaaccagaagggaaagggggaagcgggtaattcagatagtatgtgtcttaggtcacgcaagactaaatcacagcctgctgcaagcacactggaaagcaaaagtgtgcagcgtgtcacacgctctgttaaacgctgcgctgagaatccaaagaaggcagaagacaatgtgtgtgtcaaaaaaatccgaactaggagccacagagacagcgaggacatctag

SEQ ID NO: 22819 - DNA, 141 bp, synthetic construct
  misc_feature 1..141: note = Description of Artificial Sequence: Synthetic coding sequence
  source 1..141: mol_type = other DNA
atgtggcccacccggcggctggtgaccatcaagcggagcggcgtggacggccctcatttccctctgtctctgagtacttgcctgttcggccggcgcaagtgtgtacttcagtgcaccgagtgcagtaaaacagctatctag

SEQ ID NO: 22820 - DNA, 1557 bp, synthetic construct
  misc_feature 1..1557: note = Description of Artificial Sequence: Synthetic coding sequence
  source 1..1557: mol_type = other DNA
atgctgcgggtggtgagctggaacatcaacggcatccggcggcccctccagggcgtagccaaccaggagcccagcaactgtgctgctgtcgccgttgggaggatcctggatgaactggatgctgatatcgtgtgcctgcaggagacgaaggttactcgcgacgcactcaccgaaccacttgccatcgtagaagggtacaatagctacttttcattctctcgtaaccgcagtggctactcaggtgtcgccaccttctgcaaggataatgccaccccagtcgccgcggaggaagggttaagcggactgtttgctacacagaatggcgatgtaggttgctacggtaatatggacgaatttacacaagaagagctccgcgcactggattccgaaggccgggctctcttgactcaacacaagataagaacatgggagggcaaggaaaaaaccctgacgctcattaacgtgtactgtccacatgcagatccgggccgcccggagaggctcgtcttcaaaatgcggttttacaggctgcttcagatacgtgccgaggccctacttgcggctggttcacacgtcatcattctgggagacctcaatacggcccatagacctatagaccactgggatgccgtcaacctggagtgttttgaggaggacccaggaagaaagtggatggactccctgctgtccaacctcggatgccaaagcgctagccatgtgggaccattcattgacagctacagatgtttccagccaaagcaagagggggcctttacatgctggtccgcagtaaccggggcacgccacctgaattatgggtctcgcctggactatgtccttggagacagaactctggttatcgacacttttcaggcctctttcctgcttccagaggttatgggctccgaccactgcccagttggcgcagtactgtcggtgagctctgtgcccgccaagcaatgtcctccactctgcacaagatttctgccagagtttgccggcacccaacttaagattctccgtttccttgttccgctcgaacagtcccctgtgctggagcagtctactctgcagcataataaccagacccgggtgcagacttgccagaacaaagcacaggttcgaagtacgcggccacaacccagccaggtcggctccagccgggggcagaagaacttgaagagttactttcagccgagcccctcatgcccacaagccagtccggacatcgaacttcctagcctcccgttaatgtctgcgctgatgacgcccaaaacccccgaggagaaagccgtggccaaggtggtgaaggggcaggccaaaactagcgaagccaaagacgaaaaagaattgcggacatcattttggaaatcagtcttagccggtccccttaggacacctctttgcgggggtcatcgcgaaccatgcgtaatgcgcaccgttaagaagcccgggccgaaccttggacgcagattctacatgtgtgctcgacctcgcggcccccctaccgatcctagttcgcggtgtaattttttcctgtggtcacggccttcgtag

SEQ ID NO: 22821 - DNA, 1191 bp, synthetic construct
  misc_feature 1..1191: note = Description of Artificial Sequence: Synthetic coding sequence
  source 1..1191: mol_type = other DNA
atgccccgggtgaaggccgcccaggccggccggcagagcagcgccaaacgacatttggcggagcaatttgctgtgggggaaattatcaccgacatggcaaagaaagaatggaaggttggactgcccatcgggcagggggggttcgggtgtatttacctggccgacatgaattcctcagagtccgtcggttccgacgccccttgcgtggtgaaggtcgagcccagcgacaatggaccactgtttacagaacttaagttctaccagcgcgcagcaaagcctgagcagatccagaagtggattagaacaaggaaactgaagtacctgggcgtgccaaagtattgggggtcaggcctgcatgacaaaaacggtaaatcctaccggtttatgatcatggatcgcttcgggtcggatctgcagaaaatttacgaagcaaacgcgaagcgctttagccgaaagaccgtgctgcaactgagtctgaggattttagatatcctcgaatacattcatgagcacgagtacgtacacggcgacatcaaagccagcaacctgctcttgaactacaagaaccctgaccaagtatacctcgtggactacgggcttgcttacagatactgtccagagggcgtgcataaagagtacaaagaagacccaaagcgttgccacgacgggaccatcgaattcacatccatcgacgctcacaacggagtggccccttcgcggcgtggcgacttagagattctggggtattgcatgatccagtggctgaccggtcacttgccttgggaggacaaccttaaagacccgaaatacgtgcgggacagtaagatccggtaccgggaaaacattgccagccttatggacaagtgcttcccagagaagaacaaacctggcgaaatcgcaaaatacatggaaacagtgaagctgctggactataccgagaaacctctctatgagaaccttcgcgacatactgctgcaaggcttaaaggcaataggcagcaaggatgatggcaaactagacttgtccgtggtagaaaatggaggcctcaaagccaagactattacaaagaaaagaaagaaagaaatcgaagagtcaaaggagcctggggtagaggacacagagtggtcaaacacgcagaccgaagaggcaatccaaacccgcagccgaaccagaaaacgggtgcagaagtag

SEQ ID NO: 22822 - DNA, 957 bp, synthetic construct
  misc_feature 1..957: note = Description of Artificial Sequence: Synthetic coding sequence
  source 1..957: mol_type = other DNA
atgcccaagcggggcaagaagggcgccgtggccgaggacggcgacgagctccgcactgaacccgaagcaaaaaaaagcaagacggccgctaagaagaacgataaagaagccgccggagagggtcccgcactctacgaggatccgccagaccagaaaacgtctccttccgggaagccagctaccctgaaaatttgttcgtggaatgttgacggcctccgcgcctggatcaagaagaagggcctggattgggttaaggaagaggctcctgacatcctctgtctccaggaaacgaaatgctcagagaataaactccctgccgaattgcaggagctcccaggtttatctcaccagtactggtctgccccttccgacaaggaagggtattctggggttgggctgctctcccggcaatgccctctgaaagtttcttatggtattggagatgaagagcatgaccaggagggccgggtcattgtggccgaattcgactccttcgtacttgtgacagcttacgtgcctaacgccggccgcggcctggttcgacttgagtacaggcagagatgggacgaggctttcaggaagttcttgaaaggactggcctcgcgtaaaccactggtattgtgtggcgatctgaatgtagctcatgaggaaattgatctccgaaatcctaagggcaataagaaaaacgccggatttaccccccaggaaagacaagggttcggagagctcctgcaggctgtacctctggcggactcgttcagacacctctatcccaataccccatacgcgtatacgttctggacgtatatgatgaatgctagatctaaaaatgtggggtggagacttgactattttctcctcagccacagcctattgcccgccctgtgtgactcgaagatccgcagcaaggccttggggtcggaccactgtcctattactctgtacctggctctttag

SEQ ID NO: 22823 - DNA, 792 bp, synthetic construct
  misc_feature 1..792: note = Description of Artificial Sequence: Synthetic coding sequence
  source 1..792: mol_type = other DNA
atgcccaagcggggcaagaagggcgccgtggccgaggacggcgacgagttgcgcaccgagccggaggctaagaagagtaaaaccgctgcaaagaagaatgacaaggaggccgcaggggagggccctgccttatatgaggacccccccgaccagaagaccagcccttctggaaaacctgctacactgaagatttgctcatggaacgtagacggccttcgggcatggattaaaaagaagggactagattgggtgaaggaggaggcccctgatatcctgtgtttgcaggagacgaaatgcagcgagaataagctaccagctgagctccaggaactgccgggcctatcacatcaatattggtccgcgccttcggataaggaggggtacagcggcgtcggcctcttgtctagacaatgcccgcttaaggtctcatacgggatcggggacgaggaacacgatcaagagggacgggtgattgtagcggagttcgatagctttgtcctggtgacagcctatgttccaaatgccggcaggggactggtgcgactggagtatcgccaacggtgggatgaggccttccgaaagtttctcaaaggtttggccagtcgcaagcctttagttctctgtggcgatttaaatgtggctcatgaggagattgatctgagaaaccccaagggaaataagaaaaacgccggtttcacaccacaggagcgacagggcttcggggagctcctccaggctgtgcccttggccgactccttccgacacttatacccaaatacgccttacgcctag

SEQ ID NO: 22824 - DNA, 957 bp, synthetic construct
  misc_feature 1..957: note = Description of Artificial Sequence: Synthetic coding sequence
  source 1..957: mol_type = other DNA
atgcccaagcggggcaagaagggcgccgtggccgaggacggcgacgagctgaggactgaacctgaggctaagaaatctaaaaccgccgccaagaaaaatgacaaagaggccgccggggaaggaccagcactgtacgaggacccacctgatcaaaaaacttcaccgagtggtaagccagccaccctgaagatctgctcttggaacgtggatgggctgcgagcgtggatcaaaaaaaaggggctggattgggtcaaggaggaagcacctgatatcctttgcttgcaagagaccaaatgcagtgagaataagctgccagccgagttgcaggagctgcctggcctgtcgcatcagtactggtctgcaccatctgacaaggaaggttattctggtgtgggcttactgagcaggcaatgccctttgaaagtgagttatggtatcggcgatgaggagcacgaccaggaggggagagtgattgtggccgaattcgacagttttgtcttggtgaccgcttacgtgccaaacgcgggaagggggttggtgcgtttggaatatcgccagagatgggatgaagcgttccggaagtttctgaaggggctcgcttcaagaaagcccttggtgctgtgcggtgacctaaacgttgcacacgaagaaattgatctgcgcaaccccaagggcaacaagaaaaacgctgggtttacaccgcaggaaaggcagggtttcggtgagctcctgcaggctgtaccgctcgctgattcctttaggcacctgtatcctaatacaccttacgcttacacgttctggacctacatgatgaatgctcgctccaaaaacgtcggctggagattggattatttcttgctgtcccacagtcttcttcccgcactgtgcgatagtaagatcagaagcaaggccctgggcagcgatcactgcccaataaccctgtacctcgctctttag

SEQ ID NO: 22825 - DNA, 525 bp, synthetic construct
  misc_feature 1..525: note = Description of Artificial Sequence: Synthetic coding sequence
  source 1..525: mol_type = other DNA
atgcccaagcggggcaagaagggcgccgtggccgaggacggcgacgagctgcgcactgagcctgaagccaagaagagcaagacggccgcgaaaaagaacgataaggaggccgcaggcgaaggaccagctctctatgaggatccccctgatcaaaaaacctcaccttcaggaaaacctgccactctgaaaatttgctcctggaacgtcgatgggcttagagcctggataaagaagaagggactcgactgggtgaaagaggaggccccagacatcctgtgtctgcaagagacaaaatgcagcgaaaacaaattgcctgccgaattgcaagaactgcccggcctgtctcaccagtactggtctgccccatcggataaggagggctactccggtgtagggctgctgagtcgtcagtgccctctgaaggtgtcttacgggattggcgacgaagagcacgaccaggaagggagggtgatcgtcgccgaatttgattcctttgtactggttaccgcctatgtacccaactag

SEQ ID NO: 22826 - DNA, 327 bp, synthetic construct
  misc_feature 1..327: note = Description of Artificial Sequence: Synthetic coding sequence
  source 1..327: mol_type = other DNA
atgcccaagcggggcaagaagggcgccgtggccgaggacggcgacgagctccgaacagagccagaagccaagaagagtaaaaccgctgccaaaaagaatgataaagaagctgcgggcgagggtccagctctgtatgaagacccaccggatcaaaagaccagcccaagcggcaaacctgcaacactgaaaatttgtagctggaacgtggacggcttgcgcgcatggatcaaaaagaaaggcctggactgggtaaaggaggaagcccctgacattttgtgtctgcaggaaacaaaatgttccgagaacaagttaccagctgaactgtag

SEQ ID NO: 22827 - DNA, 441 bp, synthetic construct
  misc_feature 1..441: note = Description of Artificial Sequence: Synthetic coding sequence
  source 1..441: mol_type = other DNA
atgcccaagcggggcaagaagggcgccgtggccgaggacggcgacgaactacgaactgagcccgaggccaaaaagagcaaaaccgccgctaaaaaaaacgataaagaggcggccggggaagggcccgcgctttacgaggatccaccggatcagaaaacatctcctagcgggaagccagccaccctgaagatctgctcttggaacgtggacggcctacgggcgtggattaagaagaagggcctggattgggttaaagaggaagctcccgacatcctgtgtctccaggaaacaaagtgcagtgagaacaaactcccggccgaattgcaggaactgcctggcctctcgcaccagtattggagtgcccccagcgacaaagaggggtactctggcgttggcctcttaagccggcagtgtcccctgaaagttagctacggaatttag

SEQ ID NO: 22828 - DNA, 975 bp, synthetic construct
  misc_feature 1..975: note = Description of Artificial Sequence: Synthetic coding sequence
  source 1..975: mol_type = other DNA
atgttccggtgcggcggcctggccgccggcgccctgaagcagaagctggtccctcttgtgcgcaccgtatgcgtgaggagcccaaggcagcgcaatcggctccctgggaacttatttcaacggtggcatgttccgctagaactgcaaatgacccgacagatggcttcttccggggcaagtggtggcaaaatagataactctgtgttggtcctgatcgtcggactgagcaccgttggcgccggggcctacgcatacaagaccatgaaggaggatgagaagagatataacgaaaggatcagcggtctgggactgacacccgagcaaaaacagaagaaggccgccctgtccgcctctgaaggggaagaggtaccccaagacaaagctccatcccatgtaccctttctgctcatcggagggggaacagccgcctttgcagccgcaagaagcattcgtgctagagaccccggtgctagagtgctcatagtctctgaggaccccgagctgccctacatgcgcccccccctctccaaagagttgtggtttagcgacgaccccaatgtcacgaagaccctgcggttcaagcagtggaatgggaaggaaaggtctatttattttcagccaccgagcttctacgtttccgctcaagatcttccacatattgagaacggcggggttgctgttctgaccggaaaaaaggtcgttcagctggatgtgagagataatatggttaagcttaatgatggttcccagatcacctatgaaaagtgcctgattgcaacaggcggtacccccaggtcattaagcgccatcgatagagcaggcgccgaggttaaatctaggactactctgtttcgcaagattggtgacttcagaagtctggaaaaaatcagcagggaggtgaagtcaatcactatcatcgggggagggttcctggggtctgaactcgcatgtgcactggggagaaaagacatttag

SEQ ID NO: 22829 - DNA, 1842 bp, synthetic construct
  misc_feature 1..1842: note = Description of Artificial Sequence: Synthetic coding sequence
  source 1..1842: mol_type = other DNA
atgttccggtgcggcggcctggccgccggcgccctgaagcagaagctggtgcccttagtgcggaccgtgtgtgtaaggagcccacgccagagaaaccgtctgccaggcaatctgtttcagcgttggcatgtgccactggaactacaaatgacacggcaaatggccagcagcggcgcctcaggtgggaaaattgacaactcagtcctggtgctgatagtgggattgagtacagtcggggcaggcgcctacgcgtacaaaactatgaaagaagatgagaagcgctacaatgagaggatttcggggctaggcttgaccccagagcaaaagcagaaaaaggcagccctgagtgcttctgagggggaggaagtgccccaggacaaggccccttcccacgtccccttcctcctgataggcggcggcacagcagcattcgcagcagctcgcagcatccgggctcgagatcctggggcgagggttctcattgtgtccgaggatccggagctaccttacatgagaccacccctgagcaaggaactttggttctctgacgatcccaatgtgaccaagactctgaggttcaagcagtggaatgggaaagaacgttccatatactttcagcctccctccttctatgtttcagctcaggatcttccgcatatagagaacgggggggttgccgtgctgactggtaagaaagtagtgcagctcgacgtcagggataacatggtaaagttaaatgacggttctcagattacatatgagaaatgtctcatagcaaccggcggcaccccccgttcccttagcgcaatcgaccgggctggagctgaggtgaagtcgcgtaccacgttatttaggaagattggggattttcggagtctggaaaaaatttcacgagaagtgaagtctatcaccatcattggcgggggcttcctgggatccgaactggcctgtgcgctgggtaggaaagcacgcgccctgggcaccgaagtgatccagctttttcccgaaaaggggaatatgggcaagattttgcccgagtatctgtctaattggaccatggagaaggtccggagagaaggggtaaaggttatgcccaacgcaattgttcagagtgtgggagtttcctctggtaaactgctaataaaactcaaagatgggagaaaggtcgagacggatcacattgtggcggccgtgggactcgagcccaatgtggagctcgccaagactggcggactggaaattgactctgatttcggcggcttcagggtgaacgctgaactgcaggcacggtctaatatttgggtggcgggggacgccgcgtgtttctacgatatcaaactgggccggcgccgggtcgaacatcacgaccacgctgttgtgtctggccggctcgccggcgagaacatgacaggagctgccaagccttactggcaccagtctatgttctggtccgacttgggtccggatgtagggtatgaggctatcggtctggttgatagcagcttacccaccgtcggggtgttcgccaaagcgacggcccaggacaaccctaaatctgcaactgagcagtccggaaccggcattagatctgagtcagagacagagtctgaagcttcggaaatcaccatcccgccatctaccccggccgttcctcaggccccggttcagggcgaagattacggaaagggtgtaatcttttatctccgggataaagttgtggtgggtatcgtgctgtggaatattttcaatcgcatgccgatcgccagaaagatcataaaggacggggaacagcatgaagacctgaacgaagtggcaaagctattcaacatacatgaggactag

SEQ ID NO: 22830 - DNA, 1830 bp, synthetic construct
  misc_feature 1..1830: note = Description of Artificial Sequence: Synthetic coding sequence
  source 1..1830: mol_type = other DNA
atgttccggtgcggcggcctggccgccggcgccctgaagcagaagctggttcctttggtgaggaccgtttgtgttaggagccctagacagcgcaatcgcctgcctgtggtacagtcccatcacttaggctctcctagcaggtcactcgctagcaccggggcatctggtaaggatgggtcaaacctggtgtacttcctgatcgtaggcgctactgtgacgggcgccggcgtgtattacgcatataagactatgaaagaagatgaaaaacgttataacgagcgtatctctggcctcggactgaccccggagcaaaaacagaagaaggcagcacttagcgctagcgaaggggaggaagttcctcaggacaaagccccatcacatgtcccattccttctgataggcggaggcacagccgcctttgcagctgcccgctccatccgggctcgtgacccaggcgccagggtcctaattgtcagtgaggatcctgagctcccctatatgcgcccgcccttgtctaaagaactgtggttcagcgatgacccaaacgtgaccaaaacactgcgcttcaaacaatggaatggaaaggaacggtccatttacttccaacccccaagcttctatgtgtctgcccaggatcttcctcatatcgagaacggcggagtggctgtcttaaccggcaaaaaagtggtacaacttgacgtgcgcgacaacatggtcaaattgaatgacggatctcagataacctacgagaagtgcctcatagctacaggtgggactcctcggtctttgagtgctatcgacagagctggcgcagaggtcaagagtcgaacaacactctttcggaagatcggggatttccgaagtcttgaaaagatctcccgggaagttaagtctataacgatcattggcggaggcttcctggggagtgagcttgcctgtgcgctcggtcgaaaagcccgagctctgggcaccgaggtaatccaacttttccccgagaaaggtaacatgggcaagatcctgcctgagtacctgtcaaattggacaatggaaaaagtgcgcagagagggcgtcaaagttatgcctaatgcaattgtacagagcgtcggagtcagctctggaaagctgcttattaagctgaaggatggccggaaggtggaaacggaccatatcgtggctgccgtgggtttggagcctaatgtggaactcgctaagacgggcggattggaaatcgattccgactttggggggtttagggttaatgccgagctgcaggcgagatccaatatatgggtggccggcgatgctgcctgcttctatgacatcaagctcggtagaagacgagttgagcatcacgaccacgccgtcgtgtcaggccgactggctggtgagaacatgacaggcgccgcaaagccatactggcaccagtccatgttttggtccgatttgggaccagacgtgggctatgaggcaattgggcttgttgactcatctctgccaacagttggggtgttcgccaaggctacagctcaggacaatcccaaatctgccacggagcaaagtggtacgggaattaggagtgaatccgagactgagtcggaggcctcagaaataactatcccaccgtccacgccagccgtgcctcaagcacccgtgcagggggaggactatggcaagggagtcattttctatctgagagataaggtcgtcgtgggtatcgtcctgtggaatattttcaaccgaatgccaatcgctcgcaagataattaaggacggcgaacagcacgaggatctgaacgaggtcgcaaaactgtttaatattcacgaggactag

SEQ ID NO: 22831 - DNA, 981 bp, synthetic construct
  misc_feature 1..981: note = Description of Artificial Sequence: Synthetic coding sequence
  source 1..981: mol_type = other DNA
atgttccggtgcggcggcctggccgccggcgccctgaagcagaagctcgtgcctttagtccggactgtttgtgtgcgatccccccgccagcgtaacaggctaccggcacgcgctcttggaaccgaagtgatccaactcttcccggagaaaggcaacatgggtaagatacttcctgagtatctttctaattggactatggagaaggtgcgaagggagggagttaaagttatgccgaatgccattgtacagagtgtgggggtttcctccggaaagctcctgatcaaactgaaagatggacgcaaggttgagaccgatcacatagtggcagcggttgggttagaacccaacgtggaactggcgaaaacaggagggctggagatcgactctgactttggaggtttcagagtgaacgctgagcttcaggcccgttcgaacatatgggtggccggagatgcagcctgtttctacgatattaaacttggacggcgaagggtggagcatcacgaccacgccgtggtatccggtcgcctagctggagagaacatgacgggagccgctaaaccctactggcaccagagcatgttctggagcgacttggggccagacgttggctacgaggcaattgggttggtggatagctctctccccaccgtgggagtgtttgctaaggccactgcccaggacaaccccaagtctgcaaccgaacagagcggcacagggatacggtccgaatcagagactgagagcgaggcctctgagattacaatacccccctccactcctgccgtcccacaagcacccgtacagggcgaagattacgggaaaggtgtaatcttttacctgcgcgataaggtggtagttggaatcgtgttgtggaacatattcaatcgtatgccgattgctcggaaaatcatcaaagatggagagcagcacgaggatctaaacgaagtggccaagttgttcaatatccacgaagactag

SEQ ID NO: 22832 - DNA, 786 bp, synthetic construct
  misc_feature 1..786: note = Description of Artificial Sequence: Synthetic coding sequence
  source 1..786: mol_type = other DNA
atggagaaggtgcggcgggagggcgtgaaggtgatgcccaacgccatcgtacagtcagtcggagtctcatccggtaagttgctcattaagttgaaggatggtagaaaagttgagaccgaccatatcgtggcggccgtgggacttgagccaaacgtcgagctcgcgaagaccggcggtctggagattgacagcgattttggcgggttccgcgttaacgccgagctccaggctcggtctaatatatgggtggctggcgatgccgcctgcttctacgacataaagctcggcagaagaagagtcgagcaccatgatcacgcggtggtgtctggacgccttgccggggagaacatgactggcgccgccaaaccctattggcaccagtcaatgttttggtctgaccttgggcccgacgtcgggtatgaagctattggtcttgtggatagttctttacccaccgttggcgtttttgctaaagcaactgcccaggataatcccaaatcagccacagagcagtccggtaccggaatccgatctgaaagcgagactgagtcggaggcttcggagattacaattccgcccagtactcctgcagtgccacaagctcccgttcaaggggaagattatggcaaaggagttatattctacctccgtgacaaagttgttgttggaatcgtcttatggaacatcttcaacagaatgcccattgctagaaaaattatcaaagatggagagcagcacgaagacctgaacgaagtggccaagctctttaacatccacgaagactag

SEQ ID NO: 22833 - DNA, 825 bp, synthetic construct
  misc_feature 1..825: note = Description of Artificial Sequence: Synthetic coding sequence
  source 1..825: mol_type = other DNA
atgggcaagatcctgcccgagtacctgagcaactggaccatggagaaagtgaggagagagggggtcaaagtcatgcccaatgcgatcgtacaatccgtcggagtgtcctcgggaaagttgctaatcaaactgaaggacggacgtaaagtggaaaccgatcatatcgtcgctgcggtgggtcttgagcccaacgtggaactcgctaagactggcgggctggaaattgacagcgatttcggaggctttagagtgaacgccgagctgcaggcaaggagcaatatttgggtcgccggcgacgctgcttgtttttatgacatcaagctgggacgaagacgtgtagaacatcatgaccacgccgttgtgtcaggaagattagctggcgaaaacatgacaggcgctgccaagccctactggcatcaatctatgttctggagtgacctcggccccgatgtcggttatgaagcgattggtctcgtggactctagcttacccaccgtgggggtcttcgcaaaagccaccgcccaggacaaccccaaatctgcgaccgaacagtctgggaccggaattagaagtgaatccgagacggaaagtgaggcgagtgaaatcactattccaccatccactcctgccgtgcctcaggcaccggtgcagggagaggactatggcaaaggcgtcatcttttacttacgggacaaggtagtcgtgggtattgtgctgtggaatatcttcaacaggatgccaattgctcgaaagatcattaaggacggtgaacagcatgaagatctcaacgaggtagctaagctgttcaacattcatgaagactag

SEQ ID NO: 22834 - DNA, 714 bp, synthetic construct
  misc_feature 1..714: note = Description of Artificial Sequence: Synthetic coding sequence
  source 1..714: mol_type = other DNA
atgaaggaggacgagaagcggtacaacgagcggatcagcggcctggggctgacaccagagcagaaacaaaagaaggccgccctgagtgcatccgagggagaggaggtgccccaggacaaggctcccagccacgtcccttttctgctgattgggggcgggacagctgccttcgcagccgccagaagcattcgagctagggaccctggcgcacgagttctgatcgtgagcgaggatcccgagctaccttacatgagaccgccgttgtccaaggaactatggttcagtgacgaccccaacgtgaccaagactctgcgctttaaacaatggaacggaaaagagcgtagcatctatttccagccacccagtttttacgtgtccgctcaagaccttccgcatattgaaaacggcggcgtagctgtgctcaccgggaaaaaggttgtgcaacttgatgtgcgcgataacatggtgaagctgaacgacggatcgcagattacctacgaaaaatgcttgattgccacgggtggaactcctaggagcctgagtgcaatcgaccgcgccggagccgaggtgaagtcccgaaccaccctatttcgcaaaataggggacttccggagcctcgaaaaaatctcccgcgaggtaaagtcaatcaccataataggcgggggattcttaggcagcgaattggcatgtgctctggggcggaaagatatttag

SEQ ID NO: 22835 - DNA, 1017 bp, synthetic construct
  misc_feature 1..1017: note = Description of Artificial Sequence: Synthetic coding sequence
  source 1..1017: mol_type = other DNA
atggacgccaaggcccggaactgcctgctgcagcaccgggaggccctggaaaaagacataaagacatcctacatcatggatcacatgatcagcgacggctttctgacaatctcggaggaggagaaggtgcggaatgagcctacccaacagcagagagctgccatgctgatcaaaatgatcctaaaaaaagacaacgatagctacgtttcattttataatgcactgctgcacgaagggtacaaagatctagccgccctccttcatgacggcattcccgtggtttcgagttcatccggtaaggatagcgtcagcggaataactagttacgtaaggacagtcctctgtgaggggggtgtccctcagaggcctgttgtgtttgtgaccaggaagaaactggtgaatgctatccagcaaaagctcagcaagttgaagggcgagcctggatgggtgacaattcacgggatggccggttgtggcaagagcgttttggccgccgaggccgtcagagatcactctctcctggaagggtgtttccctggcggagtgcattgggtcagcgtcgggaaacaggataagtcagggttgctcatgaagctgcagaatctttgcactcggctggatcaggacgagagtttcagccagaggctgcccctcaatatcgaggaagctaaagatcgactgcggattttgatgctgcggaaacaccccaggagtctgcttattctcgacgacgtttgggactcctgggtactgaaggcctttgacagccaatgtcagattctgctgacaactagagacaagtccgttacagactccgtcatgggaccgaagtacgtggtacccgtggagagcagcctggggaaggaaaaaggcctggaaattttatcactgtttgtcaacatgaagaaggcggatctcccggaacaggcccactccatcatcaaggagtgtaaagtggtagaacgctgccattggggtatacttacggacctgcttcataagtggaaccagagttag

SEQ ID NO: 22836 - DNA, 3492 bp, synthetic construct
  misc_feature 1..3492: note = Description of Artificial Sequence: Synthetic coding sequence
  source 1..3492: mol_type = other DNA
atggacgccaaggcccggaactgcctgctgcagcaccgggaggcccttgagaaggatatcaagacttcttatattatggaccatatgatcagcgacggctttctcacaatatctgaggaagagaaggtccgcaacgaacctacccagcaacagcgagccgctatgttgattaagatgattctgaagaaggacaacgattcctacgtgagcttctacaatgccttacttcacgagggatacaaagatctagctgctctgctacatgatggcatccccgtagtgagctctagctccgggaaggacagcgtctctggcataacttcttatgttcgaactgtcctttgcgagggtggggtacctcaacgcccagttgtctttgtaacacgcaagaagctcgtgaatgctatccagcagaagctgtccaagctgaagggagagcctggctgggttaccattcacgggatggctggctgtggtaagtcagtcctcgctgccgaagccgtgcgggaccactctttacttgagggctgtttcccgggaggcgttcactgggtgtctgtgggaaagcaggataagtccgggcttcttatgaagctgcagaacctgtgtactcgcctagatcaggacgaatccttctcacagcggctgcccctgaacattgaagaagctaaagaccggctcaggatcttgatgctgcgcaaacacccccggagtctgttgattcttgacgatgtgtgggatagctgggtgctaaaggcctttgactcccaatgtcagatcttgctaacaacacgcgacaagtctgtcactgatagcgtgatgggccctaaatacgtggtgcctgtggagagctcccttgggaaggagaaaggattggaaatactgtcccttttcgtgaatatgaaaaaggccgatctgcctgagcaagcacatagcatcataaaggagtgcaagggctctccacttgtagtgagcctaatcggagccctccttagagattttcccaatagatgggaatactacctgaaacagctgcaaaacaagcagttcaaaaggattcggaagagcagctcctatgattatgaggcactggatgaggcgatgagtatctccgtggagatgctccgagaggacatcaaggactactacacagatctttccatcctccagaaggacgtgaaggtcccaaccaaggttctctgtattctgtgggacatggagacggaagaagtggaggacattcttcaggagtttgtgaataaatcattacttttttgtgaccggaatggcaaatctttccgctactaccttcatgacctccaagtggattttctgactgaaaagaactgctcacagctgcaagatctacataagaagatcatcactcagttccaacgataccaccagccacatacgctgtccccggaccaggaggactgtatgtattggtataactttctcgcttaccacatggcgagcgccaagatgcacaaagagttgtgtgctttaatgttctccctcgactggattaaggctaagaccgaactagttggcccagcacatttgattcacgagttcgtggagtaccgtcacatcctcgatgagaaagactgtgccgtgtccgaaaatttccaggagtttctcagcttgaacgggcacctccttggaagacaacccttccccaacatcgtccagctgggcctgtgtgaaccagagacctccgaagtgtaccagcaagccaagcttcaagcgaagcaggaagtggacaatgggatgctttatttagagtggattaacaaaaagaacatcacaaatctctccagactagtggtgcgaccgcacaccgacgctgtgtaccatgcatgcttttcagaagatggccagcgtattgccagctgcggcgctgataagacactgcaagtgttcaaagccgagactggtgagaaactcttagagattaaggcccacgaagatgaggtgctgtgttgcgccttctctacagatgatcgatttatcgcgacatgttctgtggataagaaggtgaagatctggaactcaatgaccggtgagctggttcacacgtacgatgaacactccgaacaggtgaattgctgccactttactaattcaagccaccaccttctgctggccaccggctcgagtgactgcttccttaaattatgggacctcaatcagaaggagtgtaggaataccatgttcggtcacactaactccgttaaccattgcaggttcagcccagatgacaagcttctggcgtcttgttctgcggacggcacgctgaaactgtgggatgcaacatcagcaaatgagcgcaaaagcataaatgttaagcaattttttttaaacttggaagatccccaggaggatatggaagtgatcgtcaagtgttgcagctggagcgcagatggcgccagaattatggtggcagctaaaaacaaaatttttctgtggaacactgactccaggtcaaaagtcgctgactgcaggggccacctttcctgggtgcacggggtaatgttctctcctgacggatccagttttctgacatcctcagacgatcagactatccggttatgggaaaccaaaaaagtgtgtaagaatagcgcagttatgttgaagcaggaggtggacgtagttttccaggaaaacgaggtgatggtgctggctgtggatcacatccgcaggctgcagcttataaacgggaggaccggccagatcgattatctaacagaggcgcaagtatcctgttgttgtttatcaccacacctgcagtacatcgcgtttggtgacgagaatggagctatcgaaatattggagctggttaacaaccgcatctttcagagccgattccagcataaaaaaactgtctggcacattcagtttaccgccgacgagaaaacactgatatcttctagtgatgacgccgagatccaggtgtggaactggcagctcgataagtgtatctttctgaggggacatcaggaaactgtgaaggattttagattgctgaaaaacagtcgcctgctgagttggagtttcgatggcaccgtgaaggtgtggaacattattacgggcaataaggagaaggattttgtttgccatcagggcaccgtactcagctgcgacataagccatgatgccaccaaattctcttcgacttcggcagataagaccgctaagatctggaacgtgtccaacggagaacttcttcacctgtgcgctccacttagcgaagaaggtgccgcgacacacggggggtgggtgactgatctgtgttttagccctgatggcaagatgctgattagcgcaggtggctacattaagtggtggaacgtcgtcacaggggagagctctcagactttttacacaaatgggacaaatctgaagaagatccatgtttcccctgactttaagacttatgtgactgtggataatctggggattttgtatatccttcagacactggagtag

SEQ ID NO: 22837 - DNA, 3618 bp, synthetic construct
  misc_feature 1..3618: note = Description of Artificial Sequence: Synthetic coding sequence
  source 1..3618: mol_type = other DNA
atggacgccaaggcccggaactgcctgctgcagcaccgggaggccctcgaaaaagacatcaagacgagctatattatggatcatatgatttcagacgggtttctgactatctcagaagaggagaaggttagaaacgagcccacccagcaacagcgcgcagccatgctgatcaagatgattcttaagaaggacaatgactcttatgttagcttttataacgcacttctgcacgaaggctacaaagaccttgcagccctgttgcacgatggtattcccgttgtttcaagctccagtggcaaagattccgtttctggaatcaccagctatgtgagaaccgttctctgtgaggggggtgtcccacaacgccctgttgtctttgttactaggaaaaagctcgtgaatgccatccagcagaagctgtctaaactgaagggtgagccaggatgggtgactatccacggcatggcaggctgtggcaagagtgttctcgccgctgaggctgtcagagatcactcactcctagaaggctgctttcccggaggtgttcactgggtgtcagtgggaaaacaggacaagtcggggctgcttatgaagcttcagaacctctgcacccggctggaccaggatgagtcattttctcagagattgccactgaacatcgaagaggcgaaggatcgcctgcggatcctcatgctccggaagcatcctcgatcgctgctgatcttagatgatgtgtgggacagttgggtgttaaaggcctttgattctcaatgtcagattctccttacaacaagagacaagtctgtcaccgactccgtgatgggaccaaaatatgtggtccccgtggaatcctcactggggaaggagaagggcttggagatcctgagcttattcgtgaatatgaaaaaggccgatctgcctgagcaggcgcattcaattattaaggagtgcaaagggagccccctggtcgtatcactgattggcgcccttctgagagacttccctaatagatgggagtattatcttaaacagcttcagaataagcaatttaaacgtatccggaagtctagctcatacgactatgaagcattagacgaggccatgagcatttccgtggagatgctacgagaggatataaaagactactatacagacttgagcatcctgcagaaggacgtgaaggtgcctaccaaggttctctgtattctgtgggacatggaaaccgaggaggtcgaagatatcctgcaggaattcgtgaataagtctctcctcttttgtgatcgcaacggaaagtcttttagatactatctgcacgatttacaagtcgacttcctgacagagaagaactgctcacagttgcaagacctgcacaaaaagatcatcacacagttccaacgctatcatcagcctcacactttaagtccagatcaggaggattgcatgtactggtacaatttcctagcataccatatggctagtgccaaaatgcataaagagctgtgcgcattaatgtttagcttagattggataaaggccaaaaccgagctggtaggacccgctcatttgattcatgaattcgtcgagtacagacatatcctggacgaaaaagattgtgcggtgagtgaaaactttcaggaattcctgagcctcaatggccatctccttgggagacagccttttccaaatatcgttcagctgggtctctgcgagcccgagacctcagaggtatatcagcaggcgaagctacaggcaaagcaggaggtcgacaatggaatgctgtatttggaatggattaacaagaaaaatatcactaatctgtcacgtctggtagtcagaccccacaccgatgccgtttaccacgcatgctttagcgaggacggtcagaggatcgccagctgtggggccgataagacactgcaagtattcaaagctgaaactggcgagaagctactcgaaattaaggcacacgaggacgaagtcttgtgctgcgccttttccactgatgataggttcatagctacctgctccgtagacaaaaaggtcaaaatctggaattcaatgaccggagaactcgtgcacacatacgacgaacacagtgaacaggtgaactgttgccactttaccaattcgagccaccacctgctgctggcaaccggaagctcagactgctttttgaagttatgggatctgaaccagaaagaatgccgcaacacaatgttcggacacactaatagcgtgaaccattgccggttttcaccagatgataagcttctggccagctgctctgctgacggcactctaaagctgtgggatgccacttctgccaacgaaagaaagtcgataaacgtcaaacaattctttctgaatttggaggacccccaggaggatatggaggtgatcgttaagtgctgttcttggtccgcagacggcgcaaggataatggtcgcagcaaagaataagatcttcctatggaatactgatagccggtcaaaagtggctgactgccgggggcatctgagttgggtgcatggtgtcatgttctcccccgatggatctagcttcttgaccagctcagacgatcaaacaatcaggctgtgggagactaagaaagtgtgcaaaaattccgctgtgatgctcaaacaagaagtggacgtagttttccaagaaaacgaagtcatggtccttgccgttgatcacatacgccgccttcagcttataaacgggaggaccggccagatcgattatttaacggaggcgcaggttagctgttgttgtttgtctccccatctgcagtacatcgcttttggcgatgagaatggcgctatcgaaatcctggaacttgtgaataacaggatctttcagagtcgcttccaacacaagaaaacagtttggcatatccagttcacggccgacgagaaaacactgatatcatccagcgacgacgccgaaatccaggtctggaactggcagctcgacaagtgtatttttttgcggggacatcaagaaactgtcaaagattttaggctcctgaagaatagcagattgctgtcttggtcattcgatggaaccgtaaaagtatggaacatcatcaccggaaataaggaaaaggactttgtatgtcatcaaggcacggtcctttcttgcgatatatctcatgatgccactaagttctcttctacgtcagccgacaaaaccgcaaagatctggtcattcgacctgctcctcccgcttcacgaactcagagggcataacggctgtgtacggtgttccgcgttttccgttgatagtaccctgttagccaccggtgatgacaatggcgagattagaatctggaacgtgtcaaatggcgaactgctccatctttgtgcccctctctctgaagagggcgccgctactcatggaggatgggtaacagacctgtgtttttcccctgatgggaagatgcttatctccgctggagggtacatcaaatggtggaatgtggtcactggcgaaagttcgcagacgttttatacaaacggaacgaatctgaagaagattcatgtgtctcctgactttaaaacctacgtgacagtagataatcttggcattttgtatatcttgcagaccctggagtag

SEQ ID NO: 22838 - DNA, 3585 bp, synthetic construct
  misc_feature 1..3585: note = Description of Artificial Sequence: Synthetic coding sequence
  source 1..3585: mol_type = other DNA
atggacgccaaggcccggaactgcctgctgcagcaccgggaggccttagaaaaggacattaagactagctatatcatggaccacatgattagtgacggttttctgacaattagcgaggaagagaaggtcagaaatgagccgacacagcagcaaagggctgccatgctgataaagatgattctgaagaaagataatgattcttacgtttccttttataatgcacttctgcacgaaggttacaaagatctcgccgcactgctccacgatggaatacccgtggtctcatcatcttctgtccggaccgtgctttgtgaaggcggagtccctcaacggcccgtggtttttgtgactagaaaaaaactggtgaatgcaattcagcaaaaactgtcaaagcttaagggggaaccaggatgggtcaccattcatggaatggccggatgcgggaagtctgttctggccgccgaggctgtacgagaccactctcttttggagggctgtttcccaggcggtgtgcattgggtatctgtcggaaagcaagacaaatccggacttcttatgaagctgcagaatctgtgtactcgactggatcaggatgagtccttctcccagcgactgccgttaaatatcgaagaggccaaagatcgtctccggatcctgatgctacggaagcaccctaggtccctgctcatactcgatgacgtttgggatagttgggtgctgaaggcctttgactcccagtgccagattctcctgacaactagggataaaagtgttacggattcagtcatgggacctaagtatgtggtgccagtggagagttccttaggaaaggagaaaggcctagaaattctgagtttgtttgttaacatgaaaaaagctgacctaccggagcaggctcactctatcatcaaggagtgcaagggctcccctctggtggtatctttaattggagccctgctgcgcgatttccccaatagatgggaatactacttgaagcaactgcagaataagcagttcaaaaggatacgcaaaagttcgtcttacgactatgaagccctggatgaggccatgtctatctcagtcgagatgcttcgggaggacatcaaagactattatacagatctgtcaatcctgcagaaagatgtgaaggtccctactaaagttctttgcattctttgggatatggaaaccgaagaagtcgaagatatcctccaggagttcgtgaacaaaagtcttctgttctgtgaccggaatggaaaatctttccggtactacctccacgacctacaagtcgatttcctgacagaaaaaaactgcagtcagctgcaggaccttcataagaagattatcacgcagttccaaaggtaccatcagccccatacgctgagccctgaccaggaagattgcatgtactggtataattttttggcctaccatatggcatccgctaaaatgcataaagagttatgtgcccttatgttctctctggattggataaaagctaaaacagaattagtcggaccagctcatctgatccatgaattcgtcgaatatagacacatcctggatgaaaaagattgcgccgtgagcgagaattttcaagaatttctgtcccttaacgggcacctgctgggccgccagccatttccaaatattgtccaattagggctatgcgagccggagacttcagaagtgtaccaacaggctaaattgcaggccaaacaagaggtagataatggtatgctgtacttggagtggattaataaaaagaacataactaacctgtctagacttgtggtgcggccgcacacggatgccgtgtaccacgcttgtttctccgaagacggtcagaggatcgccagttgcggggccgacaaaactctgcaggtctttaaggcagagactggagagaagttgctggagataaaggctcacgaggatgaggtgttgtgttgcgcattttccactgatgacaggttcatcgctacctgttctgtggacaagaaagtgaagatatggaacagcatgacaggcgaactggtgcacacgtacgacgagcactccgagcaagtgaattgctgccatttcaccaattcttcgcatcatcttttactggcaaccggaagttctgattgctttctaaagctgtgggacttgaaccagaaggagtgtcgcaacacgatgtttgggcatacaaacagcgtgaatcactgtaggttcagccctgatgacaaactcctcgcaagttgtagtgccgacggaactttgaaactgtgggacgctacctcagctaatgagagaaaaagtataaacgtcaagcagttcttcctgaatctggaggatccccaggaggacatggaggtgattgtgaagtgctgctcttggagtgccgacggagcccgaatcatggttgctgcgaagaataaaattttcctttggaataccgactcccggagcaaagtggctgattgtcgaggtcacctgtcctgggtgcacggcgtgatgttcagtcccgatggcagctcctttctaacctccagcgatgatcagacaattaggctgtgggagaccaagaaggtttgcaagaattcggcggtcatgctgaagcaggaagtggatgttgttttccaggagaacgaagttatggtgctggccgttgaccatattaggagattacaactcataaacggccgcacaggtcagattgattatcttactgaagcacaggttagttgttgctgtctttcgccacatttgcaatatatagcatttggagatgaaaatggcgcaatcgagattttagagctggtgaataacagaatattccagtcccgctttcaacacaagaaaactgtgtggcatatacagtttacagctgacgagaaaactctgataagctcttcggacgacgcagagatccaggtatggaattggcagctggacaaatgtatattcctgaggggacaccaggaaacagtgaaggacttcaggttgttgaagaattctcggttgctgtcttggagcttcgacgggactgtcaaggtgtggaatataatcaccgggaacaaggagaaagacttcgtctgtcatcaaggaacagtgctgagttgtgatatcagccacgacgcgacgaagttttcaagcaccagcgctgacaaaacggccaaaatctggtcattcgatctgctgctgcctctgcacgagctacggggccacaatggctgtgttcgctgtagcgccttctccgtcgattcaacattgcttgcgacgggtgacgataatggagaaattaggatctggaatgtaagcaatggtgagctgctccatctctgtgcaccactgtcagaagagggcgctgcaacccacggtggctgggtgacagatttgtgtttctctcctgatggcaaaatgttaataagcgcagggggatacatcaaatggtggaatgtcgtcacgggcgaaagttcccaaaccttctataccaatggtacaaacctcaagaagattcatgtgtccccagacttcaaaacctacgttactgtcgacaacctcggcatcctgtacatattgcagaccctagagtag

SEQ ID NO: 22839 - DNA, 3618 bp, synthetic construct
  misc_feature 1..3618: note = Description of Artificial Sequence: Synthetic coding sequence
  source 1..3618: mol_type = other DNA
atggacgccaaggcccggaactgcctgctgcagcaccgggaggccctggagaaagatatcaaaacctcatacatcatggatcacatgataagtgacggatttttgaccatctcagaggaggagaaggtacgtaacgaaccaacacaacagcagcgggccgcaatgctgataaagatgattctcaagaaggataatgatagctacgttagcttttacaacgccttgctacacgaaggctataaagacctggcagccttactgcacgacgggattcctgtcgtgtctagttcatccggaaaggactcagtaagcggaataacatcatacgtgcggactgtgttgtgcgaggggggtgtacctcagagacctgtggttttcgtgacccggaaaaaactcgtgaacgccatccagcaaaaactttctaagctcaaaggcgaaccgggctgggttaccatccacggcatggccggttgcggcaagtccgtgctggctgctgaagcagttagagaccactcactgttggaaggatgttttcctgggggtgtgcactgggtttccgtggggaagcaggacaaaagtgggctcttgatgaagctgcaaaacctgtgcaccagactggaccaggacgaaagcttctcccagcggctgccacttaacattgaggaggccaaggaccgactgcgcatattaatgctgcggaaacacccgagatcgcttcttattctcgacgatgtgtgggacagctgggtcctcaaggcctttgacagtcagtgccagatcctattaactacccgcgacaaatccgtgacagattccgtcatgggccccaagtatgtggtccccgtggaaagcagcctggggaaggagaaaggactggagatactatcgctgttcgttaacatgaagaaagcggacctgcccgagcaggcacacagtatcattaaagagtgtaaaggatcccctctagttgtgtcactgatcggggcactcttacgtgattttcccaatagatgggagtactatcttaaacaattgcagaataagcaattcaagcgcattaggaaatcctcaagctacgattatgaggctctcgatgaggccatgtctatcagtgttgagatgttgcgcgaggacataaaggactattataccgatctgtccattcttcagaaggacgttaaagtacccaccaaagtgctgtgtattctgtgggatatggagactgaggaggtagaagatatactccaggagttcgtgaataagtccttgctgttctgcgaccgcaatggcaagagtttccggtactacctccatgacctgcaggtggatttcctcactgaaaagaactgtagccagctgcaggatttacacaagaagatcatcacacagtttcagagataccatcagcctcatactttgagcccggaccaagaggattgtatgtattggtacaacttcctggcatatcatatggcttctgctaagatgcataaggagctctgcgcactgatgttctcgttagactggattaaagctaaaacagaattagttggccctgcccatcttatccatgagtttgtggagtacagacacatcctggatgagaaagactgcgcagtgtccgaaaactttcaggaatttctttctctcaatggtcatttactcggcaggcaaccttttcccaacatcgtgcagttaggcttatgcgaaccagagaccagcgaagtctaccaacaggccaagctgcaagcgaaacaggaggtagacaacggtatgctgtatctggagtggattaacaagaagaacataaccaacttgtcccgcctcgtagtaagaccacacacggatgccgtgtatcacgcgtgcttttccgaggacggccagagaattgcctcctgtggagccgacaagacactgcaagtgtttaaagctgagacaggggaaaaactgctcgaaattaaagcccacgaggacgaagtcctctgttgcgccttctccacagacgaccgctttatcgcgacttgctcagtggataagaaagtgaagatctggaactcaatgactggggagttagttcatacatatgacgaacactccgagcaggtcaattgctgccattttactaacagttctcatcacctgctgctggccactggttcaagcgattgcttcctaaagttgtgggacctgaatcagaaggaatgccggaataccatgttcggacacactaactcagttaaccattgtcggttttctcccgatgataagttgcttgcctcttgcagcgccgacggtaccctcaagctgtgggatgccacttccgccaatgaacgcaagtccattaacgtcaagcagtttttcctaaatttagaggatcctcaagaggatatggaggtgattgtcaaatgctgtagctggagtgccgatggtgcaaggattatggtcgctgccaaaaacaagatctttctgtggaacacagattcacgatccaaggtggcagactgccgaggccatttgtcttgggtccacggcgtgatgttttcacctgacggatcctccttcctcacctccagcgacgatcagacaattcgcctctgggagactaagaaggtgtgcaagaacagtgccgtgatgctgaagcaggaagtggatgtcgtcttccaagaaaacgaagtcatggtgctggccgttgatcacatccggcggctccaactgattaatggacgcacaggtcagattgactacctgacagaggcccaggtgagctgctgttgcttgtctccgcacttacaatacatagcatttggcgatgaaaacggcgctatcgagatcctggagctggtgaataataggatctttcaatctcggttccagcataaaaagaccgtctggcacatccaatttaccgccgatgaaaagacactcatatcgtccagtgacgacgccgaaatccaggtgtggaattggcaacttgacaagtgtatctttctcagaggtcaccaggaaacagtcaaagatttccggctgcttaaaaatagcaggctactctcatggagttttgatggtacggtgaaggtttggaacataatcaccggcaacaaggaaaaggactttgtttgtcatcagggaacagtcctgagctgcgacatttctcacgacgccacaaaattttcctccacttctgccgacaagactgctaagatttggtccttcgaccttctactgcccttacatgagctccgaggacacaatggctgtgtgaggtgctctgcttttagcgtggactccacattgttagctaccggtgatgataatggcgaaatccgcatctggaacgtgtctaatggcgagctgctccacctgtgcgctccactgtccgaagagggagctgccacacatggcggctgggtcacagacttatgtttttccccggatgggaagatgcttatatctgccggggggtacatcaagtggtggaatgtggtcacaggcgagtcttctcagaccttctacaccaatggaaccaacctcaagaagatccacgtttcaccagactttaaaacctacgtaaccgttgataatcttggaatcctttacattctgcagacactggagtag

SEQ ID NO: 22840 - DNA, 3492 bp, synthetic construct
  misc_feature 1..3492: note = Description of Artificial Sequence: Synthetic coding sequence
  source 1..3492: mol_type = other DNA
atggacgccaaggcccggaactgcctgctgcagcaccgggaggccctggaaaaggacatcaaaacgtcatatattatggaccatatgatttctgacggcttcctcacaatcagtgaggaggaaaaggtgcggaacgagcctacacagcagcagcgggccgccatgctgatcaagatgatcttaaagaaggacaacgactcttacgtaagcttttataacgctctcttgcacgaaggctacaaagatcttgcggccctgctccatgacggaattccagtcgtcagcagctcaagcgggaaggacagcgtttctgggattacgtcttacgtcagaactgtgctgtgcgaaggaggtgtcccccaacgcccggtggtgtttgtgactcgtaagaaactggtcaacgccattcagcaaaagctgtcaaaacttaaaggggagcccggctgggtaacaatccacggcatggcaggttgcgggaaatccgttctggccgccgaggctgtgcgagatcactccttactggagggctgcttcccgggaggagtgcattgggtgtcggttgggaaacaggataagagtggcttgctcatgaaattgcagaatctgtgtacccggctggaccaggatgaatcatttagccaaaggctgccgctgaatatcgaggaggcgaaggatcgactgcggattctgatgctccgcaaacatccaagatcactccttattttggacgacgtctgggactcttgggtgctcaaagccttcgactcccaatgccagattctgctgacaacccgtgacaagtctgtcactgacagcgtgatgggccctaaatatgttgtcccggtggaaagctcacttggtaaagagaagggcttggagatccttagcctgttcgtgaatatgaaaaaagccgatttgcctgaacaggcgcatagtataatcaaagagtgtaaaggatctccgctggtggtcagtcttatcggcgccctcctgcgggatttcccgaacaggtgggaatattatcttaagcagctgcagaataagcagttcaaacggatcagaaaatcctcttcttatgattacgaggcactggatgaggcaatgtccatctctgtcgagatgttacgcgaagacattaaagattactacacagatttgagcatcttgcagaaggacgtgaaggtgcctaccaaggtgttgtgcatattgtgggatatggagaccgaagaagtcgaggatattctgcaggaattcgtgaataaaagcctcctgttttgcgatcgtaacggtaaaagttttagatactatttacacgatctgcaggtagactttttaaccgaaaagaactgcagtcagctccaagacctgcataagaagattatcactcaatttcagagatatcaccagccccacaccctgagccccgatcaggaggactgtatgtactggtacaacttcctcgcctatcacatggcaagtgccaagatgcataaagaactgtgcgcactgatgttcagcctcgactggattaaagcaaagactgaactggtaggacctgcccacttgatacacgagttcgtggaatacagacacattctcgacgagaaggactgcgccgtgagtgaaaactttcaggaatttctctcgcttaatggccaccttctcggaagacagccgtttcctaatatcgtgcagctgggcttgtgcgaacccgagacgagtgaagtctaccaacaggccaaactccaggcaaaacaagaggtagataatggcatgctttacctggaatggatcaataagaagaatatcactaacctctcacgacttgtggtccggccccatacagatgctgtatatcacgcctgtttctcagaagacgggcagcgcatcgcgagctgcggcgcagacaaaacgctgcaggtgtttaaggcagagactggcgaaaaactgctggaaattaaagcccatgaggacgaagtgttatgttgtgccttcagcaccgatgatagattcattgcgacttgtagtgtggataagaaggtgaagatctggaattcaatgactggcgaactggtccatacctacgacgagcactcggagcaggtgaattgctgccacttcaccaatagcagtcatcatctgttgctggcaacggggtcctccgactgtttcctgaaactgtgggacctcaaccagaaggagtgtcgcaacacaatgttcggccatacaaatagcgtgaaccattgtcgcttttctcctgacgacaaactcctagcttcatgctcagcagacggaaccctgaaactttgggatgccacatcagcaaacgaaagaaaaagtatcaatgtgaaacagttttttttaaacttagaggaccctcaggaagacatggaggtgattgtaaagtgttgttcttggtctgccgacggcgcacggattatggtggccgccaagaataagatattcctgtggaatactgattcacgatccaaagttgccgattgccgaggacatttgtcgtgggttcacggtgttatgttttccccggacggtagctcgtttctgacctcgagcgacgaccagacgattaggctatgggaaaccaaaaaagtctgcaaaaattctgctgtcatgctgaaacaggaagtagacgtggtgttccaagaaaacgaggtcatggtgttggccgtagatcacattagacgtctccagctcataaatggccgaacagggcaaatcgattacctgacagaggcccaggtgtcttgctgttgcctgagtccacatttgcagtatatcgcttttggggatgaaaacggcgcaattgaaattctcgagttagtgaataaccgcatcttccagtctcggttccaacacaaaaaaacagtttggcacatccagttcactgctgacgagaagacattgattagtagctccgacgacgcggagattcaagtgtggaattggcagctggataaatgcatatttctaaggggccaccaggagacagtcaaagatttccgtctgttgaagaactcacgactcctgtcttggtcgttcgacggcaccgttaaggtttggaatatcataactggaaacaaggagaaggattttgtctgccaccaaggaacagtgctctcctgcgatattagtcacgacgctaccaagttttcttccaccagcgctgataaaaccgctaagatttggaatgtctccaacggcgaactgcttcacttatgtgccccgctgtctgaagagggcgccgctacacatggcggttgggttacagacctctgtttctcccccgatggaaaaatgctaatctccgcaggcggctatatcaagtggtggaatgtggtcactggagaaagttcacagaccttctacacgaacgggacgaatctgaagaaaatacacgtctccccggacttcaagacctatgtcaccgttgataacctcggcattctgtatattctgcaaaccttagaatag

SEQ ID NO: 22841 - DNA, 3714 bp, synthetic construct
  misc_feature 1..3714: note = Description of Artificial Sequence: Synthetic coding sequence
  source 1..3714: mol_type = other DNA
atggacgccaaggcccggaactgcctgctgcagcaccgggaggccctggaaaaagacatcaagactagctatataatggaccacatgattagtgacggatttttaacaatatccgaggaggaaaaagttagaaacgaacccacccagcagcagcgagctgctatgttgatcaaaatgatactcaaaaaagacaatgactcctacgtttcattttataacgccctgctccacgagggttataaggatctggctgcccttctgcatgacggtattccagtcgtgtcttcgtcttctgtcaggactgtgttgtgcgagggcggggtaccacaaagacccgtcgtgttcgtgacgaggaagaagttagtcaacgccattcaacagaaactgtccaaattaaaaggggagccaggttgggtgaccattcacgggatggcaggctgtgggaagtctgtgttggcagcagaagctgttcgtgatcatagcctgttagaaggttgtttccccggaggggtgcattgggtcagtgtgggaaaacaggacaagtctggactcttgatgaagctgcagaacctatgcacgaggttagatcaagatgagtcattctcccagagattgccattaaatattgaggaggccaaagataggctccgcatccttatgctgcgcaagcacccccggtcactgctcatcttagatgacgtatgggactcctgggtgctgaaagcctttgactctcaatgtcagatactcctgactacccgagacaaatccgtgactgatagtgtgatggggcccaagtacgtggtacctgtcgaatcctccctggggaaagagaagggattggaaatcttgtctttattcgtgaacatgaagaaggccgacctgcccgaacaggcgcactccattattaaagaatgcaaaggaagccccctggtcgtaagcctcataggcgctctgctgcgggatttcccaaacaggtgggagtactacctgaagcagctgcagaacaaacagtttaagaggatcagaaagagctccagttatgattatgaggcccttgacgaggccatgtccatctcagtggaaatgctgagggaggatatcaaggactattacaccgacctgagtattctgcagaaggatgttaaggtgcctaccaaggtgctgtgcattctttgggatatggagactgaggaagttgaggacatcctccaggagtttgtgaataagagtctgctcttctgtgatagaaacgggaagagctttcggtactaccttcacgatctgcaggtggactttctgacggaaaaaaactgcagccagctccaggacctccataaaaaaattataacccaattccagcgctaccatcagccgcacacactttctcccgaccaagaagattgcatgtattggtacaatttcctcgcctaccacatggcctcagccaaaatgcacaaggagctgtgtgccctgatgttttcactggactggatcaaggctaaaactgagctggttggaccggcacacctgatccatgagtttgttgagtacaggcacatccttgacgaaaaagattgcgccgttagcgagaactttcaggagttcctttctctgaacggccatcttttggggaggcagccttttccgaatatagtccagttggggctgtgtgaacccgagacgtccgaggtgtaccaacaagctaagcttcaggcgaagcaggaggtggataacggcatgctgtacctggaatggatcaataagaagaacataaccaatctgtctcggctggtggtgaggccacataccgatgccgtgtaccatgcctgtttttctgaagacggccagcggatagcctcatgcggagccgacaagaccctgcaagtgtttaaggccgaaactggggagaaacttctggaaatcaaagctcacgaagatgaggtcttgtgctgtgcattctctactgacgaccgcttcattgcgacatgttccgtcgataagaaagtgaagatctggaattcaatgaccggggagttagtgcacacttatgacgagcacagcgagcaggtcaattgctgccattttacgaattccagtcatcacctgctgcttgcaaccggaagttccgattgtttcctcaagttgtgggacctgaatcaaaaggagtgccgaaatactatgttcggacatacaaactcggtaaaccactgtaggtttagcccagacgacaagctgctggcctcctgctcagcggatgggactctgaagctatgggacgctacctccgccaatgagagaaagtcgatcaatgtgaaacagttttttttaaatctcgaagacccacaggaggacatggaagtgatcgtgaagtgctgtagctggtccgccgatggagctagaattatggtggccgctaagaacaagatcttcctgtttgatattcacacctccggcctgcttggcgagattcatacaggacaccactccacgatccagtattgtgatttcagcccccagaaccatttggcggtggtggccttatctcagtattgtgttgagctctggaacaccgactcccgatctaaggtcgccgattgccgcggacatctgtcttgggtgcatggcgtgatgttctctcctgatggctcttctttcctgacttcttccgacgatcagaccatcagactatgggaaacaaaaaaggtatgtaagaatagcgccgttatgctgaagcaggaagtcgatgtcgtcttccaggaaaacgaggtgatggtgcttgcggtggatcatatccgaaggctgcagctgattaacggtcggactgggcagattgattatctcactgaagcccaggtgtcttgctgttgcctgtcaccccacctgcagtacattgccttcggtgacgagaacggagccatcgagatcctggagctcgttaacaaccgtatcttccagtcccgcttccagcacaaaaagacagtgtggcacattcagttcaccgctgacgagaaaactctcatttcctccagcgacgacgccgaaatccaagtctggaattggcagctcgacaagtgcattttcctgcgaggacatcaggaaaccgttaaggatttcaggttattgaaaaactcccggctgctgtcgtggagcttcgacggtaccgtaaaagtgtggaacattatcaccggcaacaaagaaaaggacttcgtctgtcaccagggcacagtcttaagttgcgacatttcccacgacgcaaccaagttcagttccactagcgcagacaagactgccaaaatttggagtttcgatctcttactgccactgcacgaactgcggggacataatggttgtgttcggtgctcggctttcagcgtggacagcaccttgttagcgactggcgatgataacggcgaaattcggatttggaacgtttcaaacggggaattgctccatctgtgcgcaccattgagtgaggaaggggctgcaacgcacggcggctgggtgaccgatctttgcttctcaccagacggcaagatgctcattagtgccggcggatacattaagtggtggaacgttgttaccggtgagtcctcgcagaccttttatacaaacggaaccaacctaaaaaaaatccacgtcagtccagatttcaagacctatgttacagtggacaatcttggaattctgtacattctgcagaccctcgagtag

SEQ ID NO: 22842 - DNA, 3747 bp, synthetic construct
  misc_feature 1..3747: note = Description of Artificial Sequence: Synthetic coding sequence
  source 1..3747: mol_type = other DNA
atggacgccaaggcccggaactgcctgctgcagcaccgggaggccctagaaaaggatattaagacctcctacatcatggatcacatgatttccgatggctttctgacaatctcagaggaggaaaaggtgcgcaacgagcccacccaacaacagagagcagcgatgttgattaagatgatcctaaagaaagacaacgatagctacgtgagtttctacaatgccttattacacgaaggatataaggacctagccgcgcttttgcatgacggaatcccagtggtgtccagcagtagcggcaaggattcagtgtctggcataacgtcctacgtgcgaacagtcctatgcgaggggggggtcccccagcgcccagtcgtttttgtcactcgaaaaaagttagtgaacgctattcaacagaaattaagcaagttgaagggcgaaccaggctgggtcacgatacatggtatggccgggtgtggcaaaagtgtcctagcagccgaggccgttcgggaccactcccttctcgagggatgcttccccgggggtgtccattgggtttcagtgggcaagcaggacaagtccgggctgctgatgaaactgcagaacttatgcactaggctggatcaggacgagtcatttagtcaaaggctgcccttaaacatagaggaggccaaagaccgcctgcgcattctgatgctgcggaagcacccccgctccctgctcattctcgatgacgtgtgggacagctgggtgctcaaggcattcgactcacaatgtcagatactgctaactactcgtgataagtcggttaccgattcagtgatgggacctaagtacgtggtgccagttgaatcgagtctgggaaaggaaaagggactggagattctatcattatttgtgaatatgaagaaagcggatctgccggagcaggctcatagcatcatcaaggagtgtaagggatcaccgctggttgtgtccctgatcggtgcactcctgcgggattttccaaacaggtgggaatactacctgaaacagctccagaacaaacagttcaaaaggattcgaaagagctcttcctacgattacgaggccctggatgaagcaatgagcatatccgttgaaatgctgagggaggatatcaaagattactacacggatctgagcatcctacaaaaagatgtcaaagtgcccacaaaagtgctgtgcatactgtgggatatggaaaccgaggaggtggaagacattctgcaagaattcgtgaataagtccctgctgttctgcgaccgcaatggaaagtcctttaggtattacctccacgatctacaggttgatttcttgaccgagaagaattgcagccagttacaggacctgcacaaaaagattatcactcagttccagagataccaccagccacacactctgtctccagatcaagaggactgtatgtactggtacaatttcctcgcataccatatggcttccgcaaaaatgcacaaggagctctgtgccctgatgttttccctggactggattaaggccaagaccgaactggttggcccggctcatctcatacatgaatttgtcgagtacaggcacattcttgacgaaaaggactgcgccgtcagcgagaactttcaggaattcctaagcctcaacggccacctgctaggccggcagcctttccccaatatcgtgcagctgggactctgcgaaccagaaactagcgaagtgtatcaacaagctaaattgcaggccaagcaggaagtggataacggcatgctgtacctggaatggataaacaagaagaacattacaaatcttagtagattggtggtgcgtccccacaccgatgccgtctatcatgcctgcttcagtgaggacggccagagaatcgcctcttgtggggctgacaagacactgcaagtgttcaaggccgagactggagaaaagctccttgagatcaaggcccacgaagatgaagtgctgtgctgcgcattcagtaccgacgatagatttattgcaacatgcagcgttgacaagaaggtgaagatctggaatagcatgaccggcgaactagtgcatacgtatgacgaacattcagagcaggtaaactgctgccacttcacgaacagctcccaccatttgctcctcgcaactgggtcttcagactgtttcctgaagctgtgggacctgaaccagaaagaatgtcggaacaccatgttcggccataccaactcagttaatcattgtagattctcgcccgacgataagctgctggcatcttgctctgcagacggcaccttgaagctctgggatgctacctctgccaatgaacggaagtcaatcaatgttaaacagtttttcctgaaccttgaggacccacaggaggacatggaggtgattgtgaaatgctgcagttggagtgcagacggcgctagaatcatggttgcagccaagaacaaaatatttctcttcgacatccacacctccggcctcctgggcgaaattcacactggccaccacagtaccattcagtattgtgacttctcaccgcaaaatcacttggcagtggtcgcactctcacagtattgcgtggaattgtggaatacggatagccgatccaaggtggctgattgccgtggccacctaagctgggtgcacggagttatgtttagcccagatgggagctcatttcttacaagttcggacgatcagaccataagactatgggaaacaaagaaagtatgcaaaaatagcgccgttatgctgaagcaagaagtggatgtggtgtttcaggaaaacgaggtcatggtactcgcggtcgaccatattcggcgcctccagctcattaatgggagaacaggacagatagactatctaaccgaggcccaggtcagctgctgttgtttgtctccccacctgcagtacatcgccttcggggacgaaaacggggccattgaaattttggagctggtcaataatagaattttccagagcagattccagcacaaaaagaccgtatggcatatccaatttactgcagacgagaagaccctcatctcctctagtgatgatgctgagatccaggtgtggaactggcagctcgataagtgcatcttcctgcggggacaccaggaaacagtcaaggacttcagactgctgaaaaactccaggttgttgtcctggagctttgatggtaccgtgaaagtgtggaatatcatcacgggaaacaaggaaaaggactttgtgtgtcaccagggaactgtgttatcatgtgacatctcccatgatgccactaagttcagttccacgtctgccgacaaaacagccaagatctggagcttcgacctcttgttaccgctgcacgagcttcgcggtcataacgggtgcgtcaggtgttccgccttctctgtcgatagtactcttctcgccacaggggatgataatggtgaaatccggatctggaacgtatcaaatggagaacttttacatctatgtgcccccctttccgaggagggtgccgccacccacggcggttgggttactgacttgtgcttcagccccgacggaaaaatgctgatttcggctggaggctatatcaagtggtggaacgttgtaactggcgaatcatcccagaccttttacactaacggcacaaacctgaaaaagatccatgtttctcccgactttaaaacctacgttaccgtcgacaacctgggtattttatacatcttgcagactcttgaatag

SEQ ID NO: 22843 - DNA, 1017 bp, synthetic construct
  misc_feature 1..1017: note = Description of Artificial Sequence: Synthetic coding sequence
  source 1..1017: mol_type = other DNA
atggacgccaaggcccggaactgcctgctgcagcaccgggaggcccttgagaaggatattaagacatcctatatcatggaccacatgatcagcgatggatttttaaccataagcgaagaagaaaaggtcaggaatgaaccaacccagcaacaaagggcagccatgctcattaagatgatcttgaagaaggacaacgattcttacgtctccttctataatgcgttactgcatgaaggatacaaggatttagccgccctcctgcacgatggaattcctgtcgtttccagtagctccggaaaagacagcgtgtccggtataacgtcctacgtgcggactgtgctgtgtgagggtggcgtcccacagcggcccgttgtctttgtgacccggaaaaaacttgtcaatgcgatacagcaaaagctcagtaaactcaaaggtgagcctgggtgggtgacgattcatggtatggcagggtgcgggaaaagcgtactcgcggcagaagcagtacgcgaccattctcttctggaaggctgttttcctggcggtgtccattgggtgagcgtgggtaaacaggataagtctggactcctaatgaagttgcaaaatctgtgcaccagactggaccaggatgagagtttctcacaacggctgcctctgaacatcgaagaggctaaggatcgactaagaattctgatgttgcgcaagcatcctcggagcctcctgatcctggacgatgtttgggactcatgggtgctgaaggcattcgatagccaatgccaaatcctgttaaccacaagggacaagagcgtgaccgattccgtgatgggcccgaaatacgtcgtcccagtggagtcaagtctggggaaagagaaaggcctcgagatcttgtcactgtttgtaaacatgaaaaaggccgatctaccggagcaggcccattccattatcaaggaatgcaaagtggttgaacgctgtcactggggtatactgactgatctcctgcacaagtggaatcagagctag

SEQ ID NO: 22844 - DNA, 2025 bp, synthetic construct
  misc_feature 1..2025: note = Description of Artificial Sequence: Synthetic coding sequence
  source 1..2025: mol_type = other DNA
atgcccagctacaccgtgaccgtggccaccggcagccagtggttcgcagggaccgatgattatatatatctgagcttggtgggatccgccggatgctccgaaaagcatctccttgataagccattctacaatgactttgaaaggggagccgtcgactcctatgacgtgacagtcgacgaagaactgggcgaaatccaactggtccgaatcgaaaagcgcaagtattggctgaatgatgattggtatctcaagtacattaccctcaagactccccatggcgattatattgaatttccgtgctatagatggattactggggacgtcgaagtagtgctgcgtgacgggcgagcaaagctcgctagggacgatcagattcacatactcaagcagcaccgcagaaaagagcttgagacaagacagaaacagtacagatggatggaatggaatccaggttttccactgagcattgatgcaaagtgccataaggaccttcctcgagacattcaattcgattccgaaaagggtgtggattttgtcttgaactacagtaaggccatggaaaatctgttcataaaccggtttatgcatatgtttcagtcctcatggaatgatttcgccgactttgaaaaaattttcgtcaagataagcaacactattagcgaaagagtgatgaatcactggcaggaggacctaatgtttggctatcagttcctgaacggatgcaatccagtgcttatccgcaggtgcaccgagctccccgagaagttgcccgtgacgaccgaaatggtggaatgctctctcgaacggcaactgagcctggagcaggaggtgcagcaaggaaatatctttatcgtggacttcgagttactagatggcatagacgccaataagacagatccatgtactttgcagtttctggctgcgcctatctgtttgttgtacaaaaatcttgctaataagattgttccgatcgcaatccagttaaaccagatccctggggatgagaacccaatattcctgcctagcgacgccaagtatgactggctgctggccaaaatttgggtcagatcttccgactttcatgtgcatcagaccattactcacctgctgaggactcacttggtgtccgaggtgtttggcattgctatgtacaggcaactacccgctgtgcacccaatttttaaacttctggtcgcacatgtcagattcacgattgctataaacaccaaagctagagagcagcttatctgtgagtgcggactatttgataaggcaaatgcgactggtggcggagggcacgtgcaaatggttcagagggccatgaaggacctgacctacgctagtttatgctttcctgaggcaattaaagcccgcggcatggaatcaaaggaggacatcccatactacttctatagggatgacggcctgctcgtttgggaggccattcggacgttcacggcagaggtcgtcgatatatactacgaaggcgaccaggtagttgaggaagatcctgagctgcaggatttcgttaatgacgtatacgtttacggcatgcggggacgaaaatccagcgggtttcctaaatcagtcaagtcccgggagcaattgtctgagtacttgaccgtagtgatctttactgcatctgcacaacatgccgcagtgaattttgggcagtatgattggtgctcatggatccccaatgctcctcctaccatgcgggcccctcccccaacagccaagggcgtggttaccatagaacagattgtagatacactgccagaccgaggtcgttcatgctggcaccttggtgcagtgtgggcactttcacagttccaggagaacgaactgttcctgggcatgtaccctgaagaacatttcatcgaaaaaccagttaaggaagcgatggctcggtttagaaagaatctggaagcgatcgtctcagttatagcagaacgtaacaagaagaaacagctcccctactactacctgagtccggatagaatccctaactccgtagcaatctag

SEQ ID NO: 22845 - DNA, 1854 bp, synthetic construct
  misc_feature 1..1854: note = Description of Artificial Sequence: Synthetic coding sequence
  source 1..1854: mol_type = other DNA
atgcccagctacaccgtgaccgtggccaccggcagccagtggttcgctggcaccgatgactacatctacttgtcactggtcggcagcgctggatgcagtgaaaagcatctgcttgataagccattttacaacgatttcgagagaggtgccgtggatagctatgatgttaccgtggacgaggagctgggcgagatccagctggtccgcattgagaaacggaagtactggctcaatgacgactggtatctgaagtatatcacactcaagacgccccacggcgattatatcgagtttccctgttatagatggattaccggggacgtggaggtagtactccgcgatggtagggctaagctagcccgagacgatcaaatccatatcctgaaacagcaccgacgaaaggaattagagactagacagaaacagtatagatggatggagtggaatcccggcttccctttgtccatagacgctaagtgccacaaggatctgcctcgtgatatccagtttgattctgaaaaaggtgtcgatttcgtcctaaactactcaaaagccatggaaaacctctttatcaacaggttcatgcatatgtttcagtcctcctggaatgatttcgctgattttgagaaaatattcgtgaagattagcaacaccatttcggagagggtaatgaaccattggcaggaagacttgatgttcgggtaccagttccttaacggttgcaatcccgttctaattaggaggtgcactgaattgcccgagaagcttccagtgacaaccgagatggtggagtgctcacttgagcggcaactgtccctggagcaggaagtgcagcagggtaatatatttatagtggactttgaactgctggacggtattgatgccaacaagacagacccctgcacattgcagttcctcgcggcgcccatatgtttgctctacaagaatttagccaacaaaatcgtgcctatcgcaatccagctgaaccaaatacctggagacgagaacccaatattcttaccaagcgatgccaagtacgattggctgctagccaaaatctgggtgcggagttctgatttccacgtgcaccagaccattacacatttgctgagaacccaccttgtgagcgaggtttttggcatcgcaatgtatcgacagctcccagcagttcatccgatttttaagttactcgtggcccacgtgcggttcaccatcgccattaatactaaggctcgggaacagctgatatgtgaatgcggcctcttcgacaaagctaatgccacaggcggcggcggccatgtccagatggtccagagagctatgaaggatctgacatacgcttccctgtgctttcctgaggcaattaaggctcggggcatggaatctaaggaggatattccctattacttctaccgcgacgacggcttactggtctgggaagctattcgcaccttcacggcagaggtggtcgacatttattatgaaggagaccaggtggtggaggaagatcccgagctgcaggatttcgtgaatgatgtctacgtttacggtatgcgcggccggaagtccagtggttttcccaaatcagtgaagagtcgggagcagctgagtgaatatctcaccgtggttatttttacagcaagcgctcagcatgccgctgtgaatttcggccagctgtttttaggtatgtatccagaggagcacttcattgaaaagcctgtgaaggaagcaatggccaggttcagaaagaatttggaagcaattgtttccgtgatcgctgagcggaacaaaaagaagcagctcccctactattacctgtctccagaccgcatccctaacagtgtggcaatctag

SEQ ID NO: 22846 - DNA, 2511 bp, synthetic construct
  misc_feature 1..2511: note = Description of Artificial Sequence: Synthetic coding sequence
  source 1..2511: mol_type = other DNA
atgcacgcccagcggcagttcgtggtggccgccgtgcgggccgaggtgcgtcgccacgaagtggcaaagcaggctcttaaccggttgcggaagctcgcagagcgggtggacgatcccgaactgcaggactcaatacaggctagtttggatagcattagagaagctgtcattaactcacaggaatggactctctccagaagcattcccgagctccgtctgggggtacttggggatgctcgctccgggaagtcctctcttattcacagattcttaaccggtagttatcaagtcctagaaaagacagaatccgaacagtacaagaaagaaatgctggttgatggccagacacatctcgtgctgatcagagaagaagccggagcgcctgacgctaaattttcaggctgggctgacgctgtgattttcgtgttttcgctcgaggatgaaaacagcttccaggccgtgtctcggcttcacggtcaactctcttccttaagaggggaaggccggggagggctggcactggccctggttggaacccaggacaggatcagtgcgtcctcgccaagagtggtgggcgacgcgcgcgctagagccctctgcgccgatatgaaacgctgctcttactacgagacttgtgccacttacggccttaatgtcgacagagtgtttcaggaggtggcacaaaaggttgtaacactccggaagcaacagcaactgctggcggcctgtaaaagtttgccgagcagtccgtcacactctgcggcttcgacgccagtggccgggcaggcaagtaatggcggacacacatctgactattcctcatcacttccctcttccccaaatgtgggtcacagggagctgcgcgcggaagctgcagcagtagcaggcttgtctacccctggttccctacaccgggctgcaaaaagacgcacctcactcttcgccaataggagaggctcagatagtgagaaacgctctctggattcacggggcgagacaacaggctcaggcagggcgatacccattaagcagagctttttactgaagaggagcggcaattccctcaacaaagaatggaaaaagaagtacgtcaccttgtccagtaatggatttttactgtatcacccgtcaatcaacgactatatccacagtactcacgggaaggagatggacctgctgaggaccaccgtaaaagtaccagggaagcgccccccccgggcgatttccgctttcggaccctctgcttcaattaacggccttgtaaaggacatgagcaccgtgcagatgggggaaggcttggaggccactacaccaatgcctagcccttcaccatcaccatccagtttacagcctccaccggatcagacgagtaagcacctcctaaagcctgatagaaatctggctagggctctgtccaccgactgtacaccctctggagacttatcccccctgtctcgggaaccaccccccagtccgatggttaaaaagcagcggcgtaaaaagcttactactcccagtaagaccgaaggcagcgcagggcaggctgaggaagaaaattttgaattccttatagtgagctctaccggccaaacctggcacttcgaggccgcatcgttcgaggaaagggatgcctgggttcaggctattgaatcgcagatactcgcttccctgcagtgttgcgaatcttcaaaagttaagctccggacagactcacagagcgaggccgtcgctatacaggcgatccgcaacgcaaagggcaattccatttgtgtggattgcggcgcccctaaccctacctgggcgtcattaaatctgggcgccctgatttgtatcgagtgttctgggattcacaggaatcttggtacgcatctgtcacgagtgagatcactggacctcgatgattggccccgagaactcacgctggtgttaaccgcgatagggaatgatactgcaaatagagtatgggagtcagacactcggggcagagcgaaaccgagcagggacagctctagggaggaacgcgaatcttggatccgggccaagtatgaacagctgctctttctagctcctctgagtacaagcgaggagcctttaggccgccagctttgggcagctgtacaggcacaggacgttgccacagttctactactcctggcgcacgccagacatggccctctggacacctccgtcgaggaccctcagctgcggtcacccctgcatttagccgctgaattggcccacgtggtgataacgcagctgttactatggtatggcgctgatgtcgccgctcgcgatgcacagggacgtacggccctcttttacgctcggcaggcagggtcacagctttgtgccgatatccttcttcagcacggatgccctggagaagggggatccgctgcaacaacccccagcgctgctacaactccttcaattacagccacaccatcaccccggagaagaagttccgcagcctcagttggaagggccgacgcccccgtagccctggtgtag

SEQ ID NO: 22847 - DNA, 3579 bp, synthetic construct
  misc_feature 1..3579: note = Description of Artificial Sequence: Synthetic coding sequence
  source 1..3579: mol_type = other DNA
atgagccggggcgccggcgccctgcagcggcggaccaccacctaccttattagcttgacccttgtgaaattggagtctgtgccgcccccaccaccctccccttccgccgccgcagccggtgcagctggggcgagaggctccgagacaggagaccccgggagccccaggggagctgaggaacctggcaagaagcggcatgaacgtctgttccaccgtcaggacgccctgtggatctccaccagctccgctgggaccggaggggcagagcctcccgctttatctccagccccagcatcccccgcccgacctgtgtccccggcccccggaaggaggctgtcactctgggccgtcccaccaggcccacctctgtcaggggggttaagtccagatccaaaaccagggggcgcccccactagctcacggcggccgctgctatcctcaccctcatgggggggaccagagccagagggccgagccggcgggggaattcctggctcttcctcccctcacccaggtaccgggagcaggagactgaaagtggccccaccaccccccgcaccaaagccatgcaagactgtgaccaccagtggggcaaaagccggcggaggaaagggcgcagggtcaagactgtcatggccggagagtgaagggaaaccccgggtcaagggctctaagtcttcagctggaacaggcgcctccgtctccgcggctgctaccgctgccgctgcgggcggaggtggcagcaccgctagtacaagcgggggagtgggcgcaggggcgggtgctcggggcaagcttagccccagaaaaggaaaatcaaagacgctcgataacagcgatctgcaccctgggccccccgcgggctcccctccgcccctgaccctgccccccaccccatcccccgccacagctgtcaccgccgcctctgcccagccaccaggccccgctccccctataacccttgagccccctgctcctggactcaagagaggccgggaaggcggaagagccagcactagagataggaaaatgctgaagtttatcagcggcatcttcaccaagagtacgggtggcccccccggatcgggacctctgcccggccctcccagtttaagttcggggagtggaagccgggagctgctcggcgcggaactgagggcctctcctaaggcggtgattaacagccaggaatggactctcagtcgcagcatccccgagctgcgtctcggagtcctgggtgatgcgagatccggtaagagcagtctgattcatcggtttctcactggttcttaccaggtgctggaaaagacagagtcagagcagtacaagaaagagatgctagttgacggccagacacatctggtgcttattcgggaggaggccggcgcccccgatgcgaagttttctggctgggccgatgccgtcatttttgtattctcactagaagacgagaactccttccaggccgtgtctcgacttcatggacagttgtcaagccttaggggcgagggccgaggcggtctggccttggccctggtgggcacacaggacaggatatcagcttcctcccctagagtggtcggggatgcaagagcccgcgctctatgcgccgatatgaaaaggtgctcctattacgagacatgtgccacgtatggcttgaacgtagaccgtgtgtttcaggaagttgcccagaaggtcgtgactcttcggaagcagcaacaactcctggccgcctgtaaatctttgcctagttcaccatcccattccgctgcgagtaccccagttgcaggacaggccagcaatggcgggcacacatcagattacagttcatcactgccatcctcacctaatgtcgggcatagagaacttagggccgaggctgcagcagttgcaggcttatcaacgcccggctctctccacagggctgcaaagaggcgcacttccttgtttgccaaccggagaggatcagactcagaaaagaggagtcttgactcgcgaggagaaactaccggttcagggcgggcgattccgatcaaacagtcattcttgctgaaaaggtccgggaactctcttaataaggaatggaaaaagaaatacgttaccctctcctccaacggatttctactgtaccatccatccatcaacgactacatccacagcacccatggcaaagagatggatctactgcggacaactgttaaagttccgggtaaacgccctcctagggccatttccgccttcgggcctagtgcgtccataaacggcctggttaaagatatgagcacggtacagatgggagaaggtctggaggcaaccacgcccatgcctagcccctcgccttcccccagttcattgcagccaccacccgaccagacctccaagcatctccttaagcctgacagaaatctagcgagggccctgtccactgattgtacacccagtggcgatctctccccattaagcagggaacctcccccatcccccatggtcaaaaagcaacgacgcaagaagctgacaacacccagtaagactgaagggtccgccggtcaagccgaggccaagagaaaaatgtggaagctcaaatcttttggctcgctgcgaaatatttacaaagcagaggaaaatttcgagttcctgatcgtcagtagtaccggtcagacctggcactttgaggctgcatcatttgaagaacgcgatgcctgggtgcaggccatagagtcccagatcctggccagtctgcagtgttgcgaatcctcaaaagtaaagcttaggacagacagccagtctgaggctgttgccatccaggcgatcaggaacgcaaagggcaactctatatgcgtggattgcggagcgcctaacccaacatgggcatccctgaatttaggtgctctgatatgcatcgaatgttcaggcattcatcgaaatctaggcactcacttaagtcgagttaggtctctggacctggacgattggccgcgggagctcactctggtgctcaccgctatcggtaatgatacagcgaaccgggtttgggaatcagacacaagaggacgggccaaaccaagtagggattcaagtcgtgaggagagagaaagttggatccgggcaaagtacgagcagttgctttttttggcccccctgagtacgtcggaagagccgttaggcagacagttgtgggccgcagtccaggctcaggatgttgctaccgtcctgctcctgctggcccacgcacggcacggacctttagatacctcagtggaggacccgcagctgagatccccgctgcacttggcagctgaattggcgcacgttgtgataacacagctgcttttgtggtacggcgcagacgtcgcagctcgggacgcccaaggccgcacagcactgttttacgcccgccaggcagggagtcagctgtgcgccgatatcctgctacagcatggctgcccaggggaaggcggttccgcggcaacgacacctagtgccgccacaactccatcgatcacagcaactcctagccctaggcggaggtcatcagctgctagcgtggggcgtgccgacgctccggtcgctctggtatag

SEQ ID NO: 22848 - DNA, 1185 bp, synthetic construct
  misc_feature 1..1185: note = Description of Artificial Sequence: Synthetic coding sequence
  source 1..1185: mol_type = other DNA
atggacagccagggccggaaggtggtggtgtgcgacaacggcaccggtttcgttaaatgtgggtacgcagggtctaatttccctgaacacatcttccccgctctggtcgggagaccaatcataagatccaccacaaaagtgggcaatatagaaattaaagacttgatggtgggcgacgaggctagcgaactgagatccatgttggaggtgaactaccctatggaaaatggaatcgtaaggaactgggacgatatgaaacacctgtgggactacacattcggacctgagaaacttaacatcgacacccgtaactgcaaaatactgctcaccgagccgcccatgaatcccaccaagaatagggagaagatcgtggaggtcatgtttgaaacataccagttcagtggagtctatgttgccattcaggccgttctgactttatacgctcagggactcctcaccggtgtcgtggtggacagcggggacggcgtgacgcacatctgccccgtgtacgaggggttttccctcccacatctgacccgaagactggacattgcgggaagggatatcaccagataccttatcaaactgctgctgctacgaggatacgctttcaatcactctgccgactttgaaacagttcgtatgattaaggagaagctgtgttatgtcggctacaacatcgaacaggagcagaagctggctctggagacaactgtgttagtggagagctacactctgcctgacggccgtatcatcaaggtaggcggtgaacggttcgaagcaccagaagcactcttccagccacatcttatcaacgtggaaggagtgggtgttgcggagcttctgttcaataccatccaggctgcagatatcgacacccggtccgaattctataagcacatcgttctctcaggcggcagtacaatgtatccagggctcccctcccgactcgaacgcgaactgaaacagctgtatctggagagagttctgaagggagatgttgaaaaattaagcaagtttaagattagaattgaagatccaccccgccggaaacacatggtttttctcgggggagccgtgctagcagacattatgaaggacaaggacaacttttggatgaccaggcaggagtatcaggagaagggcgttcgagtcttagaaaaactgggggtgaccgtcagatag

SEQ ID NO: 22849 - DNA, 1200 bp, synthetic construct
  misc_feature 1..1200: note = Description of Artificial Sequence: Synthetic coding sequence
  source 1..1200: mol_type = other DNA
atggacagccagggccggaaggtggtggtgtgcgacaacggcaccgggttcgttaagtgtggctatgccggctctaattttcctgagcatatttttcctgctctcgttgggaggccgattatacgatcaactaccaaggttggaaacatagagatcaagaataataaaaagatggatcttatggtcggagatgaggccagtgagttgcgttccatgttagaagtcaattaccccatggaaaatggtatcgtgaggaattgggatgatatgaaacacctgtgggactatacattcggccccgagaaactgaatatcgacactaggaattgcaagatactcctcaccgagccaccgatgaacccgacaaaaaatagagagaagattgtggaggtgatgtttgagacttatcaattcagcggcgtgtacgttgctattcaggctgtgctaactctatacgctcagggcctgctgaccggagttgtggtggactcaggcgatggagttacgcacatatgtccagtgtacgagggattctcgctgccacatcttacacggcgactcgacattgccgggagggatataacgcggtatctaatcaagctgctactgcttaggggatatgcctttaatcatagcgccgattttgaaacagtgagaatgatcaaagagaaactgtgctatgttggttataatatagaacaggaacaaaaattggcattagaaactaccgtgttagtggaatcctacacgctgccagatgggcggataattaaggtgggcggcgaacgcttcgaagcgcctgaggcccttttccaaccccatttgattaatgtggaaggcgtgggggtggcagagctgctgtttaatacgattcaggcggccgacattgataccaggtcagagttttataagcatattgtgttgagcggcggctctaccatgtacccaggcttaccttcccggctggagagagagctcaagcagctctacttggagagagtgcttaaaggagacgttgagaagctgagcaagtttaaaatccgcatagaggaccctccccgtaggaagcacatggtgttccttgggggtgcagtactggccgacatcatgaaggacaaggataacttctggatgacgcggcaggagtatcaggagaagggagttagggtgttagaaaaacttggagtgacggtccgttag

SEQ ID NO: 22850 - DNA, 1020 bp, synthetic construct
  misc_feature 1..1020: note = Description of Artificial Sequence: Synthetic coding sequence
  source 1..1020: mol_type = other DNA
atggtgggcgacgaggccagcgagctgcggagcatgctggaggtgaactatccaatggagaacggcatagtgcggaactgggatgacatgaaacatttgtgggattatactttcgggcctgaaaaactgaacatcgatactaggaattgcaaaattctactgacggagccacccatgaatcccaccaagaatagggagaaaatcgtggaggtgatgtttgagacctaccaatttagcggcgtgtatgtggcaattcaggctgtgctgactctctatgcccaggggcttttgaccggtgtggtggttgacagcggcgacggagtgacacatatttgccccgtgtatgagggttttagtctgcctcatcttacccggcgcttagacatcgccgggagagatatcacgaggtatctcatcaaactgctgctcctaagaggatatgcatttaaccactctgcagactttgagacagtgcggatgatcaaggaaaaactgtgttacgtgggttacaatatcgagcaggagcagaaactcgccctggaaaccactgttttggttgagtcatatactttgcctgacggccggatcataaaggtaggcggcgaacggtttgaagcccccgaggctctcttccaaccccacttaatcaacgtggagggagtgggcgtagccgagctgctctttaatactatccaggcagccgacatcgacaccaggagcgagttttacaagcatatcgtgctctcgggtggcagcacgatgtaccccggcctgccttctcgactggaacgcgagctcaaacagttatacctggagagagtgctgaaaggagatgtcgagaagttatcaaaattcaaaatcaggatcgaggatcctccccgcaggaaacatatggtgtttctaggaggtgcggtcttggctgacattatgaaagataaggataacttttggatgactcgacaggaataccaggagaagggtgtgcgggtccttgaaaaactgggcgtgactgtcaggtag

SEQ ID NO: 22851 - DNA, 918 bp, synthetic construct
  misc_feature 1..918: note = Description of Artificial Sequence: Synthetic coding sequence
  source 1..918: mol_type = other DNA
atggtgggcgacgaggccagcgagctgcggagcatgctggaggtgaactaccccatggagaacggcattgtgcgtaattgggacgatatgaaacacctgtgggactacacctttggcccggaaaaactgaatattgatacccgaaattgtaagattttattgacagagcctccgatgaaccctaccaaaaatcgggaaaagatagtagaggtgatgttcgagacctaccaattctctggagtgtatgtggctatccaggccgtcctgactttgtatgcacagggattgttgacaggcgtagtagtcgactccggggacggagtgactcacatttgcccagtttacgaaggattctcacttcctcatttgacaaggcgtctagatatcgccggtagggatatcacgaggtatctcatcaaactactcttactgcgcgggtacgcatttaatcactcagccgatttcgagacagtacggatgataaaggaaaaactgtgctatgtgggctataacatcgaacaggaacagaaacttgcactggaaacaaccgtgcttgtggagtcctacactcttccggatggcagaatcattaaggtcggaggggaacgcttcgaagctcctgaagccctgttccagcctcacttgatcaatgttgagggcgtgggcgtcgccgagctgttgttcaacactatacaggccgccgacatcgatacaaggagcgagttttacaagcacatcgtcctgagcggggggtccacaatgtacccagggcttccctctaggctggaacgtgaactcaagcaactgtatttggagagagtgcttaagggcgacgtggagaaactttccgtcagcatctctaagagcacgatcactaacattttactcaaaggttacaccgtcgtatgtgaaagttag

SEQ ID NO: 22852 - DNA, 1257 bp, synthetic construct
  misc_feature 1..1257: note = Description of Artificial Sequence: Synthetic coding sequence
  source 1..1257: mol_type = other DNA
atggccggccggctgcccgcctgcgtggtggactgcggcaccggctacactaagctaggatatgcaggcaataccgaaccccagttcataatcccatcatgtattgccatcaaggagagcgctaaggtgggagatcaggcccagcgtcgagtaatgaaaggtgttgatgatttggacttctttatcggggacgaagccatagagaaacctacctatgctactaaatggcctattcgccacggcattgttgaggattgggacttgatggaaagatttatggagcaggttatctttaaatacctgcgcgccgagccagaggaccactattttttacttactgagcctcccctgaacactcccgagaacagggaatacactgccgagattatgtttgaatctttcaacgtgcccggcctgtacattgcagtccaggcggtgcttgccctagctgcaagttggacctcccgccaggtgggcgagaggacattgacgggcaccgtgatcgatagcggggatggcgtcacgcacgttatacctgtggcagaaggctacgtgatcggaagctgcatcaaacacattcccattgccgggagagacattacctattttatccagcaattgctccgggatagagaggtgggtatacctccagagcagagtctggagactgccaaagctgtaaaggagagatactcatacgtttgtccagacttagttaaggaattcaacaagtacgataccgatgggtccaaatggataaagcaatacacagggatcaacgccatctctaaaaaggaattttctatagatgtcggatacgaacggttcctagggcccgaaatatttttccacccggagtttgcaaatcctgactttacccagccaatttctgaggtggtggacgaagtgattcagaactgccccatcgacgtccggagaccgctatacaagaacattgttctttccggcggctctaccatgtttcgggactttggtaggcgcctacaaagagatctgaagcgtactgtggatgcccggctgaaactctcagaggaactttccgggggtaggctgaagccaaagcccattgatgttcaggtgatcacccaccacatgcagaggtatgcagtatggttcggaggcagcatgctagcctctacccctgaattttaccaggtgtgtcacaccaagaaagactacgaagaaatcgggccaagtatttgcagacacaacccagtcttcggagtgatgtcctag

SEQ ID NO: 22853 - DNA, 1104 bp, synthetic construct
  misc_feature 1..1104: note = Description of Artificial Sequence: Synthetic coding sequence
  source 1..1104: mol_type = other DNA
atgaagggcgtggacgacctggacttcttcatcggcgacgaggccattgagaaacccacgtatgctactaagtggccgataagacacggaatcgttgaagattgggacctgatggagagattcatggagcaggttatctttaaatatcttagggccgaaccagaagaccactactttctgctgacagaaccacccctgaatacacctgaaaaccgagaatacacggcggaaataatgttcgagtccttcaacgtccctggactctatattgccgtgcaggccgtgctggcacttgctgcctcctggactagcaggcaggtgggggaacgcaccttgacaggcaccgttatcgatagtggagatggggtgacccacgtgatccctgttgccgaaggctacgttatcggaagttgcattaaacacatacccattgctggtcgggacataacttattttatccagcagctgttgcgagacagggaagttgggattccacccgagcagagtttggagactgctaaagccgttaaagagcgttatagctacgtgtgtcctgacctggtcaaggaatttaataagtatgacacagatggatctaagtggataaagcaatatacaggtatcaatgccatcagcaagaaagaatttagtatcgatgtggggtacgagagattcctaggcccggagatattctttcatccagaatttgccaatcctgattttactcagcccatttccgaggtcgtcgacgaggtgatccagaattgtccaatagatgtcaggagacctctctacaagaatattgttctgagcgggggatccacaatgttcagggactttggtcggcggttgcaacgtgatttaaaacggaccgtggatgcacggctgaaactgtctgaggaactgtccggcggacggctcaagccaaaaccaattgacgtgcaggtgataactcaccatatgcagcgctatgccgtatggtttggaggctcaatgctggcgtccacacccgagttttatcaggtatgtcacacaaagaaagattacgaggaaattggccccagcatctgtagacataatcccgtgttcggcgtgatgtcatag

SEQ ID NO: 22854 - DNA, 1071 bp, synthetic construct
  misc_feature 1..1071: note = Description of Artificial Sequence: Synthetic coding sequence
  source 1..1071: mol_type = other DNA
atgctggagatccagaaccacagcctgagcagcctgccctggcccatccggcacggtattgtggaagactgggacctaatggaacgatttatggaacaggtgatcttcaaataccttagggccgagcctgaagaccattactttttacttaccgagcctccattgaacactcccgagaatagagaatacaccgccgagatcatgttcgaaagctttaatgttcctggtctctatatcgcagtccaggccgttctggccctggctgccagttggacctctcgccaggttggagagagaactctcactggcaccgtgatcgactccggagacggtgtcacccatgtgatccctgtggccgagggatacgtgattggatcatgtatcaaacacatcccaatcgccgggcgggacatcacctacttcattcagcagcttttgcgcgatcgcgaggtcggcatacccccagaacagagcttggaaacagcaaaggccgtaaaggagaggtactcctatgtctgtcccgatctggtcaaggaattcaataagtacgacaccgacggaagcaaatggataaagcaatatacaggaatcaacgcgatttctaagaaagagttttctatagacgtcggctatgagaggtttttaggccccgagattttcttccatcctgaattcgccaatccagatttcacccagcctatttcagaggtcgtcgacgaagtcatccagaactgcccaatcgacgttaggaggcctctatataagaacattgtactttccggaggatccactatgttcagggatttcggtaggagattacagagggacctcaaaagaactgtagatgcccggcttaagctgagtgaagaactgagcggaggacgtctgaagcccaagcccatcgacgtgcaggtgatcacccatcacatgcaacgatacgcagtgtggtttggggggagtatgttggcatccacccctgaattttaccaggtctgtcacaccaagaaggattacgaggagattggcccctcaatttgtagacacaatcccgtgttcggcgtcatgagctag

SEQ ID NO: 22855 - DNA, 870 bp, synthetic construct
  misc_feature 1..870: note = Description of Artificial Sequence: Synthetic coding sequence
  source 1..870: mol_type = other DNA
atgttcgagagcttcaacgtgcccggcctgtacatcgccgtgcaggctgtactggctcttgcagctagttggacctcccggcaggttggtgaaagaaccctgactgggactgtcatagacagtggtgacggtgttacgcacgtaattcctgtggctgagggctatgtcatcggctcctgtatcaaacacatcccgatagccggacgagatatcacttactttatccagcagttgctacgagacagggaagttggcatcccccccgaacagagtctggaaacagcaaaggccgttaaggagcggtattcttacgtctgtcccgacctggtaaaggaattcaacaaatacgacacagatggctctaagtggattaaacagtacacagggattaatgctatctcaaaaaaagagtttagcatcgatgtgggatatgagaggtttcttggtccagaaatcttcttccatcctgaattcgccaaccctgatttcacccagccaatctcggaagttgtggacgaggtaatccagaattgccctattgacgtgcggcgacccctgtacaagaacattgttttatcaggaggtagcactatgttccgcgattttggacggcggttacaaagggatctgaagcgtaccgtggatgcacgactgaagctgagtgaggagctgtcaggagggagactgaaacccaaaccaatcgacgtgcaggtcattacacaccatatgcagagatatgcagtgtggttcggtggatctatgcttgccagcacacccgagttctatcaggtatgtcatactaaaaaggactatgaagaaattggcccatcaatctgtagacataatcccgttttcggggttatgtcctag

SEQ ID NO: 22856 - DNA, 1749 bp, synthetic construct
  misc_feature 1..1749: note = Description of Artificial Sequence: Synthetic coding sequence
  source 1..1749: mol_type = other DNA
atcgacatcgagagcatggacaccgacaaggacgacccccacggccgactggaatacacagagcaccaaggcagaatcaagaacgctagagaagcacactctcagattgaaaagaggcggagggacaagatgaatagttttattgacgagttagcatccctggtacccacgtgtaacgcgatgagccgcaagctcgataagttaacagtgttgaggatggccgtgcagcatatgaagactctgcggggcgccaccaatccgtataccgaggcaaattataagcccactttcctgtccgacgacgagctgaagcatcttattctccgtgccgccgatggcttcctgtttgtggttgggtgcgacagaggcaagatcttattcgtcagtgagagcgtgttcaagattctgaactacagccagaacgatttaatcgggcagtctctatttgactacctgcaccccaaagatatcgctaaggtcaaagagcagctatctagcagcgatacagctcctcgcgagaggctgatagatgccaaaactggactccccgtcaagactgatataacacccggaccctctaggttgtgctcaggagcccgccgtagctttttctgtagaatgaaatgtaataggccatccgtgaaggtggaggataaggacttcccctcaacatgcagcaaaaagaaggctgaccgtaaatcattttgcactatacatagtaccgggtacctcaaatcatggcctccaaccaagatggggctggatgaggacaatgaaccggacaatgaaggttgtaatctgagttgcctggtggcaattggacgcttacactcacacgtggtaccccagccggtgaacggggagatacgagtgaagagcatggagtacgtctctcgacatgcaatagatgggaagtttgtctttgttgatcagcgcgcaaccgctattctggcgtatttaccccaggagctcctgggtactagctgctatgagtatttccatcaagacgatattggccaccttgccgagtgccatcgacaagtactgcagactagagagaagatcaccacaaattgctataagttcaagattaaagatgggtcttttataactctcagatcaaggtggttcagcttcatgaacccatggactaaggaggtggaatacatagtgagtacgaatacggtcgttcttgccaatgtgctagaaggaggagaccccaccttccctcaactcacagccagcccacattccatggattcaatgctgccctccggggagggcgggcccaaaaggactcacccaaccgtgccgggaatccccgggggcacccgcgctggagccggcaaaattggtcgcatgattgcagaggagatcatggagatccaccgcattagaggctccagccctagctcatgcgggtcctcacctttgaatataaccagcacccccccgcccgatgcttcaagtcctggaggtaagaagattttaaatggcgggacaccagacattccctccagcggattgctctccggccaggcccaggaaaatcctggctatccctactctgactcgtctagcatcctaggagaaaaccctcatatcgggatcgatatgattgacaacgaccagggttcgagtagcccttctaacgacgaggcggcaatggccgttataatgtcattgctcgaagctgacgccggcctgggcggacctgttgacttctcggatctgccatggccgctttag

SEQ ID NO: 22857 - DNA, 1527 bp, synthetic construct
  misc_feature 1..1527: note = Description of Artificial Sequence: Synthetic coding sequence
  source 1..1527: mol_type = other DNA
atggccgaccagcggatggacatcagcagcaccatcagcgacttcatgtctcccggtccaaccgatttgttatcctctagcctcggtacctcaggtgtggactgcaaccgaaagcgaaaaggctcttctaccgactatcaggagagtatggatacagataaggatgacccccacggcaggctggaatacaccgaacaccagggacggatcaaaaacgcccgagaagcccacagtcagattgagaaaaggcgccgggacaaaatgaacagttttatagatgaactcgcttctctagtcccaacttgcaatgccatgtcccgtaaactggataagctgactgtgctgagaatggcggtgcagcacatgaaaacactccgtggagccactaatccatacaccgaggctaactataaacccaccttcttaagcgacgatgaactcaagcacctgatccttcgggccgccgatggctttctcttcgtggtcgggtgtgatcgaggtaagatcctcttcgtttctgaatctgtgttcaagattctcaactactcccaaaacgaccttatcggccagtcactgttcgactatctccaccccaaggacatcgccaaagtcaaggagcaactgtcgagtagtgacactgccccccgggaaagacttatcgacgctaagaccgggcttccagtgaaaaccgacattacaccaggcccctctaggctgtgtagtggggcgcggcgtagttttttctgtagaatgaaatgcaatagaccatccgtcaaggtagaggataaagattttccctcaacctgctcaaagaagaaagttctgcagactcgcgagaagatcactaccaactgttacaagtttaagataaaagacgggagttttataaccttacgctcccgttggttctcctttatgaacccttggacaaaggaggttgagtatatcgtgtccaccaatacagtggtcctggccaatgtcttggagggaggagaccccaccttcccgcagctcacggctagcccccactccatggactctatgttgccttccggcgagggcggacctaagaggactcaccccacagtgcccggaatacccgggggcacaagagcaggcgctggaaaaatcggacgcatgatagcagaggaaatcatggaaatccacagaataaggggctccagcccgtcatcctgcgggtctagtcctctgaatatcacctctacccctcctcccgatgccagttccccaggcggaaaaaaaattctcaacggaggaacccccgacatcccaagttctggcctgctgtctggacaggctcaggagaaccctggctacccctactctgacagctcgagtatcctgggtgagaatccccacatcggaatagacatgatcgacaacgatcagggctcctctagtccctctaatgacgaggcagccatggctgttatcatgtctctcctggaggcggatgcgggcctgggcgggccagtggacttctcagatttaccttggccactttag

SEQ ID NO: 22858 - DNA, 1878 bp, synthetic construct
  misc_feature 1..1878: note = Description of Artificial Sequence: Synthetic coding sequence
  source 1..1878: mol_type = other DNA
atggccgaccagcggatggacatcagcagcaccatcagcgacttcatgtcccctggccccacagatttattgagttcaagcctgggcacatctggggtagactgtaacaggaaacgcaagggatcctctactgattatcaagaaagtatggatactgataaagacgacccacacggccgattagaatatactgagcaccaaggtcgcataaagaatgcacgggaggcacacagccagatcgagaaacgccgccgggacaagatgaattcctttatcgacgaattggccagcctcgtgcccacgtgcaatgcaatgagtcgaaaactcgacaaattaacggtgctgcgcatggcagtccagcacatgaagacgctgaggggtgctacaaacccatataccgaggccaactacaaacctaccttccttagcgatgacgagctgaaacacttgattctgcgcgccgctgatggatttttgttcgtggtgggctgtgatcggggcaaaattctgttcgtgagcgaatccgtcttcaaaatcttgaactacagccagaacgatttaattggtcagagtctgttcgactacttacatccgaaggatatcgctaaagtaaaggagcagctctcttccagtgataccgcaccacgagagaggttgatagacgcaaaaactggactccccgtgaagacagatatcacgcccggaccgtcccggctgtgttctggtgccaggcgaagttttttttgccgcatgaagtgtaacagaccttccgtgaaggttgaggacaaagacttcccttcaacatgcagcaagaagaaggacagaaaaagtttctgtacaattcattctacgggatacctcaagagctggcctccaacaaagatgggcctcgacgaagacaacgagcctgataatgaggggtgtaacctgagctgcttggtcgctatcgggcggctgcatagccacgtagtgccacaacccgttaatggtgaaatccgtgttaaatcaatggaatatgttagccgccacgctatcgatggcaaatttgtgttcgtggaccaaagggccacggctatattggcatacctcccccaggaattgctaggcaccagttgctatgagtactttcaccaggacgacataggtcacctagccgagtgtcatagacaggtgctgcagacccgtgaaaaaatcacaactaattgttacaagttcaagatcaaggacggaagttttatcactctgcggtcaaggtggttttcctttatgaacccatggacgaaagaagtcgagtacattgtgagcacaaacactgttgtgttggcgaacgttcttgagggcggggacccgacttttccccagcttactgcctcacctcattccatggactccatgcttccgagtggggagggtgggcctaagcgaacccatcctacggtgcctgggattcctggtggcactagagctggtgcggggaaaattgggcgaatgatcgccgaagaaatcatggagattcatagaatccggggcagttcaccctcctcatgtggaagcagtcctcttaacatcacatcaacgcctcctccagatgctagtagtccaggcggtaaaaaaattctaaacggcggtaccccagacattccgtcttccggccttctttctgggcaagctcaagaaaacccgggctacccatactccgatagctccagcatcctgggagagaatccacacatcggcatcgatatgatagacaacgatcagggttccagctcccccagcaatgacgaggccgccatggctgtgatcatgtcattattggaggctgacgctggccttgggggcccagtggatttcagcgatctcccctggccgctttag

SEQ ID NO: 22859 - DNA, 1581 bp, synthetic construct
  misc_feature 1..1581: note = Description of Artificial Sequence: Synthetic coding sequence
  source 1..1581: mol_type = other DNA
atggccgaccagcggatggacatcagcagcaccatcagcgacttcatgtctcctggtccaactgatcttttgtcttcaagtctggggacctccggcgtggactgtaatcgtaagcgcaaagggtccagtaccgactatcaagaaagcatggatacagacaaggatgaccctcacgggagactcgaatataccgagcaccagggcaggataaagaacgctcgtgaggctcatagtcagatcgaaaagcggagacgggacaagatgaactcattcattgatgagctggccagcttggtgcctacatgcaacgcaatgtccagaaaacttgacaagctgactgttctaaggatggcggttcagcacatgaaaactttgcggggggcaaccaatccgtacactgaagctaattacaagccaacctttctctccgacgatgagctaaagcacctaatactccgcgcagctgatggattcctgttcgtagtcggctgcgacagaggaaaaatcctatttgttagtgagtctgtatttaagatcttgaactactcacaaaatgacctcatcggtcaatccctctttgattatctgcaccctaaggatatagccaaggtcaaagaacagctgtccagcagtgacactgcccctagggagaggcttattgacgcaaagacaggacttcccgttaaaaccgacatcacacctggcccaagcaggctgtgttcaggtgctcgcagatctttcttctgtcggatgaagtgcaataggccctcagtgaaggtggaggacaaggacttcccttcaacatgctctaaaaagaaggccgataggaagtctttttgcacaattcactctacaggttatctgaagagctggccccctaccaagatgggcctcgatgaggacaatgaacccgataacgaagggtgcaacctcagctgcctcgtggctattgggaggctacatagccatgtggtcccccagcccgtgaatggcgaaatcagagtcaaatcaatggagtacgtgtcgcggcatgcgatcgacgggaagtttgtgttcgtggaccagagggctaccgcgattctcgcgtacctgcctcaggaacttctgggtacctcttgttatgagtacttccatcaggatgacattggccatctcgccgagtgccacaggcaggtgctgcagactcgggagaagataaccactaattgttataagtttaagatcaaggacggctcattcattacacttcgttcaaggtggttcagtttcatgaatccttggacaaaagaggttgaatacatagtttccacaaacaccgttgttttgtccagagttgatacagggcatttgggccaggtggaatggtgtaccgtactctcaaggccagactccaggtttctcatcgcagggatgtttacagaacccacctcctggaaagccgggacacagcccagtcatagctctcaacaccctcctaccgcctggaccgcctgctgtcccctggaaaaagtggcccaacgcggacctaccccgctgtttcaggggttccagggcgagcccggcttaggtcaggagaaatag

SEQ ID NO: 22860 - DNA, 1878 bp, synthetic construct
  misc_feature 1..1878: note = Description of Artificial Sequence: Synthetic coding sequence
  source 1..1878: mol_type = other DNA
atggccgaccagcggatggacatcagcagcaccatcagcgacttcatgtcacccgggcccacagacttgctctctagcagcctggggacttctggagtggattgtaaccgtaagcgcaaggggtctagtacagattaccaggagtctatggacacagacaaggatgacccgcatggcaggctggagtacaccgaacatcagggccggatcaaaaatgcacgggaggcccatagccagatcgagaagaggaggagggacaagatgaattccttcatcgacgagctcgcctctttggtgccgacctgcaatgccatgtctagaaagctggataagctgaccgtgctccgaatggcagtccagcacatgaagacgcttaggggcgctactaacccatataccgaagctaattataaacctacgttcttaagcgatgatgagctgaagcacctgattttgagggccgctgacggttttctgttcgtggtggggtgtgatcggggtaagatcctgttcgtgtctgagtctgtgttcaagatccttaactattcccagaatgatctcattggacagagtctgttcgattatctgcaccctaaagatattgcaaaagttaaggagcagttgtcaagttctgatacagctccacgggagcgccttattgatgccaaaacgggattgccagtaaagacagatatcacccccggaccatcacgactgtgctcaggcgcacgtcggtctttcttctgccggatgaagtgtaacagaccctccgtaaaagtcgaggataaggatttcccgtcaacgtgtagtaaaaaaaaagatcgcaagtccttctgcaccatccatagtactggctacctcaaatcatggccgcctacaaagatggggctggacgaagataacgagccagacaacgaaggctgcaatctgtcttgtttggtcgcgattggacggttgcactctcatgttgtgccacagccagtcaatggagagatcagagtcaaaagcatggaatacgtgagtagacacgccatcgatggcaagttcgtgttcgtggaccagcgggcaactgccattcttgcctacctaccgcaagaattattagggacttcgtgctatgaatactttcaccaggacgacatagggcacctggctgaatgccataggcaggtgctgcagacacgcgagaagatcaccacgaactgttataagtttaaaataaaagatggcagctttatcaccctcagaagccggtggttctcatttatgaacccttggacaaaggaggtggaatacattgtgagtaccaatactgtcgttctggctaacgtgctggaggggggcgaccccacgtttcctcagctcactgccagcccacactccatggacagcatgctgccaagtggggagggcggccccaagcggactcacccgacggtgccggggatccctggcggcacgagagccggcgccggcaaaatcggtaggatgatcgcagaagagattatggagatccataggattcgagggtcatccccctcctcttgtggatcatccccattgaatatcacttcaactccaccacctgacgcatcatcccccgggggaaagaaaatacttaacgggggaacaccggacatcccttcttcgggcttgctgagcggccaagcccaggaaaaccccggctatccgtatagcgattctagcagtatcttgggggaaaaccctcatatcgggattgatatgatagataacgatcagggaagtagctccccatctaacgacgaagctgcgatggcagtgatcatgtctctcttagaggcagatgcagggctcggtggcccagtagacttctccgacctgccatggccactgtag

SEQ ID NO: 22861 - DNA, 1752 bp, synthetic construct
  misc_feature 1..1752: note = Description of Artificial Sequence: Synthetic coding sequence
  source 1..1752: mol_type = other DNA
atgatcaacatcgagagcatggacaccgacaaggacgacccccacgggcggttagaatatactgagcatcaaggacggattaaaaacgcgcgcgaagcccactctcagatcgaaaagaggcggagagacaagatgaatagcttcatcgatgaactggcttctctggtgcccacctgcaatgccatgtcccgcaagctggacaaactcaccgtgcttcgcatggctgttcaacacatgaagaccttgcgaggtgcaacgaacccctacacagaggcgaattacaagcctacctttcttagcgatgatgagctcaagcatctgatcctgagggccgccgacggattcctgttcgtagtaggctgcgataggggaaagatcctgttcgtgagcgaatctgtgtttaagatcttgaactacagccagaatgatttaatagggcagagcctgtttgactacctccacccgaaggatatcgctaaggtcaaggagcaactttcttcttcagacaccgcgccgcgagaaagactgatcgacgccaaaacaggtctgccggtgaaaacggatattaccccaggcccttcgcgtctttgtagcggggcccgaaggtctttcttctgtcgaatgaagtgtaaccggccttccgtgaaagtggaagacaaggactttccatcaacatgcagcaagaaaaaggctgatcgtaaaagtttttgtactattcactccacaggatatctgaagtcatggcccccaactaaaatgggcctagatgaagataacgagcctgataatgagggttgtaacctgagttgtctcgttgcaatcgggcgcctccacagccacgtggtacctcagcccgtcaatggggagatccgcgttaaatccatggaatacgttagtcgccatgctatcgatggtaagttcgtttttgtggaccagcgcgctacagccattctagcttatctaccacaggagctgcttggcaccagttgttacgagtatttccaccaggacgatattgggcatctcgctgaatgtcacaggcaggtattgcagacacgggaaaagatcaccacaaattgctataagtttaaaatcaaggatgggtccttcataacactgaggtctcgctggttcagcttcatgaatccatggacaaaagaggtcgaatatattgtttctacgaatacagtggtactggcgaacgttctggaaggaggtgaccccaccttcccacaattgaccgcctcccctcactccatggactcgatgctgcctagcggcgagggggggccaaaacggactcatccaactgtgccaggcatcccaggcggcaccagagccggagcgggtaaaattggccgaatgattgcagaggagattatggagattcatagaataagaggatctagtccgtctagctgtggctcttctcccttgaatataacctccacaccacccccagatgcctcatcccctggaggcaaaaagattctcaatggtggaacacctgacataccgtccagtgggttattatccggacaggcccaggagaatccagggtatccatactctgacagttccagtatattgggcgagaacccccatatcggcattgatatgattgacaacgatcagggctctagctcaccctcgaacgatgaagccgccatggccgtgatcatgtcgcttctggaggccgatgccgggctggggggacctgtggattttagcgacctgccgtggcccctgtag

SEQ ID NO: 22862 - DNA, 1881 bp, synthetic construct
  misc_feature 1..1881: note = Description of Artificial Sequence: Synthetic coding sequence
  source 1..1881: mol_type = other DNA
atggccgaccagcggatggacatcagcagcaccatcagcgacttcatgagtccaggacctaccgatctcctgagtagtagcctcggaacttccggggtggactgcaaccgcaagagaaaagggtccagcaccgattaccaggagagcatggatactgacaaggatgacccccatggccgtctggagtacacagagcatcaaggtagaatcaagaatgctagggaagcgcattcccagattgagaagcgcaggcgtgacaagatgaatagcttcatagacgagctggcctcactcgtccccacctgtaatgcaatgagtcgaaaactggataaattgaccgtcctccgcatggccgtccagcatatgaagaccctgcggggcgcaacaaacccctacacggaggctaattataaaccgaccttcctaagcgacgacgagctgaagcatttgattctgcgcgccgccgatggcttcctgtttgtcgtgggatgtgaccgcgggaaaatcttgttcgtgtccgagtctgtgttcaaaattcttaattactcccaaaatgacttaatcggccaaagtttatttgactacctccaccctaaggacattgccaaggtgaaagagcaactgtcgagcagtgacacagcccccagggaacggctcattgacgctaaaacaggactgccagttaaaactgatatcaccccgggaccttctagactatgttctggagcccgtagaagtttcttctgtaggatgaaatgtaataggcccagtgtgaaggttgaagacaaggactttccgtccacttgcagtaaaaagaaggctgaccgaaagagtttttgtacaatccatagcaccgggtatctaaagagctggccacccaccaagatgggcctcgacgaggataatgagcccgacaacgaagggtgtaacctatcctgcctggtcgccatcggcaggctacattctcatgttgtgccacagcctgtaaatggggaaatccgggttaaatccatggagtacgtcagtagacacgctatcgacgggaaattcgttttcgtcgatcaaagggctactgctattctggcttacctcccccaggaactcttagggaccagctgctatgagtacttccaccaagatgatatcggacatctagcagagtgccacagacaagtcctccagacccgtgagaagattaccactaattgctataagtttaaaatcaaagacggatctttcatcaccctgcgttctaggtggtttagctttatgaacccctggaccaaggaagttgagtatattgtttccacaaatactgtagtattggcgaacgtgctggagggtggcgatccgactttccctcagctcacagcgtcaccacacagcatggacagcatgcttcccagcggcgagggaggcccgaaaaggacacaccccacggttcctggaatacccgggggaacacgcgctggggctggaaagatcggccgaatgatagcagaggaaatcatggagatacaccgaatcaggggtagctccccaagttcgtgtgggagctcccccctgaacattacttctacaccacctcccgacgccagttcgcctggaggcaaaaagatactcaatgggggcacacctgatattccctcttctggcttactctctggtcaggcacaggaaaaccctggatatccttacagcgattccagctcgatcctgggcgagaatccacacattggcatcgatatgattgataacgatcagggatcttctagcccctccaacgatgaggccgccatggccgtgatcatgtccctgctggaggccgatgccggtctcgggggccccgttgacttttccgacctgccctggcccctttag

SEQ ID NO: 22863 - DNA, 1749 bp, synthetic construct
  misc_feature 1..1749: note = Description of Artificial Sequence: Synthetic coding sequence
  source 1..1749: mol_type = other DNA
atgatcaacatcgagagcatggacaccgacaaggacgacccccacggtcgccttgaatataccgaacatcaaggcaggattaaaaacgctcgcgaagcccactcgcaaatagagaaacgccgaagggacaagatgaacagcttcattgacgagctcgccagcctggtacctacctgtaatgccatgtcacgtaaactcgacaagctgactgtgttgagaatggcagtgcaacatatgaagacgctgcgaggagccaccaacccatacacagaagctaattacaaaccaactttcctgtctgatgacgaattaaaacaccttattctgagagccgcagacgggtttctgttcgtcgtgggctgcgatagggggaagattctctttgtaagtgagagcgttttcaaaattttgaactatagtcagaatgacttgattggacagtccctttttgattatttgcaccccaaagacatcgcaaaggtgaaggagcagctgagcagtagtgatacagcacctagggaaaggcttattgatgccaaaaccggtctgccagtgaaaacagacattacccctggccccagtaggttgtgcagcggcgcacgacggagttttttctgcaggatgaagtgcaaccgcccctccgtgaaggtcgaggacaaagacttcccatctacctgttcaaagaaaaaagataggaaaagcttctgtactattcatagcactggctatctgaaatcgtggcctcccacaaagatgggccttgatgaggacaacgaacccgataatgagggctgtaatttgagttgcctggttgccataggacgactccactcccacgtcgtgcctcagcctgtaaacggagagatcagggtgaaaagtatggaatacgtgtccaggcatgcgattgacgggaagttcgtgttcgtggatcagcgcgcgaccgcaatattggcctacctcccccaggagcttcttggcacttcttgctatgaatactttcaccaggacgacatcggacacttagctgagtgtcaccgccaggtactgcaaaccagagaaaaaatcacaactaactgttacaagttcaaaattaaggacggcagcttcatcaccctccggtctcgatggttcagcttcatgaacccctggacaaaggaggtcgagtacatcgtgagcacaaataccgttgtcttggctaacgtgctagaaggcggagaccccaccttcccacagcttacagcttccccgcatagtatggactccatgctgccgagcggggagggcggaccaaagagaacccatcctactgttcccggcattcctgggggcaccagagcaggggccggaaagattgggaggatgatcgcagaagagattatggaaatccatcggatccgcggcagttcacccagttcgtgcggatcttctccactgaatatcacttccacgccccctcctgatgcctcgtcaccaggagggaagaagatcctgaacggcggcacccccgacataccgagttcaggcctcctgtccggtcaggcacaggagaatccaggctacccttatagtgatagtagctcaatcctaggcgagaacccccacataggcatagatatgattgataacgaccaagggtccagctcaccgtccaacgacgaagcagcgatggccgtcatcatgagtttactcgaggccgatgcgggattagggggtcccgtggatttctctgacctgccctggcctctgtag

SEQ ID NO: 22864 - DNA, 219 bp, synthetic construct
  misc_feature 1..219: note = Description of Artificial Sequence: Synthetic coding sequence
  source 1..219: mol_type = other DNA
atgatcaacatcgagagcatggacaccgacaaggacgacccccacggtaggctggaatacacggagcaccagggccgcataaaaaacgcacgggaggcccactctcagatcgaaaagagaagaagggataagatgaactcatttatcgatgagctggcatctctggtgccgacctgcaatgccatgtcccggaagcttgacaagctcactgtgttgtag

SEQ ID NO: 22865 - DNA, 231 bp, synthetic construct
  misc_feature 1..231: note = Description of Artificial Sequence: Synthetic coding sequence
  source 1..231: mol_type = other DNA
atggccgaccagcggatggacatcagcagcaccatcagcgacttcatgtcacctggaccaacagatctgctctcctcctcactcggtactagcggcgtcgactgtaaccgaaagcgaaagggctcttcaaccgactaccaagagagcatggatactgataaggacgaccctcatggccggttggagtataccgaacatcaagggcgtatcaaaaatgccagggaggcctag

SEQ ID NO: 22866 - DNA, 72 bp, synthetic construct
  misc_feature 1..72: note = Description of Artificial Sequence: Synthetic coding sequence
  source 1..72: mol_type = other DNA
atggccgaccagcggatggacatcagcagcaccatcagcgacttcatgtcgccaggtccgactgacctttag

SEQ ID NO: 22867 - DNA, 408 bp, synthetic construct
  misc_feature 1..408: note = Description of Artificial Sequence: Synthetic coding sequence
  source 1..408: mol_type = other DNA
atggccgaccagcggatggacatcagcagcaccatcagcgacttcatgagccccggaccaaccgacctgttgtccagctccctggggacaagtggagtcgattgtaatcgaaagcgcaaaggtagttcaactgattatcaggagtctatggatactgataaagacgatccccatggacgccttgaatacactgaacatcaggggaggatcaaaaacgcacgggaagctcatagccagattgaaaaacggaggcgggacaagatgaatagctttatcgatgagctggcatcactggtgccaacatgtaatgccatgagtcgtaagctggacaagctaacagtactccggatggcggtccagcatatgaagacattaaggggtgccaccaacccctatacggaggcttag

SEQ ID NO: 22868 - DNA, 141 bp, synthetic construct
  misc_feature 1..141: note = Description of Artificial Sequence: Synthetic coding sequence
  source 1..141: mol_type = other DNA
atgatcaacatcgagagcatggacaccgacaaggacgacccccacgggagattagaatacactgagcaccagggccgaattaaaaacgcacgcgaggcacactcacagatcgaaaaacggcggagggacaagatgaattag

SEQ ID NO: 22869 - DNA, 426 bp, synthetic construct
  misc_feature 1..426: note = Description of Artificial Sequence: Synthetic coding sequence
  source 1..426: mol_type = other DNA
atgatcaacatcgagagcatggacaccgacaaggacgacccccacggtcgtctagaatacactgagcaccagggaaggatcaaaaatgcgcgagaagcccacagccagattgagaagcgcagaagggacaagatgaacagtttcattgacgagctagcctcactggtccccacatgcaatgcaatgtctagaaaactagacaaattgaccgtcctgcgcatggctgtgcagcacatgaaaaccctcaggggcgcaactaacccatacacagaggccaattacaagccgactttcttgtcggacgacgaactgaaacatctgatcctgcgggccgctgatggattcctgtttgtggtcggatgtgatagaggaaaaatactgtttgtgtcagagagcgtgtttaagatacttaattactcacagtag

SEQ ID NO: 22870 - DNA, 306 bp, synthetic construct
  misc_feature 1..306: note = Description of Artificial Sequence: Synthetic coding sequence
  source 1..306: mol_type = other DNA
atggccgaccagcggatggacatcagcagcaccatcagcgacttcatgtcccccgggcctacagatctgttgagttcctctttaggcacctccggcgtagactgcaataggaaacgcaaggggtcatccaccgattatcaggaaagcatggacacagacaaggatgacccacacggcagactcgagtacactgagcaccaggggaggattaaaaatgcacgggaggctcactcacagatcgagaagagacggcgtgacaaaatgaattcgtttattgatgaactagcatctctggtgccaacatag

SEQ ID NO: 22871 - DNA, 180 bp, synthetic construct
  misc_feature 1..180: note = Description of Artificial Sequence: Synthetic coding sequence
  source 1..180: mol_type = other DNA
atggccgaccagcggatggacatcagcagcaccatcagcgacttcatgtctccgggtcctaccgatctcctcagtagcagcctcggcacctccggtgtggactgcaataggaaacgcaaagggtcctcaactgattaccaggaatccatggacacagataaggatgacccccatggttag

SEQ ID NO: 22872 - DNA, 1683 bp, synthetic construct
  misc_feature 1..1683: note = Description of Artificial Sequence: Synthetic coding sequence
  source 1..1683: mol_type = other DNA
atggagcccctgcagcagcagcagcagcagcagcagcagcagcagaagcaacctcacctcgctccattacagatggacgcccgagagaagcaggggcagcagatgcgggaagcccagtttctgtacgctcagaaactcgtcacacaaccaacactgctgagcgccacggcaggaagaccttcagggtcaacccctcttgggcctttggccagggtacctcctacggccgctgtagctcaggtgtttgagcgcggaaacatgaattcagaacccgaggaggaggacggcggactagaagacgaggatggagatgacgaggtggctgaagtagctgaaaaggagactcaggctgcgtccaaatattttcacgtccagaaagtagcaagacaggatcccagagtggcacctatgtctaacctgcttccagctccagggttgccaccccacggtcaacaggccaaggaggaccacaccaaagacgcctcaaaggctagccctagcgtgagcacggccggccaaccaaattggaacctcgacgagcagttgaaacagaacggaggactggcatggtccgacgatgcggatggagggcgggggcgggagatatctcgcgatttcgctaagctgtacgaattagatggggatcctgaacgcaaagaattcctcgatgatctgttcgtctttatgcagaaaagaggcacccccataaaccgaatccccatcatggctaagcaaattctggatctgtacatgctttacaagttggtcacggagaagggaggcttagtggaaatcattaacaaaaaaatatggagggaaatcaccaaaggacttaatctccccacctccatcacaagtgccgcgttcacgctgcgaactcaatatatgaaatatctgtacgcctacgagtgcgaaaaaaaagctttaagtagtccagccgagctgcaggccgcaatcgatgggaatagacgcgaaggccggaggccatcatactcctcatcactctttggctacagtcccgcggccgctactgccgccgctgccgctggagctcctgcgttattgtctccaccgaaaatcaggttcccgatacttggccttgggtctagcagcggtacaaacacctcctcaccccgaatcagccctgcgacaacccttcgaaagggagacggggcccctgtaacaacagtgccagtccccaacagactggccgtaccagtcacactggcgtcccaacaagcaggtacgaggactgccgcattggaacaactgagagagcgtctcgagtcaggagagcctgctgagaagaaggcttcccgattgtccgaggaggagcagaggctggtgcaacaagccttccaaaggaatttcttcagtatggctcgccagctcccgatgaagatcagaattaacggtagggaggaccgcgccgaagcttcagcagccgccctcaatttaaccacctcctctatagggtccatcaatatgtccgtggacatagacgggaccacgtatgctggcgtgctgttcgctcagaagcccgtcgttcatctgattaccggctcagcacctcagagcctagggagctccgccagctcctcatcatcatcccattgtagtccaagcccaacttcctcaagggggacgccttcagctgaaccctctacctcttggagtctgtag

SEQ ID NO: 22873 - DNA, 1335 bp, synthetic construct
  misc_feature 1..1335: note = Description of Artificial Sequence: Synthetic coding sequence
  source 1..1335: mol_type = other DNA
atggagcccctgcagcagcagcagcagcagcagcagcagcagcagaaacagccacatctggctcccctgcagatggacgctcgagaaaaacagggtcagcagatgagagaggcccaattcctttatgcccagaagctcgtgacccagccaactctgttgtcagctaccgcagggcggccgagtggttctacccctttagggcccctggcgagggtgccgcccactgccgcagtggcacaagtcttcgagaggggtaacatgaactctgaacccgaagaagaagacggcggactcgaggacgaagatggcgatgacgaggttgccgaggtggcggagaaggaaacacaggctgcctccaagtactttcatgtgcagaaagttgctcggcaggacccacgagtggcgcctatgagcaatctactcccagccccgggcttgccaccccatggtcaacaagcaaaagaagaccacaccaaggatgcttccaaagcatctccttccgtgagcacggctggacaacccaattggaacctggacgaacagctgaagcagaatgggggcctggcatggagcgatgatgcagacggcggaaggggcagggagatctctcgtgacttcgctaaactctacgagctggacggagacccggagcggaaggaattcctcgacgacctgttcgtgtttatgcaaaagagggggacacccataaacagaattcctatcatggccaaacagatcctggacttgtatatgttatacaaacttgtgaccgagaaaggcgggttagtggagatcatcaataaaaaaatttggcgggaaattaccaaaggcctgaacctgcctacgagcatcaccagcgctgcctttacgctgcgcacgcagtatatgaaatacctttacgcctacgagtgcgagaaaaaagcgctcagctcgcccgcggagctgcaagccgccattgatggtaatcggcgagaaggcagaagaccatcatactcatctagcttgttcggttacagccccgcagccgccactgccgccgcagctgctggcgctccagccttactgtctccccccaaaattaggttccctatcttgggcttgggcagcagttcaggtaccaacacgtccagccctcggatcagtcccgctacaacactgaggaaaggcgacggagctcctgtgaccaccgtacctgtccctaatcgactcgctgttcccgtgacactcgcctcacagcaggccgggaccaggaccgcagccttggagcaattaagagagagactggaaagtggtgaacccgccgagaaaaaagcatctggcacttggtgccagtag

SEQ ID NO: 22874 - DNA, 1413 bp, synthetic construct
  misc_feature 1..1413: note = Description of Artificial Sequence: Synthetic coding sequence
  source 1..1413: mol_type = other DNA
atggagcccctgcagcagcagcagcagcagcagcagcagcagcagaaacagccgcatttggctcctctgcaaatggacgcaagagaaaagcagggccagcagatgagagaggcccagtttctgtacgcccagaaactggtgacccagcctactttgctgagtgctaccgcaggtcgaccttccggttccactcctctcggcccactggctcgcgtcccgccaaccgcagccgtagctcaggtgttcgagaggggcaatatgaacagcgaaccagaagaggaggatggggggctggaggacgaagatggggatgacgaagtggccgaagtcgctgaaaaggaaacacaagcggcttcaaagtattttcatgtccagaaggtggcacggcaggatccccgcgtcgcacccatgtctaatcttcttcctgcgccaggcctgcctccgcatggacagcaggctaaggaggatcacaccaaggatgccagtaaggcctcacccagcgtgtccaccgcaggccagccaaattggaacctcgacgaacagctgaagcagaacggcggcttggcttggtctgatgacgcggacgggggtagggggcgcgaaatcagccgtgactttgcaaaactgtacgaactagacggggaccctgaaaggaaggagtttttggatgacttgtttgttttcatgcaaaaaagagggactccaatcaatcgcattcccatcatggccaagcaaattcttgatttgtatatgctatacaagttggtgacagaaaagggggggctcgtggagatcattaataagaaaatttggagagaaattacaaaggggcttaatctacccacatccatcacttccgctgcttttaccttgcgcacgcagtatatgaaatatctttacgcttatgagtgtgagaaaaaggcgctgagtagtcctgccgagctccaggctgcaatcgacggaaatcggcgggagggacgcagacccagttattcttcatctctgttcgggtatagccctgccgcggccactgcagcagcagccgcaggggctcctgccctgttgtctccccctaagatccgcttccctatcctgggactgggcagcagttccggaactaacacttcctctcctcgtatcagtcccgccaccacgctgcgtaagggcgacggcgcaccagtaaccaccgtacccgttcccaataggctggccgtccctgtcactctagcttcacagcaggccgggaccagaactgccgccctggagcaacttcgggagagactcgagtctggggagcccgcggaaaagaaagcaagccgactgtcggaggaggagcagaggctggtccagcaggccttccagcggaatttcttttctatggccagacagctgtcaatcctctacgtgttctag

SEQ ID NO: 22875 - DNA, 7935 bp, synthetic construct
  misc_feature 1..7935: note = Description of Artificial Sequence: Synthetic coding sequence
  source 1..7935: mol_type = other DNA
atgggcgagcacggcctggagctggccagcatgatccccgccctgcgggagttaggctccgcaacaccagaggagtacaatacggtggtccagaaacccaggcagatcctttgtcagttcatcgaccgcattctgaccgatgtgaatgtcgtcgctgtggagctggtgaagaagacagattctcagccgacgtccgtcatgctgctggatttcattcagcacattatgaaatcctcaccgttaatgttcgtgaacgtcagcggatcacacgaggctaagggctcttgcattgagtttagcaattggatcataactcgcttgctcaggatagctgccaccccctcctgccatctgctgcataagaagatctgcgaggtcatttgcagcttgctgtttctgttcaagtcaaagtctcctgcaattttcggcgtgttaaccaaagagcttttgcaactgtttgaggacctggtgtacttgcatcgcagaaacgttatgggtcacgccgtcgaatggccagtagtgatgagccgatttctgtcccagctagatgagcatatggggtatctgcagtcagcccctctgcagctgatgagcatgcagaacttggaatttatcgaagtgaccctgctaatggtgctcacgcggattatcgccatagttttctttagaaggcaggagttgctattgtggcaaattggatgcgtactgttagagtatggctcgccgaagatcaaaagcctcgccatcagttttcttacagaactgttccaactcggcgggctcccagcacagcccgcttctacattcttcagctcgtttctagagctcttaaagcatttagtggaaatggacaccgaccagctcaagctgtacgaggagccactctccaaactgataaagactttatttccttttgaggctgaagcctatcgaaacatcgagcccgtgtatctgaacatgcttctagagaaactttgtgtaatgtttgaggacggagtgttaatgagactaaaatctgacttacttaaggcagccctctgccacctcctccagtattttctcaagttcgtacccgccggctatgaaagtgctctccaggtacgtaaagtctatgtgcggaatatctgcaaggccctcctggatgtgttggggatcgaggttgacgccgaatatctcctggggccactgtacgctgctctgaagatggagtccatggaaattattgaagaaatacaatgccagacccaacaggaaaacctctcatcaaattccgacggcatctcaccaaagaggcggcgcctttcttcctccctaaacccaagtaagcgtgcacctaaacaaacagaagagataaagcacgtagacatgaatcagaagtccatcctgtggagcgctcttaaacaaaaggcagagagcctgcaaatatcactggaatactccgggctcaagaaccctgtgatcgaaatgctggaaggaatagcggtcgtccttcaactgacagctctgtgtacagtgcactgctctcatcagaatatgaactgtaggaccttcaaggactgtcagcacaaaagtaaaaagaaaccctctgtggtgatcacatggatgtccctcgacttctacacgaaggtactcaaatcctgcagatccctcctagaatctgttcagaagctggacctggaggccactatcgacaaagtagttaaaatctatgatgctctcatctacatgcaggttaactcaagcttcgaagatcacatactcgaggatctgtgtggaatgcttagcctgccctggatttactctcactctgatgacggctgcttgaaactcacaacctttgctgctaacctgctgacattaagctgtagaatctctgattcatattctcctcaggcccaaagcaggtgcgtcttccttttgactctttttccgcggcggatcttccttgagtggaggaccgccgtgtataactgggcactccagagctcacacgaagtgatcagggcctcttgtgtatctgggttttttatactgttacagcagcagaactcctgcaacagggttcccaagatactgattgataaggtcaaggatgactctgatattgtcaagaaagaattcgcctcaattcttggtcagttagtctgcacgttgcatgggatgttttacctcacaagctcccttaccgagccttttagcgagcacgggcatgtggacttgttctgtcgcaacctcaaagccacaagccagcatgaatgtagttctagccagctgaaagcctctgtctgtaaacccttcctgttcttgctgaagaagaagatcccctcgccagttaaactggcctttattgataacctgcaccacttgtgcaagcatctggactttagagaggacgagactgatgtgaaagccgtgcttgggaccctgctgaacctgatggaggaccctgataaggatgtgagagtggctttctccggaaacattaagcacatcctggagtccttagactctgaagatggattcattaaggagcttttcgtcctgcggatgaaggaagcttacactcatgctcaaatcagtagaaataatgaactaaaagacactctgatcttgactactggcgatatagggagagccgcaaaaggagacttggtcccctttgcgctcctgcaccttctgcattgtctcttgtccaaaagtgcctccgtgtctggcgctgcctacactgaaattagggcactagtggctgccaagtcagtcaaactgcagagctttttctcccagtacaaaaagcctatctgccagtttctcgttgaatctctccactcaagtcagatgacggcactcccgaacaccccctgccagaatgccgacgtacgaaaacaggacgtggctcatcagagagagatggcactcaataccctctctgagattgcgaacgtattcgacttcccggatcttaaccgttttttgaccagaactctgcaggtcctgctgcctgacttggctgcaaaagccagcccagctgctagcgcactcatccgcactttgggaaagcaactcaacgtcaatcgtcgcgagatactcattaacaattttaaatatattttctctcatttagtttgttcatgcagcaaagacgagctagaaagagctctgcactacctaaagaacgagacggagatcgaattggggtcacttcttcggcaagatttccaaggcctgcataatgaattactgctgcgcatcggcgaacactaccagcaggttttcaacggtctgtccattctggcctccttcgccagttcggacgatccataccagggccctcgcgacattatttcccctgagctgatggctgactacctgcagcccaaactcctggggatattggctttctttaatatgcagctcctgtcatccagcgtgggtattgaggataaaaaaatggcattgaattcactcatgtccctcatgaagctcatggggccgaaacacgtctccagtgtgcgtgtgaaaatgatgactactttgcgtacgggcctgcggtttaaagacgattttcccgaactttgctgcagagcttgggattgcttcgtgaggtgcttagaccatgcttgcctgggatcccttctctctcacgtcatcgtggcattgctgccactgatccatatccagccaaaggaaacagcagctatctttcattacctaatcatagagaatcgcgacgctgtccaggactttctgcatgagatttactttctgcccgaccacccggagttgaagaagattaaagctgtcctccaggagtatcgaaaggagacctcggaatcaactgacctgcaaactacactgcagctaagcatgaaagccattcagcatgaaaatgtggatgttcgcatccatgcattaacctctctgaaagagactttgtataaaaaccaagaaaaactgattaaatacgcaacagattcggaaacagtggaacccatcatcagccagctggtgaccgttttactcaaaggatgccaggacgccaactcacaggcgcgtttgttgtgcggagagtgtctgggagaactgggcgccattgatcccgggcgtttggactttagcacaaccgaaacacagggaaaggacttcacttttgtgacaggcgtagaagattccagtttcgcgtatgggttgcttatggagctcacgcgagcatatctcgcctatgcagataatagccgtgcccaggatagcgccgcctacgccatccaagaactgctgtctatatacgattgccgtgagatggaaaccaatggcccaggccatcagctgtggaggcgtttcccagagcacgtgcgcgagatacttgagccgcacttgaatacccggtacaaatccagtcaaaagagtactgactggagcggggtgaagaaacctatttacctctctaaattaggaagcaattttgccgagtggtctgctagctgggcaggctatttaattactaaagtcagacacgatctcgccagtaagatctttacctgctgttctatcatgatgaagcacgacttcaaagtcactatatacctactgccgcatatcctggtgtatgtactgctcggttgcaaccaggaggaccagcaggaagtctacgcagaaattatggcagtgctgaaacatgacgaccagcataccatcaatacccaggatattgccagtgatctgtgtcaactctccactcaaaccgtcttttccatgctggaccacttgacacaatgggctagacacaaattccaagctctgaaagcagagaagtgccctcatagtaagtctaatcgtaacaaagttgactccatggtctccaccgtggattatgaggactatcaatctgtgactagatttctggacctgattccacaggatactttagcagtggcttcttttcgctcaaaagcatataccagggcggtcatgcactttgagtctttcatcactgagaagaagcagaacatccaagagcatctggggttcctgcagaagctttacgctgccatgcatgaacccgacggagtggcaggggtatcagccattcgaaaagctgagccatcactcaaggaacagattctcgagcacgagtcattgggcctgttgagggatgccaccgcctgctacgaccgggcaatccagctagaaccagatcaaatcatccactatcacggggtggtcaagtctatgcttggtttgggtcagctgagcaccgtcatcacgcaggtaaatggtgtacatgccaataggagcgagtggaccgatgaactgaacacgtatagagtggaggcagcctggaagttgagtcagtgggatctggtggagaattacctcgccgctgacgggaaatcgacaacatggtcagtcagactcggacagctgctgttaagcgcaaagaagcgcgatataacagcattctacgatagtttgaagcttgttcgcgccgagcagattgttccgctgtctgcggcaagtttcgagaggggaagttatcaacgcggctatgagtacatcgtgaggctccacatgctgtgcgagctggagcactcgattaagccactcttccaacattcccctggggacagttcccaagaggattccctgaactgggtggcacggctcgagatgactcagaactcttatagggctaaagaacccatcctagctctcaggcgtgcattgttgtccctgaataagaggcccgattataacgagatggtgggtgaatgttggctgcagtctgcccgggtggcaaggaaggctggacatcaccagactgcgtataatgccctgttaaatgcgggagaatcaaggcttgccgaactgtatgtagagcgcgccaagtggctgtggtcaaaaggagatgtccaccaggctttgattgtgctccagaagggcgtcgagttatgttttcccgaaaacgagactcctcctgaagggaagaacatgctgatccatgggagagccatgctccttgtggggaggttcatggaggaaaccgccaacttcgaatccaacgccatcatgaaaaagtacaaagacgtgaccgcctgtctgcccgagtgggaggacgggcacttttacctggcaaagtattacgataagcttatgccaatggtgaccgacaacaagatggaaaaacaaggcgatctcatcaggtacatagttctgcattttggacgctcactccagtacgggaatcaatttatttaccaatcgatgccacggatgttaactttgtggctcgattatggcacaaaggcctacgaatgggaaaaagctggccggtccgatcgagtacagatgcggaacgaccttggcaaaattaataaggtcattaccgaacacaccaattacctggctccttatcagttcctcacagcattctcacaactcatcagtcgcatttgtcattcccacgatgaggtgttcgtggtgctaatggaaatcatagctaaagtgttcctagcctacccacagcaagccatgtggatgatgacggcagtgagtaaaagctcctaccccatgagggttaaccgatgcaaggagatcttgaacaaggctattcatatgaaaaagtccctggagaagttcgtgggtgacgctactcgcctgaccgataaacttttggaactgtgtaacaaacccgtggatgggagcagctcaactttgagcatgagtacacattttaaaatgctgaagaaactggtagaagaagcaaccttttccgagattctgatcccgctccagtccgtaatgatccccactttgccaagcatcctgggcactcacgcaaatcacgccagccatgaaccttttccaggtcactgggcctacattgcaggctttgatgacatggtggagatcctcgcttctctgcaaaaacctaagaaaataagcttgaagggcagtgacggaaagttctacattatgatgtgtaagccaaaggatgatctccggaaggattgtagactcatggaatttaattctctaatcaacaaatgcctgagaaaggacgccgagagccgcaggagagaactacatatccgaacttatgcagtcattccgttaaacgatgagtgcggcattattgaatgggtgaataataccgccggcctccggcccatactgaccaaattatataaagaaaagggggtgtatatgacaggaaaggaattgcgtcagtgcatgctgccaaaaagtgctgctctgtccgagaaacttaaggtttttcgagaattcctgttgccacgtcacccacccatatttcacgaatggttcctgcgaacattcccagatcccacatcctggtatagctctcgcagcgcatactgtaggtccacagccgtgatgtctatggttggttacatcctcggactcggggacagacacggggagaacatcctgtttgattctttaaccggagagtgtgtgcatgtggattttaactgcctgtttaataaaggagagacgtttgaggtgcccgaaatcgtgccatttcgcctaacccacaatatggtgaacggaatggggcccatgggcacagaggggttgtttcggcgagcatgtgaagttacaatgcggttaatgagggaccaaagggaaccactgatgtccgtcctgaaaacctttctccatgacccattggtggaatggtccaaacccgtgaagggacacagcaaggccccattgaacgagaccggagaggtggtcaacgagaaggcaaagacccatgtgttagacattgagcagcgactgcagggtgttataaagaccagaaacagagtgaccggactccctctttctattgagggacacgttcattacctaatccaggaggcaactgacgagaatctgttatgtcagatgtacctcggatggacaccttacatgtag

SEQ ID NO: 22876 - DNA, 7743 bp, synthetic construct
  misc_feature 1..7743: note = Description of Artificial Sequence: Synthetic coding sequence
  source 1..7743: mol_type = other DNA
atgggcgagcacggcctggagctggccagcatgatccccgccctgcgagaactgggctccgcgacccccgaggaatacaatacggtggtgcaaaagccacggcagatcttatgtcaatttatcgaccgcatcctgacagatgtgaatgtggtggcggtcgaactggtgaagaagaccgacagccagccaacgagcgtgatgctcctggatttcattcagcacattatgaagtcttccccccttatgttcgtgaatgtcagtgggtcacacgaggcgaaggggagttgtatcgaattcagtaattggatcatcaccaggttgcttcgcatcgcagctacgcctagttgccaccttctgcataagaagatatgtgaagtcatttgtagtctcctattcttgtttaaaagcaagtctccggcaatctttggcgtgctgactaaggagctcctgcagctgtttgaggacttggtctatttgcataggcggaatgtaatgggacatgcggtcgagtggccagtggtaatgtctaggtttctgtcccaactggacgaacatatgggataccttcaatccgcaccgcttcagctcatgtccatgcagaacttagagtttattgaggtgaccttgctgatggtccttacaaggatcatcgcaatagtgttcttccggagacaggagctcttgttgtggcagattggttgcgtgctgttggaatatggcagccctaaaatcaagagcctggcaatatcgtttctcacagagctttttcagctaggggggctccccgctcagccagcttctactttttttagctcttttctagagctgttaaagcacttggtcgagatggacactgatcagttaaagctctacgaagagcctctctccaagctgatcaagacgctgttcccctttgaagccgaggcatatcgcaatattgagccagtgtatctgaacatgctcttggagaagctttgcgtcatgtttgaagatggcgtcctgatgcgcctgaaatctgaccttctgaaggccgctctttgtcacctcctccagtactttctgaaatttgtgcctgcagggtatgagtcagcactacaggtcagaaaagtgtacgttagaaatatctgcaaggctctgctcgacgtattggggatcgaggtggatgccgagtacctgctcggtccactgtacgcagcccttaagatggagagcatggaaatcattgaagagatccaatgtcaaactcaacaggagaatctttctagcaactccgatgggatcagccccaagaggcgaaggctctcatcgtcactcaacccatccaagcgggcaccaaagcagaccgaggatcgtaccttcaaagactgtcagcacaagtccaagaagaagccctcagttgtgattacctggatgtcattggatttttacacaaaagtgttgaagtcatgcagatctctcctggagtctgtccagaagttagatctggaggccaccatcgataaggtcgtgaaaatctacgacgcactgatatacatgcaagtgaactctagcttcgaagatcatatcttggaagacctgtgtgggatgctgtcactgccatggatttattctcattccgacgatggttgtctgaaactcaccacattcgctgccaacctgctaaccctgtcatgccggataagcgatagctattcccctcaggcacaaagccggtgtgtgttccttctgacccttttccctaggcggatttttctggagtggagaactgctgtgtacaattgggccctgcaatcgtcccacgaggtcattagagcttcgtgcgtgagcggattctttatcctgcttcaacagcagaacagctgtaaccgcgtccccaagatcctgattgataaggtcaaggatgatagcgatatcgttaagaaggaatttgcctcaatactcggtcagcttgtatgcacactccatggtatgttttacttaacttcaagccttacggagcctttctcagaacatggccatgtggatcttttctgccggaacctgaaagctacctcccaacacgagtgttcctcatctcaactcaaagctagtgtgtgcaaaccattcctgttcctgctcaagaaaaagattcctagtcctgtgaaactcgccttcatcgataacctccaccacctgtgtaagcatctagacttccgagaggacgagacagacgtgaaagccgtcctgggaacactgcttaacctgatggaggaccccgataaagacgttcgagtggcattcagcgggaacattaagcacattttggagagtttagactccgaggacggattcatcaaagagctgtttgtgctgcgtatgaaagaggcttatacgcatgcccagatatctcggaataatgaactcaaggataccttgattctcacaactggcgacattggtagggccgccaaaggtgatttagttcctttcgccctgctgcacctcctgcactgcctgctctcaaagtctgcatccgtgtctggggctgcctatactgagattcgagccctggtcgccgccaaatctgtgaaactgcaaagctttttttctcagtacaagaagccaatctgccagtttctggttgaaagtctgcacagctcacagatgaccgccctgccaaatacaccgtgccaaaatgcagatgttagaaaacaagacgtggctcatcagagggagatggctctaaataccttgtccgagatcgccaatgtctttgacttcccagacctcaaccggtttctgacgagaacactccaagtgctgctcccagaccttgcagccaaggctagtcccgccgcaagtgcccttatacgcactctgggaaagcagctcaatgtgaatcgcagagagatcctcattaacaattttaagtacattttcagccaccttgtgtgcagctgcagcaaagatgaactggaaagagctctgcattacttgaagaatgagaccgagatcgaactgggatcactgctgcgccaagactttcagggcttacacaatgaactactgctgaggatcggcgagcactaccagcaggtgttcaacgggctcagcatcttggctagttttgccagtagcgatgacccatatcaggggccccgtgacatcatctccccggagctaatggcagactatttgcagcctaaactgctgggcattttagcattcttcaatatgcagcttctgagtagctctgtcggtatcgaggataagaaaatggctctcaactctctgatgtcccttatgaaacttatgggaccgaagcatgtttcgtctgttagggtgaagatgatgacaactctacgcacgggcctgaggtttaaagacgattttccagaactgtgttgccgggcttgggattgctttgtccggtgcttagatcatgcgtgcctcggaagcctactgtcccatgtcatagtggccctgcttccacttattcacatccaacctaaagagacagccgccattttccactatctaattattgaaaaccgggacgccgttcaggactttttacatgaaatctactttcttcctgaccaccctgagctcaagaagatcaaggcagtactgcaggagtatagaaaggaaacttcggaaagcactgacctgcaaacaacgctgcagctctccatgaaagccatacaacacgagaacgtcgacgtcaggattcacgctctgacatccctcaaggagacactctacaagaaccaagagaagctgattaaatatgctacagacagcgagacggtcgaacctataattagccagctggtgaccgttctgttgaagggatgtcaggacgcaaactctcaagctcgattgctctgtggggaatgcctcggagagctcggagccatagatcccggcaggctagacttctctaccacggaaacccaggggaaggacttcacatttgtgaccggtgtggaggatagtagtttcgcgtacggcctcctcatggaacttacacgggcatacctcgcctacgccgacaattccagggcccaggattcagccgcctacgctatccaggagctactatcaatttatgattgtcgggagatggaaacaaatggccctggacaccagttatggcgccgcttccctgagcacgtccgcgagatattggaacctcaccttaacactcgttataagtcaagccaaaagagcactgattggtccggagtgaaaaaacccatatacttgagcaagctgggaagtaacttcgcggaatggagcgcttcctgggcaggctacctgattacgaaggtcaggcatgacctggcctcgaaaatttttacctgctgctcaataatgatgaagcacgacttcaaagttaccatctacctcttaccacacattttggtgtatgttcttctagggtgtaaccaagaggatcaacaggaggtgtatgcagagataatggcggtccttaaacatgacgaccagcacaccatcaacactcaggatatcgcttccgacttgtgccagttgtcaacgcagacagtcttttctatgctggatcatctgacacagtgggctcgacacaagtttcaggctctgaaggccgagaagtgcccacactccaagtccaaccggaataaggttgatagcatggtaagtactgtcgactacgaagattaccagtccgtgacacgctttctggatctgattcctcaggatactctggctgtcgcgtcctttaggtccaaggcttataccagggccgtcatgcatttcgagtcatttattaccgagaaaaaacagaacatccaagaacacttgggattccttcaaaagttgtatgctgcaatgcatgaacccgacggtgttgccggggtcagcgctatccgaaaggctgagccatccctaaaagagcagatcctggaacatgagtcactgggactgttgagagatgccactgcctgctatgatcgtgctatccaacttgaaccagatcagattatccactaccacggggttgtgaaatccatgctgggactcgggcagttgtcaaccgtgattactcaagtgaacggcgttcacgctaaccgctctgagtggactgacgagctgaacacatatcgggtggaggccgcctggaaattgagccagtgggatttggttgagaattacctggccgccgacggcaaaagtactacctggagtgtcaggctggggcagctgctgctgagtgcaaaaaaacgagacatcaccgctttctacgattcattgaaactcgtgagggccgaacagattgtcccgcttagcgccgcctcctttgagcgcggctcctatcaacgggggtacgagtatatagtgagactccacatgctgtgcgagctcgagcactctataaaacctctgttccagcatagccctggtgatagttcccaggaagactcattgaactgggtcgcccgtctcgagatgacccaaaattcttacagagccaaggagcctattctggcactgagacgagcgctgcttagtctgaataagaggccagactataatgagatggtcggggagtgctggttgcagtctgcccgcgtagcccgcaaggccggtcaccaccagaccgcttataacgctctgctgaatgccggggaatctcgactggcagagttatacgttgaacgggcaaagtggctgtggtccaagggcgacgttcaccaggccctaattgtgttacagaagggtgtggagttatgctttcctgagaatgagacccccccagagggaaagaacatgcttattcatggccgggctatgctgttggtgggtcgattcatggaagaaacagcaaatttcgagtcaaatgctatcatgaagaagtataaggatgtcacagcgtgcctcccagagtgggaagatggccacttttacttggccaagtattatgacaagctgatgcccatggtcaccgacaacaaaatggagaagcaaggtgatctgatcagatatatcgttctgcactttggccgttctctgcagtacggcaaccagttcatctaccagtccatgccacggatgcttacactctggcttgactacggaaccaaggcgtacgagtgggagaaggccggcaggagcgacagagtgcagatgcgaaacgacctcggcaaaattaacaaggtcattactgagcatacgaactatctggcaccatatcaattcctaaccgcttttagtcaactgatctctcggatttgccatagccatgacgaggttttcgtggttctgatggaaatcatagcaaaagtgttcttggcatacccccagcaggctatgtggatgatgaccgccgtaagtaaatcaagctaccccatgcgggtcaacaggtgtaaggagatccttaataaggcgattcacatgaagaagagtctcgagaaattcgtgggggacgccactcgtctgacagataaactactggagctgtgcaacaagcctgtcgacggatcctcgagcaccctcagcatgagcactcatttcaagatgctaaagaagctggtcgaagaagcaaccttctccgagattctaattccattgcaatccgttatgatccctacccttccctctattttggggactcacgctaaccacgcctctcacgagcccttcccagggcactgggcgtatattgcagggttcgacgacatggtggaaatcctcgcgagtctgcaaaaaccaaaaaagatttcgttgaaaggttcagatggaaagttttatatcatgatgtgtaaaccaaaggatgacctgcggaaagactgccggcttatggagttcaatagccttattaacaagtgtctccgtaaagacgctgaatcccgaagacgagagctgcacatccggacctatgcggtgatccctttaaatgacgaatgcggtataattgagtgggtcaataacaccgcaggattgcggccaatccttaccaagctgtacaaggagaagggagtgtacatgacgggcaaggaactgagacagtgcatgctgcctaagtccgccgccttaagcgaaaagctcaaggtgttcagagagttcctcctcccacgacatcccccgatcttccatgagtggtttctccggacattcccggacccaactagctggtactcctctcggagcgcatactgccgtagtactgccgtgatgtcaatggtcgggtacattcttggcctgggagatcgtcatggcgaaaatatcctgtttgactctctcaccggcgagtgtgttcacgtcgacttcaattgtctgtttaacaagggagagacttttgaagtacccgagatcgtaccctttagacttacacacaatatggtgaatggcatgggaccgatgggcacggaaggtttgttcagacgagcttgtgaagtaaccatgagacttatgcgggatcagcgcgagccactgatgagcgttctgaagaccttcctgcacgatccactcgtggaatggtccaagccagtcaaaggtcactcaaaagctccactgaatgagaccggcgaagtggttaacgagaaagcgaaaacacatgtcttggacatcgagcagcgactgcagggcgttataaaaacacggaacagagtgacggggctcccgctttccatcgaaggccacgtacattatttgatccaggaagctaccgacgagaacctattatgtcaaatgtacctcggttggacgccttacatgtag

SEQ ID NO: 22877 - DNA, 9171 bp, synthetic construct
  misc_feature 1..9171: note = Description of Artificial Sequence: Synthetic coding sequence
  source 1..9171: mol_type = other DNA
atgagcctggtgctgaacgacctgctgatctgctgccggcagctggagcatgaccgggcaaccgaacgtaaaaaagaggtggagaaatttaaacgcctaattcgggatcccgagacgatcaaacacctggacaggcactcagacagcaaacagggaaagtatctgaattgggacgccgttttccgctttctgcaaaaatacatccagaaagagacagaatgtttgaggattgcaaagccaaacgtgtccgcatccacccaggcttcccgacagaagaagatgcaagagatttcaagcctcgttaagtatttcataaaatgtgccaatcgacgggcgcctcgattaaagtgccaggagctgctcaattacattatggatactgtgaaagattcttcgaacggtgcgatttatggtgctgattgcagtaacattttactcaaggatatcctgagcgtacgcaagtattggtgcgaaatttctcaacagcagtggctggagttattctcggtgtacttccggttatacctcaaaccatcccaagatgttcaccgggtactggtagcacgcatcattcatgccgtcaccaagggatgctgctcccagactgacggcctgaactcaaagttcttggattttttttccaaggctatacagtgtgcccgccaagagaaatcaagctccgggttgaaccacatcctggcagccctgacaatcttcctcaagactcttgctgtgaatttccgaattagggtttgcgagttgggcgacgagattctgcccaccctgctctatatctggacccagcaccggttgaacgactccttgaaagaagtgatcatcgagctgtttcagctgcagatttatattcaccaccccaaaggcgcaaaaacccaggagaagggggcttatgaaagcaccaagtggcggagcatcctctataacctctatgatctactagttaacgagatatcccatattggctcaaggggcaagtatagcagcgggttccgaaacatcgccgtaaaggaaaacctgattgaactgatggccgatatatgtcaccaggtttttaatgaggacactagaagcctggagatctctcaatcttatacgacaacacagagagagtctagcgactattctgtcccatgtaagcggaagaagattgagctgggttgggaggtcatcaaggaccatctgcagaagagccagaatgatttcgatttggtgccgtggctccaaatagcgacacaactcattagcaaatacccggcctctttgccgaactgcgagctttctccactccttatgatccttagccagcttctgccacagcagcgccacggagagcggaccccttacgtactgcggtgtttgaccgaagtggcattatgccaggacaaaagaagcaacttggaaagcagccagaaatctgacctgctcaagctgtggaataagatttggtgcattacattccgaggcatttcctccgaacaaattcaggctgagaatttcgggctcctgggcgccatcatccaggggtcgcttgtcgaggttgatagggaattttggaaactctttacagggtccgcatgtaggcctagttgtcccgccgtgtgctgcctgaccctagccttgaccacatccatcgtaccaggtactgtgaaaatgggtattgagcaaaatatgtgtgaggtcaatcgaagctttagcctgaaggaaagcatcatgaaatggcttttgttctatcaactcgagggcgatcttgagaacagcacagaggttccacctatacttcatagcaatttcccgcatctggttctagagaagatcctggtctcactcaccatgaagaactgtaaggcagccatgaacttttttcagtccgtgccggagtgcgaacatcaccagaaagacaaggaagagctttcctttagcgaagtggaagaactgttcctccaaacaacatttgacaagatggactttctgacaatcgtgagagaatgcggaatcgaaaagcaccagagcagtataggattcagtgtgcatcagaacctgaaagagtcactggacagatgcctgctggggctgagcgagcagctcctgaacaactattctagtgagataaccaacagcgaaactctggtgcgctgttcacgattactggtgggtgtcctaggctgttattgttacatgggggtcatcgctgaggaggaagcctataaatccgagcttttccagaaggcaaagagcttgatgcagtgcgctggcgaaagcatcactctcttcaagaacaagaccaacgaggagtttcggatcggtagcctgcgtaatatgatgcagctatgtacaaggtgcctgagtaattgcaccaaaaaatctccaaataagatcgccagcgggtttttcctgaggctccttacctctaaacttatgaatgatatcgccgacatctgtaaaagcctagcctctttcatcaaaaagccatttgaccgcggcgaggtggagtccatggaggatgacacgaatggaaatctcatggaagtcgaggatcagtcctccatgaatcttttcaacgattaccccgattcaagcgttagcgatgccaatgagccaggcgagagccagtctacaataggagctatcaatcctctagccgaggagtacctgagtaaacaggacctgctgtttttggacatgttgaagtttttatgcttgtgtgtaacgaccgcccaaacaaataccgtgtcgttccgcgcagccgacattagaaggaagctacttatgttaatcgatagcagcactttagaaccaacaaagtctttgcatctgcacatgtacctcatgttgcttaaggaactgcctggtgaagagtatccactgcctatggaagacgtgcttgagctgctcaagcccttgtcgaatgtttgttccctctacaggagggatcaggatgtgtgcaaaacgattcttaatcatgtgctgcacgttgtcaaaaatctaggacagtctaatatggactcagaaaacacacgcgacgcgcaagggcagtttctcacagtgataggcgctttttggcatctgacaaaggaacgtaagtacatcttttcagtgcggatggctctagtaaattgcttgaagactctgctcgaggccgacccctactcgaagtgggccatcctgaatgtgatgggcaaggatttccctgtgaatgaagtgttcacccagttcctggccgacaatcatcaccaggtccgtatgctcgctgccgaatctattaaccgactgtttcaggatacgaagggagattcctcccggctcctgaaagcgcttcctctcaagctgcagcagacagcctttgagaatgcatacctcaaggcgcaagaagggatgcgcgaaatgtctcacagtgctgagaaccccgaaactctggacgaaatttacaatcgcaaatccgtcctgctgaccctcattgcagtagtgttgtcgtgttctcctatatgcgaaaagcaagcactgttcgcactatgcaagagtgttaaggaaaatggcttggagcctcacctggtaaaaaaggtcctcgaaaaggtgagtgagacattcggctatcggcggctggaagattttatggcttctcacttggattatctcgtccttgaatggcttaacctgcaggacactgaatacaacctgtcttcatttcctttcatcttattgaactacacaaacatcgaggatttttaccgctcatgttacaaggtccttattcctcacttggtgatcagaagtcatttcgatgaggtcaagagtatcgctaaccaaatccaagaggattggaagtcacttctgactgactgtttcccaaagattttagttaacatcctgccttacttcgcgtacgagggaacccgcgacagcggaatggcccagcagagggagaccgcaacaaaggtgtacgatatgctgaaaagtgaaaaccttctaggtaaacagatcgatcacctgttcatttcaaatttgcccgaaattgtcgttgagctattgatgacactgcacgaacctgccaacagttccgctagccagtccacggacttgtgcgacttctccggcgatttggatccagctcccaaccccccgcacttcccaagtcacgtaatcaaggccacatttgcatacatcagcaattgtcacaagaccaaactcaagtccattctggaaattttgagcaagtcaccagactcataccagaagatcctgttagcaatctgtgaacaggcagctgagacgaacaatgtatacaaaaagcacaggatacttaagatctaccatctattcgttagtcttctcttgaaagatataaagtccggtctgggcggcgcgtgggcctttgttctgagggatgtcatctatacgctgattcactatattaaccagaggccctcatgtatcatggacgttagtctgcgctcgttctctctgtgttgcgatctgctttcccaagtatgtcaaacagccgtgacttactgcaaggatgccctcgagaaccatctgcacgttatcgtagggacactgattcccctggtgtacgaacaagtggaggtccaaaaacaggtcctagatttgctgaagtacctagtaattgataataaagataacgagaatctttatatcactattaaactgctggaccccttccctgaccacgtggtgttcaaagacttgagaatcacacagcagaaaataaagtactctagagggccatttagtctcctggaggagataaaccacttcctgtcggtgtctgtgtacgacgccttgcctctgaccagactggaaggcctcaaggacctgaggaggcagctggagctgcacaaggaccagatggtggacatcatgcgggcctcccaggacaatcctcaggatggcatcatggtgaaactcgtggtgaatcttcttcagttgagtaagatggctatcaatcacaccggtgagaaagaggtgttagaggcggtgggaagttgcctcggggaagtggggcccattgactttagtaccatcgcgatccagcacagcaaagacgctagctatacaaaggcgttaaaactctttgaagataaggagctacagtggacttttatcatgctgacatacctgaataatactcttgtggaagactgtgtgaaggtccggtccgccgccgtgacgtgccttaagaacatcctggccactaagactggccactcgttttgggagatttacaagatgactacggacccgatgcttgcttacctgcaaccttttagaactagtcgcaagaagttcctcgaggtgcccagatttgacaaagagaacccttttgagggattggacgatataaatctgtggatccccctttctgagaaccatgatatttggatcaagactttgacctgtgccttccttgattcgggcggtaccaagtgtgaaattctacagctgctgaagcctatgtgtgaggtgaagacagatttctgccaaactgtccttccttacctgatccatgacatcttactgcaggacaccaacgagagctggcgcaatctgctttcaacacacgtccaggggttctttacaagctgcctccgccacttttcgcaaacctccagatcaacgacgccagctaatcttgattcagagagcgagcacttttttcggtgctgtctggacaagaaatcacagcgcacgatgttggcggtggttgactatatgagacggcagaaacgccccagcagtggaaccattttcaacgacgccttttggctagacctgaattatctggaggtggccaaggtggcccaatcatgcgctgctcacttcaccgcattgctatacgcagagatctacgctgataagaagtccatggacgaccaggagaagcgatctctcgcattcgaggaagggtctcagaataccacaatctcttccctgagtgagaagagtaaagaggaaacgggtattagtcttcaagacctgttgcttgaaatctataggagtatcggagagccggactcgttatatggctgcggcggcgggaaaatgttgcagcctatcactcggttgcgaacgtacgagcacgaggccatgtgggggaaagcactcgtgacatatgacctcgagaccgcgattccttccagcacccggcaagccggcataattcaggccttgcagaacctgggactctgtcacatccttagcgtgtacttgaagggtctggactatgaaaataaggactggtgtcccgaattggaggaacttcactaccaggcagcctggcgcaatatgcagtgggatcattgcactagcgtgagtaaggaagtggagggaacaagttaccatgagtctctgtacaacgcgctgcagtcactgcgggatagagagttttctactttctatgagagtctgaagtacgcccgcgtaaaagaggtcgaagagatgtgcaaacgaagtctggagtcagtgtactcactgtaccccaccctgtcgaggctccaggccatcggagagctcgagagcatcggcgagttgttcagtcgaagcgtcactcaccggcaactttctgaggtatacatcaagtggcagaaacactcacagctccttaaagattccgacttttcctttcaagagcctattatggccctacggacagttatcctagaaattctgatggagaaggagatggataatagccagcgcgagtgtatcaaggatatcctcaccaaacaccttgtggagttgagcatcctggccaggacattcaaaaacacccagctgccggagagagccattttccaaatcaagcagtacaatagcgtgagctgtggcgtttccgaatggcagctggaggaggcacaggttttctgggccaaaaaagagcagtccctcgcacttagcattctcaagcagatgataaagaaactcgacgcatcctgcgctgctaacaatcctagtcttaagctgacctacacagagtgcctgcgagtctgcggaaactggctggccgagacctgcctggaaaacccagccgtcataatgcagacatacctggaaaaggccgtagaggtggccgggaactatgacggagagagttccgatgaactaaggaatggcaagatgaaggccttcctgtcgttagcacgctttagcgacacccagtaccagcgcattgaaaattacatgaagtcatccgagttcgaaaataagcaggccctcctcaagagagctaaggaggaggtgggcttattgagagaacacaagatccagaccaataggtatacagtgaaggttcagagggagctggaactagatgagctggcgcttcgtgcactgaaggaggacaggaaacgattcctttgcaaggccgtggagaactacattaattgcttattatctggggaggaacacgatatgtgggttttcaggctgtgtagtctatggctcgaaaactctggcgtgagcgaggtcaacggcatgatgaagagagacggcatgaagatacccacatataagtttctgcctctcatgtatcaattggccgcgcgcatgggaactaaaatgatgggcggattaggctttcacgaggtgctgaataatctgatttcacgtatttctatggaccacccacaccacaccctatttatcattttagcactcgcaaatgctaacagagatgaatttctgacaaaaccagaagtggctaggaggtctcgtataacaaagaatgttccaaaacagtcttctcaacttgatgaagataggactgaagccgcaaatagaattatttgcacaatccgaagccggagaccacagatggtgcgaagtgtggaagctctatgtgacgcgtacataatcctggcaaatcttgatgccacacagtggaagacccaacggaagggcatcaatatacctgccgaccagccaattacaaagctcaaaaatttagaggatgtggtagtgccgaccatggaaatcaaagtggatcacacaggtgagtatgggaacttagtgacaatccagagttttaaagccgagtttagactggccgggggtgtgaatctgccaaagattattgattgcgtggggagtgatgggaaagagaggaggcaactcgtgaagggaagagacgacctgagacaggatgcggtgatgcagcaggtttttcagatgtgcaacacactgttacaaagaaatacagagaccaggaaacggaaattaaccatttgcacgtacaaggtggttcctttaagccagcggagcggggttcttgaatggtgtacagggaccgttcctatcggggaattccttgtgaataatgaggatggagctcacaagaggtaccggcctaatgactttagcgctttccagtgccagaaaaagatgatggaagtgcagaaaaaatctttcgaggagaagtacgaggtgtttatggatgtctgccagaatttccagccggtgttccggtacttttgtatggagaaatttctggaccccgccatctggttcgagaaacggctggcatacacccggtcagtagccacttcgtccattgtcgggtatatactcgggctgggcgaccgccacgtacagaatatcctcatcaatgagcaatccgcagagctggttcacatcgacctgggcgtcgccttcgagcagggcaagattctgcctacacctgaaacagtcccgttcaggctgactcgagacatagtcgacggcatggggatcactggggtggagggtgtctttaggcgctgctgtgaaaagacaatggaggtcatgcggaactctcaggagacattactaactatcgtcgaggtcctactgtatgaccccctgtttgactggactatgaaccctcttaaggctctgtatctgcagcagcggcctgaggacgaaaccgaactgcatcccactctcaacgcggatgatcaggagtgcaaacggaatctgtccgacatcgatcagtcatttaacaaagtggctgagcgtgtgctgatgcggctacaagagaagctgaagggagtggaagagggcacagtcttatccgtgggcggacaagtaaacttgctgattcagcaggctatcgacccaaagaacctcagccgtctgttccccggttggaaagcgtgggtgtag

SEQ ID NO: 22878 - DNA, 417 bp, synthetic construct
  misc_feature 1..417: note = Description of Artificial Sequence: Synthetic coding sequence
  source 1..417: mol_type = other DNA
atgaccctgcacgagcccgccaacagcagcgccagccagagcaccgacctgtgcgatttctcgggggacctcgatcctgcccctaatccacctcattttccaagccacgtcataaaagctacgtttgcctatatctcaaattgtcataaaaccaagctgaaatccattctcgaaattctcagcaagtctcctgattcttaccaaaagatactgctggccatctgcgagcaggccgccgagaccaacaatgtgtataagaagcacagaatcctgaagatataccaccttttcgtgtctctgctgctcaaggacatcaaatcagggctaggcggcgcttgggccttcgttttacgcgatgtaatttatacccttatccactatattaaccaaaggaaactgaccattttctcccagtag

SEQ ID NO: 22879 - DNA, 9171 bp, synthetic construct
  misc_feature 1..9171: note = Description of Artificial Sequence: Synthetic coding sequence
  source 1..9171: mol_type = other DNA
atgagcctggtgctgaacgacctgctgatctgctgccggcagctggaacatgacagggccacagagagaaagaaggaagtcgagaagtttaagcgtcttattcgcgatcccgagacaatcaagcacctggaccggcattccgactccaagcagggcaagtacctgaactgggatgcagtgttccggttcctgcaaaagtatatacaaaaggagactgagtgcctgcggatagccaagcctaacgtttctgcctccactcaggcctcacggcagaagaagatgcaagaaatctcaagcttggtgaaatacttcattaaatgcgcgaatagacgggctccaagactaaaatgtcaggagctgctgaattacatcatggatactgtaaaggatagctcaaatggcgctatctacggcgcggactgcagtaatatcctactgaaagacattttatcagtgcggaagtactggtgtgagattagccaacaacagtggctggaactgttctccgtatatttccggctctatctcaaaccgagtcaggatgtgcatagggttcttgtggcaaggataatccacgccgtcacaaaagggtgctgttcacagaccgacggcctgaattcaaagtttctggatttcttcagtaaggctattcagtgcgcaagacaggagaagtccagcagtggcctcaaccacatcctcgctgctctcacaatcttcctgaagacgttagctgtgaacttcagaatcagggtttgtgaattgggggacgagattctgcccactctgctctatatctggacccaacatcgtcttaatgactccctgaaggaagttattatcgagctttttcagctgcagatctacattcatcaccctaagggcgcaaagacccaggagaagggtgcctatgagagcacaaaatggcggtctatcttatataacttgtatgacttactggtaaatgagataagtcatattgggtcgaggggtaagtacagctccggcttccgcaacatcgccgtaaaagagaaccttatcgagctgatggctgacatttgtcatcaggtctttaacgaagataccaggagtttggaaatttcccaatcctacacgaccacccagagggaatcttctgactattccgtcccatgtaagagaaagaagatcgaacttggctgggaagtgataaaagaccacctccagaagagccagaatgattttgacctcgtgccttggcttcaaatcgccacacagctgattagcaaatatccagcctcactgcctaactgtgaacttagccccctgctgatgatcttaagccagctcctgcctcagcagagacatggtgaacgcactccatacgtgcttagatgtctgacagaagtcgctctctgccaggacaaaaggtcgaatcttgaatccagccaaaaatcagatctgctgaagctgtggaataaaatatggtgtatcacatttagaggtatcagctcggaacagattcaggccgaaaacttcggcctgctgggggcgatcatccagggtagtctggtcgaggtggatcgcgagttctggaagttattcaccgggtcggcctgcaggccatcctgtccggccgtgtgttgcctcaccctagccctcaccacatccatcgtccccgggaccgtaaagatggggattgaacagaatatgtgcgaggtgaaccggtcattttctctgaaggagagtataatgaagtggctgctcttttatcagctggaaggcgatcttgagaatagcaccgaagtgccccccatcttacattctaatttcccccacctggtcctggaaaagatcctggtgtcactcaccatgaagaactgtaaagcggcaatgaacttcttccagtctgtgcccgagtgtgagcaccaccagaaggataaggaagagttgtctttctcagaggtcgaagagctgttcctgcagactacttttgacaagatggacttcctgaccatcgtgcgtgagtgtggaatagagaagcaccagtcatccatcggcttttcggtgcatcaaaatttgaaggagtcactggacaggtgcttgttaggcctgtctgagcagctcctgaataattacagcagtgagattactaacagcgagacattggtgcgctgctctaggctactggtaggcgtcctcgggtgttattgttacatgggcgtgattgccgaggaagaggcctataaatctgagctcttccagaaggccaagagccttatgcagtgcgccggagagagcataaccttatttaagaacaagactaatgaggagtttcgtataggcagtttgagaaatatgatgcagttgtgtacacgatgtctgtccaactgcaccaaaaagtcaccaaataaaatcgccagcgggttcttcctccgtctccttaccagcaagcttatgaatgacattgcggatatctgcaagtcactggcttccttcatcaagaagccctttgataggggagaagtggaatccatggaagacgatacaaacgggaacctgatggaggtcgaggaccagagttcaatgaacttgtttaatgactacccagattcaagtgtcagtgacgcaaacgagcccggagagtcacaatctacaatcggtgccattaaccccctcgctgaagaatatctgtccaaacaggatctcttgtttctggacatgcttaaattcctgtgtctgtgcgtaactactgcccaaacgaacactgttagcttcagggctgccgatatccgacgcaaactacttatgctgatcgactcatctactcttgagcccactaaaagcctccacctccacatgtatctcatgttgctgaaggaactgcctggtgaagagtatcccttgcctatggaggacgttctggaacttcttaaaccgctgagcaatgtgtgctctttgtacagacgcgaccaggatgtgtgcaagacaattttgaatcacgtgctgcatgtggtcaaaaatttgggtcaatcaaatatggactctgagaacactcgagatgcacagggccaatttctgaccgtgatcggggcattttggcacctgacgaaggagaggaaatatatttttagtgtgagaatggccttggtcaattgtcttaaaacgctgttggaggccgatccgtatagtaagtgggccatcttgaatgtgatgggcaaggattttcccgtgaacgaagtttttacgcagttcctggccgacaaccaccaccaggtccggatgcttgctgccgaatccatcaacaggctgttccaggataccaagggagacagttcgcgactattgaaggctttgccactcaaactccagcagacggcgttcgaaaacgcctaccttaaagcacaagagggcatgagagaaatgtcgcactccgccgaaaatccagagaccctcgatgaaatctataatcggaaatccgtactgctcaccctgatcgccgtggtgctgtcttgttctcctatttgcgaaaagcaggctctcttcgccctctgtaaatccgtgaaggagaacggactggagccccacttagtcaaaaaagtcttggagaaggtctccgagacgttcggctaccgcagactggaggatttcatggcctcgcacctggattatctggtgcttgagtggttgaacctccaggataccgagtacaacctatccagctttcccttcatactgttgaattatacaaacattgaggacttttataggagttgctataaggttcttattccacatttagtcatacgctctcattttgatgaggtcaagtccattgccaaccagatccaggaggactggaagagtctcctgacggactgttttcctaagatccttgttaacatactgccatatttcgcatatgaaggaacgcgagatagtgggatggcacagcagcgcgagaccgctaccaaggtatatgacatgttgaaatccgaaaacttgctcggaaaacagatcgatcacttgtttatttcaaatctgcccgagatcgtcgtggagttgctgatgaccctgcacgaaccggcaaattcaagtgcaagccaatctactgacctgtgtgacttctctggggacctcgacccagctccgaaccctcctcacttcccaagccatgtgatcaaggccacctttgcgtacattagcaattgccataagaccaaacttaagagcatcctcgaaatcctgagtaagtctcccgacagttatcagaagatcctactcgccatttgcgagcaggcagctgagacaaacaatgtctacaaaaagcataggatcctcaagatctaccatctctttgtgtccctattactgaaggatatcaaaagcgggctaggcggggcctgggctttcgtccttcgggacgtgatatacaccttgattcattatattaaccagcggcccagctgcataatggacgtatctctgcggtcttttagcctttgctgcgaccttctaagtcaggtctgccagacggccgtcacgtactgtaaagacgctttggaaaaccatctccacgtgattgtgggaacattgatccccttggtgtatgaacaagtcgaggtccagaaacaggttttggatcttctgaaatatctggttattgataacaaggacaatgagaacctatacattaccatcaagctcttggacccattccctgatcacgtggtgttcaaggacctccgaattacacagcaaaagatcaaatacagcagggggcccttttctctgctcgaggaaattaatcacttcttatccgtgagtgtgtatgatgctctgcccctgacgagactcgagggacttaaagacttgagacgccaacttgagctccacaaagaccaaatggtcgatattatgcgcgctagtcaggacaaccctcaggacgggatcatggtcaagctggtagtgaacctccttcagctgtctaagatggctattaatcatactggagaaaaggaggttctggaggccgtgggaagttgcctcggcgaggtggggcctattgactttagcaccattgccatccagcattccaaggacgcctcctacacaaaggctcttaaactgttcgaggacaaggagctccagtggacttttattatgttaacttatctgaacaatactctggttgaggactgtgtgaaggtccggtctgcagctgtgacctgcctgaagaacatcctagccacaaaaaccgggcattccttttgggagatatacaaaatgaccaccgatcctatgctggcctatctgcagccttttagaacttcacgcaagaaatttctagaggtccctaggtttgataaggagaatccattcgaaggcctcgacgacatcaacctctggattccgctttctgagaatcatgatatctggattaaaactctcacatgtgctttcctcgatagcggcggtactaagtgcgagatcctccagctgttaaagcctatgtgcgaagtgaagaccgacttttgtcagactgttcttccatatctcatccatgatatcttgctccaggacaccaatgaatcgtggaggaatctgctgtctactcacgtgcaggggttcttcacaagctgtctccggcatttctctcagacttctcgctccactacacctgcaaatctggattctgagagtgagcacttttttcggtgttgcctggataaaaagagtcaaagaactatgttggctgtggtggattacatgaggaggcagaagaggccaagcagtggtactatctttaacgacgccttttggcttgacctaaattaccttgaagtggccaaggtcgcgcaaagttgcgcggcccattttacggcccttttgtatgccgagatttacgccgacaagaaaagtatggacgatcaggagaagaggagcctggcctttgaagaagggagccaaaatacaaccatttcttcgctcagtgagaaaagcaaggaggagactggcatatccctgcaggatttgttgctggagatctatagaagcatcggcgagccagattccctttacgggtgcggaggcggcaagatgctccagccaatcactcggcttcggacttatgagcatgaagccatgtggggtaaggccctggttacatacgatttggaaactgctattccttcgagtacgcgtcaggccgggattatccaggccctacagaacttaggcctctgtcacatcctgtctgtgtacttaaaggggcttgattacgagaacaaggactggtgtccagaattggaagaactccattatcaggcagcctggcggaacatgcagtgggatcactgcaccagcgtgagcaaggaggttgaaggtactagttatcacgagtccctctacaacgccctccagtcccttcgcgacagggaattttccacattctatgaaagcttgaagtacgcccgggttaaagaggtggaagaaatgtgtaagcgcagcttggagagtgtgtactcactttatcctactctgtctaggctgcaggccatcggggagcttgagtctattggcgagctgttttcccgatccgtgacccaccgccaactatccgaagtttatattaaatggcagaagcattcccagctgctgaaagacagcgacttttcctttcaggaaccaatcatggcactgaggacagtgatacttgagatcttaatggagaaggagatggacaactcccagcgcgagtgtattaaagatatcctcacgaagcacttagtagagctatcgatcctggcacggaccttcaagaacacacagcttccggagcgggctatatttcaaattaagcaatataattcagtgtcttgcggggtaagcgaatggcaactcgaagaggcccaggttttctgggctaagaaggaacagagccttgcgctgtccattctcaaacagatgattaagaaactcgacgctagttgcgcagccaacaacccatctttaaaacttacctatactgagtgtttgagagtgtgcggcaactggctcgctgaaacctgcctagagaaccccgcagtgattatgcagacctaccttgaaaaggctgtggaggttgccggaaactatgatggtgaaagctccgatgaactcaggaatggaaaaatgaaagcatttctgtcccttgcccggttttccgatacccaatatcaacgtatcgagaattacatgaagagctctgaatttgaaaataaacaggcgttactgaaacgcgctaaggaggaggtggggctactgcgggagcacaagattcagaccaaccggtacaccgtgaaagttcagcgcgagttagagttggacgaactcgccctccgggctctgaaagaagaccgcaagagatttctgtgtaaagcagtcgagaactacatcaattgccttttgtcaggggaggagcatgacatgtgggtcttccggctctgttctctgtggttagaaaactcaggcgtcagtgaggtgaacggtatgatgaaacgggatggtatgaaaattcccacgtacaagttcctcccactaatgtaccagcttgccgctagaatgggaaccaagatgatggggggtttaggctttcacgaggtgcttaacaatctgataagcagaatttccatggaccacccgcatcacactctatttattatactcgccctggcgaacgcaaatcgggacgagttcctcaccaagcctgaggtagcgcgcaggtccagaataacgaaaaacgtgcccaagcaatcctctcagttggacgaagatcgcacggaggccgcgaaccggatcatctgtactatacggtcgcgcagacctcagatggtacgctctgttgaggccctgtgcgacgcatatattatcctcgctaacctcgacgccacacagtggaagacccagcgaaaagggatcaacatccccgcagaccagcccatcacgaaactgaagaatcttgaggacgtcgtggtccctacaatggaaattaaggttgatcacacaggtgagtacggaaaccttgtgaccatccagtcatttaaggctgagttccgactggccggcggagtcaatctcccgaagattattgactgtgtgggaagcgacggcaaggagaggagacaactagtaaaggggagggacgacctgcgccaggacgccgtcatgcagcaagtcttccagatgtgcaatactctgctccaacgaaacacagagacacggaagagaaagctgacaatctgtacatataaagtggtccctctgtcccagcgctccggcgtcctggagtggtgtaccggcactgtaccaattggcgaattcttggtgaataatgaagacggggcccacaagagatatcgtcccaacgacttttccgccttccagtgtcagaaaaagatgatggaggtccaaaagaagtccttcgaagagaagtacgaagtgtttatggacgtttgtcagaattttcagcctgtgttccggtacttctgcatggagaagttcctggatcccgccatctggttcgagaaaaggttggcttataccagatccgtggctacttctagtattgtcggttatatcctgggactcggcgacaggcacgtccaaaacattctgattaatgagcagagtgctgaactcgttcatattgacctgggtgtcgcattcgagcagggcaaaattctaccaacacctgagacggtgccattccggctgacccgggatattgttgacggcatgggcataaccggcgtagaaggggttttccgacgttgctgtgaaaaaacgatggaagttatgagaaattcacaggagacactcctcaccattgtagaagtgctgctttatgaccccttattcgactggacaatgaaccctctcaaagcattgtacttgcagcagagaccagaggacgaaacggagctacatccaaccctgaatgcagacgatcaagagtgtaaaaggaatctgagcgatatagatcaatcattcaacaaagtggctgagcgcgtactcatgcggctgcaggaaaagctaaagggggtcgaagaaggtaccgtgttgagcgtggggggacaggtgaatctgttgattcagcaagccatcgatcccaaaaacctgtcccggctgtttccaggttggaaggcctgggtgtag

SEQ ID NO: 22880 - DNA, 4110 bp, synthetic construct
  misc_feature 1..4110: note = Description of Artificial Sequence: Synthetic coding sequence
  source 1..4110: mol_type = other DNA
atgagcctggtgctgaacgacctgctgatctgctgccggcagctggaacacgacagagctaccgaacgcaagaaagaggtagagaaatttaaacgcctcattcgcgatcccgaaacaatcaaacatctcgaccgccattccgactccaaacaaggcaagtatctgaactgggacgcagttttccgcttcttacagaagtatattcagaaagaaacggagtgtttaaggatagctaagcccaatgtgagtgcctccacacaagcctctcgtcagaagaagatgcaggaaatctcctctctggtgaaatatttcattaaatgcgccaaccgaagggcacccagacttaaatgtcaggagctgctgaattacattatggatacagttaaagattctagtaatggagcaatctacggtgccgattgcagtaacatcctgttgaaggatatcttgtctgtaagaaagtactggtgcgagatcagccaacaacagtggttggagctcttttcggtatattttagactttaccttaagccatcccaggatgttcaccgggtgctggtcgccagaatcatccatgccgtcacaaaaggatgttgctcccagaccgacgggttaaattccaagtttctggattttttctcaaaggccatacagtgtgcccgccaggaaaagtcttcaagtggcctgaaccatatcctggccgccttaactattttcctgaagaccctggccgtaaacttcagaattcgggtatgcgagcttggcgacgaaatactgcccacactcttgtacatttggacccagcatcgcctgaatgactctcttaaagaagttatcatagaactgttccagctgcagatttatatccaccatcccaagggagccaagacacaagagaaaggggcatatgaaagcactaagtggcgtagtatcctttataacctgtatgatctgctagtgaatgaaatctctcacatcggatcaagaggcaagtattccagtggtttcagaaacatcgctgtgaaagagaacctgatagaattgatggcggatatttgccaccaggtgtttaacgaggatacgcggtcactggagatcagccagtcttacaccaccacacaacgggagagttccgactacagcgtgccatgcaaacgtaagaaaatcgagctggggtgggaggttatcaaagaccatcttcagaagagccagaatgatttcgatttggtcccttggttgcaaatagccacccagctgatatcgaagtacccggcctcccttcctaactgtgaattgtcccctctgttgatgatcctgtctcaactcttaccgcagcaacggcatggcgaaaggacaccctacgttctgcgttgtttgacagaagtcgccctgtgtcaggacaaacgatccaacctagagtctagtcagaaaagtgacctgctgaaactgtggaataagatctggtgtataaccttccggggtataagcagcgagcaaatacaagctgaaaacttcggtcttttgggtgcgatcattcagggcagcttagtggaggtcgaccgtgagttctggaaactgttcacgggttctgcctgcaggccgtcttgcccagcggtgtgctgcctcaccttggccctcacaacaagtatcgtcccaggcaccgtgaaaatgggaatcgaacagaatatgtgtgaagtgaatcgcagcttcagcctaaaagagtccattatgaaatggttactattttatcagcttgaaggagacctggagaattctaccgaggtccctccaatattgcattcgaacttcccccatctagtgctggagaaaatcctggtaagtctgactatgaagaactgtaaagccgccatgaattttttccagagcgtgccagagtgcgagcaccaccagaaagataaggaggagttgtctttcagcgaggtagaggagttgtttctgcagaccacatttgataagatggattttctgaccatcgtgcgggagtgcgggatcgagaagcaccagagtagcatcggttttagtgtccaccaaaatctcaaggaatccctcgatcgctgtctactgggtctttctgagcaattgttgaacaattactcctccgagatcacaaattccgagacgttggtgagatgctctcgactgctcgtcggtgtactcggctgctattgttatatgggcgttattgccgaggaggaggcatataagtcagagctttttcagaaggctaaaagtttgatgcaatgtgcgggcgaatccattacgctgttcaaaaacaagacaaacgaggagtttaggatcggatcactgcgcaacatgatgcagctttgcacaagatgtctttccaattgcactaaaaaaagccccaataagatcgcatctgggtttttccttaggctcttaacatctaagctgatgaacgatatcgctgatatttgcaagtctctcgcttcatttattaaaaagccctttgatcgtggggaagtagaaagcatggaggatgataccaatggcaatctgatggaagtggaggatcagagctccatgaacctcttcaatgattacccggattcttcagtgtctgacgcaaatgaaccaggtgagtcgcagtccacaatcggcgcaattaatccacttgccgaagaatatctcagcaaacaggatttgcttttcctggacatgctgaaatttctatgtctttgcgtaaccactgctcaaaccaataccgtttccttccgggccgccgacatccgccgcaagctgcttatgcttatcgactctagtacactggaaccaacaaagtccctccatctccatatgtaccttatgctgctgaaggaattgcctggcgaagagtatccacttcccatggaggatgtcctagagctgctgaagcccttgtcaaatgtgtgttccttgtataggcgggaccaggatgtttgtaaaactattcttaaccacgtactgcacgtagttaaaaacctcgggcagagcaacatggactctgagaacacccgagacgcacaagggcagttccttaccgtgatcggagccttctggcaccttaccaaagagcgaaaatatatcttctcagtcagaatggcgctggtgaattgcctgaagacattgttagaggcagacccctattccaaatgggctattcttaatgtcatggggaaggatttccccgtgaacgaagtgttcacgcagttcctcgccgataaccatcaccaagttaggatgctggctgcagagtcaataaatagattgtttcaggacacgaagggcgatagttccagactcctcaaggcacttcctcttaaactgcagcagactgcctttgaaaacgcctacctgaaggctcaggagggtatgagagaaatgtctcacagcgccgaaaaccctgagaccctggatgagatttataatagaaagtctgtgctgttgacactaatagctgtggtgctcagttgctccccaatctgtgaaaaacaggccctctttgcgctatgtaaaagcgtcaaggagaacgggcttgagccccatcttgtgaaaaaggtgttagagaaagtaagtgagaccttcggctatcggcgactcgaggactttatggcctcacacctggattacctcgtcttggaatggctgaatttgcaggacactgaatacaacttatcatccttcccttttatccttctgaattacactaacatcgaagacttctacagaagctgttataaggttttgatcccccacctcgtgatccggtcccactttgacgaggtaaaatcgatcgccaaccagatccaggaggactggaagtccctgctgactgattgttttcctaagatactcgttaacatattgccatacttcgcctatgaaggcactcgcgattcaggaatggcccagcagagagaaacagcgacgaaggtgtatgacatgttaaaatctgaaaaccttctgggcaaacaaattgaccatctgtttatctcaaatctgccagaaatcgtcgtggaactcctgatgacccttcacgagcccgcaaatagttctgcctcacagtctaccgacctctgcgacttctcttag

SEQ ID NO: 22881 - DNA, 282 bp, synthetic construct
  misc_feature 1..282: note = Description of Artificial Sequence: Synthetic coding sequence
  source 1..282: mol_type = other DNA
atgagcctggtgctgaacgacctgctgatctgctgccggcagctggagcatgaccgtgcaacagaacgtaaaaaggaggtagaaaagtttaaacgccttattagagatccagagacgatcaaacatctggatcggcacagtgactccaaacaaggaaagtatctcaattgggacgccgtcttcaggtttctgcagaagtacatacagaaagagaccgaatgcctgcgaatagccaagccgaacgtgagcgcgagtacacaggcaagtcggcagaaaaagtag

SEQ ID NO: 22882 - DNA, 921 bp, synthetic construct
  misc_feature 1..921: note = Description of Artificial Sequence: Synthetic coding sequence
  source 1..921: mol_type = other DNA
atggagagcatcttccacgagaagcagcccagcggcaacatggacgactcagggtttttcagcatccaggtcatttccaacgccctaaaggtgtgggggctggaactgattctttttaactctccagaataccaacgacttagaatcgatccaattaatgagcgcagcttcatttgcaattacaaggagcactggttcacggtaagaaagctaggaaaacaatggtttaatttaaactccttgctgacagggcccgagctgatctcagatacatatctagctctattcttggcacagttgcagcaggaaggatatagcatctttgtcgtcaagggcgatctcccagactgcgaggcagaccagctgcttcagatgattagggtgcaacagatgcataggccaaaactgattggcgaagaactagcgcaactgaaagaacagcgagtgcataagaccgatttggaacgggtgcttgaagcaaatgacggatccgggatgttagacgaggacgaggaggatcttcagagggcccttgccctgtcccgtcaggagatcgacatggaagatgaggaagccgacctgcgccgcgctattcagctttccatgcagggcagctcccggaatattagccaggatatgacacagacttccggaaccaatctgactagtgaggagttgcggaagagaagggaagcatacttcgagaaacagcagcagaaacagcaacaacagcagcagcagcagcaacaaggagacctgagtggacagtcaagccatccatgcgaacggcccgccacttcatccggcgcgctgggttcagacctgggtgacgccatgagtgaagaagatatgctccaggctgctgtgaccatgtccttggaaacagtgcggaacgatttgaaaacagaaggaaagaaatag

SEQ ID NO: 22883 - DNA, 1110 bp, synthetic construct
  misc_feature 1..1110: note = Description of Artificial Sequence: Synthetic coding sequence
  source 1..1110: mol_type = other DNA
atggagagcatcttccacgagaagcaggagggcagcctgtgcgcccaacactgtttgaataatttacttcagggtgaatacttcagccctgtcgagctctcttctatcgcccatcaactagacgaagaggagcgcatgaggatggctgaggggggagtcacatctgaggactataggacgtttctgcaacaaccctctggaaacatggacgacagtggcttcttttcgattcaggtgataagcaacgcacttaaggtctgggggttagagctgattctctttaacagtccagagtaccagaggctcagaatagatcccattaacgaaaggagtttcatttgcaattataaagagcactggttcaccgtccggaagctgggcaagcagtggttcaatttgaactcactcctgaccggacctgaattaatatccgacacctatctcgcactgttcctggcacaactacagcaggagggatacagcattttcgtggttaagggggatttaccagattgcgaggcagaccaactcttacagatgatcagggtgcaacagatgcaccggcctaagctgataggggaagaactggcacaactgaaagaacagagagtccataaaaccgatctggagcgcgttctcgaggcaaatgacggatctgggatgttggacgaggatgaagaggatttgcagagagctttagctcttagtcgccaggagattgacatggaagatgaggaggcggatcttcggagggcaatccagctctcaatgcagggctccagcaggaatatttctcaggacatgacccaaaccagtggaacgaacttaacctccgaggaactgaggaaacggagagaggcctacttcgagaaggatcaacactttcatattcttaagcagcaacagaagcagcagcagcagcagcagcagcagcagcagggagaccttagcggtcaaagcagccatccctgcgaacgccctgcaactagctctggcgctcttggcagtgatctgggcgatgctatgtcagaggaagacatgctccaggcagccgtcaccatgtctcttgaaactgtgcggaatgacttgaagactgaaggcaagaagtag

SEQ ID NO: 22884 - DNA, 1086 bp, synthetic construct
  misc_feature 1..1086: note = Description of Artificial Sequence: Synthetic coding sequence
  source 1..1086: mol_type = other DNA
atggagagcatcttccacgagaagcaggagggcagcctgtgcgcccaacactgcctcaacaatctgttgcagggggaatatttttccccggtagagttgtcaagcattgcacatcagctggatgaggaggagcgcatgagaatggccgaaggaggtgtgacatctgaggattacaggacatttctccagcaacccagtggaaacatggacgattccgggtttttttcaatacaagtgataagcaatgccttaaaggtgtggggcttggaactgattcttttcaatagcccggaatatcagagactgcgcattgatccaatcaacgaacgctccttcatttgtaattataaggaacactggtttactgtcagaaaactgggcaaacagtggtttaacctgaatagcttgctgaccgggcctgaacttattagtgacacatatctggccctcttcctagcccaactccagcaggaggggtatagcatttttgtggttaagggcgatctccctgactgcgaggccgaccaattactccaaatgatccgtgttcaacagatgcaccgtcctaagttgatcggcgaggagctcgcacaactgaaggagcagagggttcacaagaccgatctggaacgcgttttggaagccaacgatggttccggtatgctcgatgaggatgaagaggatttgcagcgggcattagccttgtcccgacaggagattgatatggaagacgaggaagccgatctgcgcagggcaattcagttaagcatgcaaggaagctcaagaaacatctcacaggatatgactcagacgagcgggacaaatttaacttccgaagaactaagaaagcgtcgagaagcatattttgaaaagcagcaacagaagcagcaacaacagcagcaacagcaacaacaaggcgacctttcgggccaaagttcccacccctgcgagagacccgctacatcttcaggtgctttaggctcagacttgggagacgctatgagcgaagaagacatgttacaggccgctgtaactatgagtcttgagaccgtacgaaacgatttgaaaacagaaggcaaaaagtag

SEQ ID NO: 22885 - DNA, 1101 bp, synthetic construct
  misc_feature 1..1101: note = Description of Artificial Sequence: Synthetic coding sequence
  source 1..1101: mol_type = other DNA
atggagagcatcttccacgagaagcaggagggcagcctgtgcgcccaacattgtttgaacaatttactgcaaggggagtactttagtccagttgagctcagcagtatagctcaccaactggatgaggaagagcgaatgagaatggcagagggcggcgtaacaagcgaagactaccggaccttcctgcagcaaccgtcaggcaacatggacgatagcggtttcttttcaatccaggtgatttcaaatgcactcaaggtgtggggcctggagctcattctgtttaactcacctgaataccagcggctaaggattgatccaataaacgaaagatccttcatatgcaattacaaagagcactggtttaccgtgcggaaacttggaaagcagtggttcaacttgaactcgctgctcactggacctgagcttatcagtgatacctatctcgccctgtttctggcacagctgcagcaagaaggctattctatattcgtagtcaagggagaccttccagattgtgaggctgaccaactcctgcagatgatcagggtgcaacaaatgcaccgtccaaaactgattggggaagaattggcacagttaaaagagcagcgagtgcacaaaactgacctggaacgcgtgctggaggccaacgatgggagtggtatgttggacgaggatgaggaggatctgcagagggctcttgcactgtccaggcaggagattgacatggaggacgaggaggctgacctaaggcgcgctattcagctatctatgcagggcagctcccggaatatttctcaggacatgactcagacatctgggacaaatttaacatccgaggagcttcgcaagagacgggaagcctactttgaaaatgattatttcgattcacagcagcagaaacagcagcaacagcaacaacagcagcagcagggagatctgagcggtcagtcatctcacccctgtgaaagaccagctacttccagcggcgctctagggagtgaccttggagacgctatgtccgaggaggacatgctacaggcagctgtgacaatgtcactggagaccgtacggaatgacctcaaaacagagggcaagaagtag

SEQ ID NO: 22886 - DNA, 1065 bp, synthetic construct
  misc_feature 1..1065: note = Description of Artificial Sequence: Synthetic coding sequence
  source 1..1065: mol_type = other DNA
atggagagcatcttccacgagaagcaggagggcagcctgtgcgcccagcactgcctaaataatcttctgcagggggaatatttcagccctgtagagctgagcagtattgctcaccagctggacgaggaggagcgaatgagaatggccgaaggtggagtcacatctgaagactaccgcaccttcctacaggtcatcagcaatgcacttaaagtgtggggcctggagctcatattattcaattctcctgaataccagaggcttaggatagacccaatcaatgaaagatccttcatctgtaattacaaggagcattggtttactgtcaggaagctaggaaagcagtggttcaatctcaattctttactcaccggccctgaattgatctctgatacatatctcgccctgtttcttgcccagctgcaacaggaaggctactctatctttgtggttaaaggggatctgcctgactgcgaggctgaccaacttttgcagatgatccgagtgcagcagatgcacagacccaaactcataggcgaggagcttgcacagctgaaagagcaacgcgtgcacaagacagaccttgagagagtcctggaagccaatgacggaagcggaatgctagacgaggacgaagaggacctacagagggctctggcattaagtaggcaggagatagatatggaggacgaggaggcagatctgaggagggcaattcaactctcaatgcagggatccagtcgaaacattagccaggacatgacgcagacaagcggaaccaacctgacgtccgaagagctgaggaagaggagggaggcttattttgagaaagatcaacactttcacatcctgaagcaacagcaaaagcagcagcaacaacagcagcagcaacaacagggggatctgagcgggcaatcctcacacccgtgcgagaggccagctacttcatctggagccctgggatcggacctgggagacgcaatgtccgaagaggatatgctgcaggccgctgtgaccatgagtcttgaaactgtcagaaacgatttaaaaacagagggcaaaaagtag

SEQ ID NO: 22887 - DNA, 1113 bp, synthetic construct
  misc_feature 1..1113: note = Description of Artificial Sequence: Synthetic coding sequence
  source 1..1113: mol_type = other DNA
atggagagcatcttccacgagaagcaggagggcagcctgtgcgcccaacattgtctaaataacttgctacagggcgagtacttctcacccgtcgagctgagttctatcgcgcatcaactcgatgaggaagagcggatgcggatggctgaaggaggagtcacgagcgaggattatcgcacctttctccagcagccaagcgggaacatggacgactcgggtttcttcagcattcaggtaatttcaaatgcactgaaggtgtggggacttgaacttatccttttcaattcacccgagtaccaacgcctgaggatcgatcctatcaatgagcggtcctttatttgtaactacaaggaacactggtttacagtgcgcaaattaggtaagcagtggtttaaccttaattctctgctgacagggcccgaactgatttccgatacctacttggccctgtttctggctcaattgcaacaagaggggtattccattttcgtggtgaaaggagacctccccgactgtgaggcagaccagttactccagatgattcgggtccagcagatgcaccggccaaagctgatcggagaggaactagcgcagcttaaggaacaaagggttcacaagacagatctggaacgcgttcttgaggccaacgatggatcaggtatgctggatgaggacgaagaagatctgcaaagggcactggcactgtctcgacaagaaatcgacatggaagacgaggaagcagatctgaggcgtgcaatacagctctccatgcagggctcctcccggaacatcagccaggatatgacacagactagcgggactaatctaacctctgaggagttacgaaaaaggcgggaggcctatttcgaaaaaactgagagcaggtcagtcgcccaggcccaacaacagaagcagcaacagcagcagcagcagcagcagcaaggagatcttagcggccaatcctctcatccttgcgaacggcccgccacctccagtggagcactgggcagtgacctgggcgacgcaatgagtgaggaagatatgcttcaggcagctgttaccatgtcactcgaaactgtacgaaatgatctgaaaaccgaaggaaaaaagtag

SEQ ID NO: 22888 - DNA, 1041 bp, synthetic construct
  misc_feature 1..1041: note = Description of Artificial Sequence: Synthetic coding sequence
  source 1..1041: mol_type = other DNA
atggagagcatcttccacgagaagcaggagggcagcctgtgcgcccagcattgtttgaataatctcttacagggagagtattttagtccagtagaattgagctccattgctcatcaacttgacgaggaggagcgaatgagaatggctgaaggcggagtgacctccgaggactaccgaacattcctgcaggtcatcagtaatgcattaaaggtctggggactggagttaattctttttaactctcccgagtatcagcgacttaggatagaccctatcaatgagcgttcctttatttgtaactataaggaacattggttcactgtgaggaagcttgggaagcagtggtttaacttgaattcgctcctgactggcccagagttgatatctgatacttacttagcacttttcctggctcagttgcagcaggaggggtatagcatcttcgtggtgaagggagatctccccgattgtgaggccgaccagttgctgcagatgattagggtgcaacagatgcaccggcccaaactgattggagaggaacttgcacaactcaaggagcagagggtccacaaaacggatctggaaagggtcctagaggcaaatgatggttctggaatgctggacgaggatgaggaggatctgcaacgggcactagccctgtcaagacaggagatcgacatggaggacgaggaggcagacttgagacgagctattcagttaagtatgcagggatcttcgagaaacatctcacaggacatgacccagactagcggaaccaaccttacatccgaggaactgcgaaaacgacgggaggcctacttcgagaagcagcagcaaaagcagcaacagcaacaacaacaacagcagcagggcgacttatctggccagagctctcacccctgcgagcggcccgctacatcttctggcgccttaggcagcgacctcggcgacgccatgtcggaagaagatatgctgcaggccgctgtcacaatgagtctcgagaccgtgcgcaacgacttaaaaacggaaggaaagaagtag

SEQ ID NO: 22889 - DNA, 1095 bp, synthetic construct
  misc_feature 1..1095: note = Description of Artificial Sequence: Synthetic coding sequence
  source 1..1095: mol_type = other DNA
atggagagcatcttccacgagaagcaggagggcagcctgtgcgcccagcattgcctgaacaatctgttacagggcgaatacttctctccagtcgagctgtcctccatcgctcaccagttggacgaggaggaacggatgcgcatggctgaaggtggagtgacaagtgaagattatcggacatttctccaacaacctagtggcaatatggacgacagcggatttttttcgatccaggtgattagtaacgccttgaaagtgtggggtttagagctgatattgtttaactctcctgagtaccagcgcctgagaattgacccaatcaatgaaagatcattcatttgcaactacaaagagcattggtttacagtcaggaagctcggaaagcagtggttcaatctgaacagtcttctcaccggaccagagctgatctcagatacatatctcgccctttttctggcacagctacagcaggagggatatagcatcttcgttgtcaagggggatctgcccgactgtgaagccgatcaactgttgcagatgatccgcgtccaacaaatgcatagaccgaagcttataggcgaggagctcgcacagctgaaagagcagcgggtacataaaactgacctggaacgggtgctggaggcaaacgatgggtccggaatgcttgatgaggatgaagaggatctgcagcgggccctcgccctatccagacaagaaattgacatggaagacgaggaggctgacttacggagagccatccagctgagtatgcagggttccagccgcaacataagccaggatatgacccagacatccggcaccaacctaacctccgaggaactgagaaaacgccgagaagcttattttgaaaaacagcagcaaaaacagcagcagcagcagcagcagcagcagcagggggatctgagcggacagagctcccatccctgcgagcggccagcaaccagcagtggcgccctgggtagcgatttaggtaaggcctgtagcccatttatcatgttcgctactttcactctctacctgacatatgaactccacgtgatctttgccttgcattactctagctttcctttgtag

SEQ ID NO: 22890 - DNA, 1119 bp, synthetic construct
  misc_feature 1..1119: note = Description of Artificial Sequence: Synthetic coding sequence
  source 1..1119: mol_type = other DNA
atggagagcatcttccacgagaagcaggagggcagcctgtgcgcccagcactgtttaaacaaccttctacagggcgaatatttttctcctgtcgagctgagttctatcgcacatcagctggacgaagaggaaaggatgagaatggctgaaggaggagtaacatccgaagactacagaacatttctgcaacagccttcaggtaacatggacgactcgggctttttctcaattcaggtgatctccaatgctctcaaagtatggggcctcgaactcatactattcaactcacctgaataccagcgcctgcgcattgatcccattaatgagcggtcattcatttgtaactacaaggagcattggttcactgtgaggaagctggggaaacagtggtttaacctaaactccttactgacaggcccagagctaatctccgacacctatttagctttgtttcttgcccagttgcagcaagagggatattctatatttgtcgtcaaaggggatctgcccgactgtgaggctgatcaactgctccaaatgattcgtgtgcagcagatgcaccgacctaagctaatcggggaggagttagcgcagctcaaggaacaacgggtgcacaaaacagatctcgagagggtgctggaagcgaatgacggctctgggatgctggacgaagacgaagaagacctgcaacgcgcacttgccctgtctcggcaggagatcgacatggaagacgaagaggccgacctccggcgcgccatccagttgtctatgcaggggagctcacggaacatatcgcaggacatgacccagacctcggggaccaacctcacctcagaagaactgcgtaagcgacgcgaggcttacttcgagaagttcggtcgtcccagacgtgcagactgtctgaggcagcagcagaagcaacaacaacaacaacagcaacagcagcagggcgatctctcaggccaatcctcccacccgtgtgagcgccccgccacaagctcaggcgccttaggaagcgatctgggagacgctatgagtgaagaggatatgctgcaggccgcggtgaccatgtcccttgaaacagtgaggaatgatctgaaaacggaggggaagaagtag

SEQ ID NO: 22891 - DNA, 1128 bp, synthetic construct
  misc_feature 1..1128: note = Description of Artificial Sequence: Synthetic coding sequence
  source 1..1128: mol_type = other DNA
gacagcgtgagcaagaagaagcaggagggcagcctgtgcgcccagcactgcctcaataacttgcttcaaggagagtattttagccccgtcgagctgtcttcaatcgcacaccagctcgacgaagaagaaaggatgcgaatggcagagggtggggtcacaagcgaagattacaggaccttcttgcagcagcccagcgggaatatggacgatagcggctttttcagcatccaggttatttccaacgcgcttaaggtgtggggactagagctaatcctgttcaactcacctgagtaccaaagactgaggattgaccctatcaacgagcgatcatttatatgcaattataaagagcattggtttacagtgcgaaaactgggtaaacagtggtttaatttaaacagccttctgaccggaccagagctgataagcgatacatacttagctctgttccttgcacagctgcagcaggagggatactctattttcgtggttaaaggcgatttacctgactgtgaggccgaccaattactccagatgattagagtgcaacagatgcatcgaccgaagctgatcggtgaagaacttgctcagctgaaggagcagcgcgtgcataagaccgatcttgaaagagtgctagaagctaatgatggatctggtatgctggacgaagacgaggaggatctgcagagagcccttgcactaagcaggcaggaaattgacatggaagatgaggaagctgatcttcggcgggcgattcaactaagcatgcaagggtccagccgtaacattagtcaggacatgacccagaccagcggtactaatctcacatcagaggaactgcgtaagagaagggaagcctacttcgagaaaaaattcaccgctaaccgaactgaccaacattttcacattcttaagcaacaacaaaagcagcagcagcaacagcagcagcagcagcagggggacctgtctggtcagtcaagccacccctgcgagcgacccgcaaccagtagcggggctttagggtccgatttaggagatgctatgagtgaagaggacatgctgcaggcagctgtgactatgtcacttgaaaccgttaggaatgacctcaaaaccgaaggcaagaagtag

SEQ ID NO: 22892 - DNA, 1125 bp, synthetic construct
  misc_feature 1..1125: note = Description of Artificial Sequence: Synthetic coding sequence
  source 1..1125: mol_type = other DNA
atggagagcatcttccacgagaagcaggagggcagcctgtgcgcccagcactgtttgaacaacttactccagggggagtacttttcacccgtggagctttcaagcatagcgcatcagctcgatgaggaggagcgcatgcgcatggctgagggcggggttacctccgaagattacagaacctttctccagcaaccttctgggaacatggacgactcgggatttttttctattcaggtgatcagtaacgcactgaaagtgtggggcctcgagcttattctttttaattcaccagaatatcaaaggttaagaatcgatccaattaacgagcgctcatttatttgtaactacaaagaacactggttcacagtgcgcaaattgggaaagcaatggtttaacctcaatagtctccttaccggccccgagctgatctccgatacctacctcgctctttttctggcccagctgcaacaagagggctactccatatttgtggtgaagggggatctgccagattgtgaggctgaccagctgctgcagatgattcgggtacagcagatgcacagacccaagttgatcggcgaggagctggctcagctaaaggagcagcgtgtacacaaaactgacttggagagagttttggaagcgaacgatggctcaggaatgttggatgaggacgaagaggacttgcagcgggctctagccctgagccgtcaggagatcgacatggaggacgaggaggccgacctcaggagagcaatacaactgtccatgcagggctcgagccggaacatcagtcaggacatgacacagacgagtggtaccaatctgactagcgaggaattaagaaaacgacgggaggcttatttcgagaaagtgttcttcaagaacctgcaacaaatcgggagggcgcggcaacaacagaagcagcaacagcagcaacagcagcagcagcagggggatttgagcggacaatcaagccacccatgcgagaggcccgcaaccagctcaggcgccttggggagtgacttaggcgatgcgatgtccgaggaggacatgttgcaagcggctgtcacaatgagccttgagacggtcagaaatgacctcaagaccgagggcaagaaatag

SEQ ID NO: 22893 - DNA, 1113 bp, synthetic construct
  misc_feature 1..1113: note = Description of Artificial Sequence: Synthetic coding sequence
  source 1..1113: mol_type = other DNA
atggagagcatcttccacgagaagcaggagggcagcctgtgcgcccagcattgcctgaacaatcttctgcagggcgaatatttttcacctgtggagctaagctctattgcccaccagctcgacgaggaggagaggatgcggatggcagaggggggcgtaacgtccgaagactacaggacctttttgcagcaacctagcggaaatatggacgactctggctttttttccatacaggtcatctctaacgcactgaaggtgtgggggctagagttaatcctgttcaactccccagaataccagcgactgcggatcgaccccattaacgaacgaagcttcatttgtaattacaaggaacactggttcacggttcggaagttgggcaagcagtggttcaacctcaattcactccttaccgggccagaactcatcagcgacacatatttggcactttttctcgctcaactccagcaggaaggctattccatattcgttgtcaagggagacctccctgactgcgaagccgaccagctgttgcagatgattagggtgcagcagatgcacagacccaaactgatcggcgaagagcttgcccagttaaaggaacagcgggtgcacaaaacggacctggagcgtgtacttgaagctaacgacggcagtgggatgctggacgaggacgaggaggacctgcagcgcgcgttggccctgtcccggcaggagattgacatggaggacgaggaggcagacctcagaagggctattcagctgtcaatgcaagggtcctctcggaatatcagccaggacatgacacagaccagcggaaccaatttgacctcggaggagctgcgcaaacgcagggaggcctactttgagaagatctactttacatttgagtgcttccggcagcagcagaagcaacagcagcaacagcaacagcagcagcaaggggacctgagtggtcagtcctcacacccgtgcgagcgccctgcaacatcttccggggcacttggttccgatctaggtgacgccatgagtgaagaagatatgctacaagctgccgtgacaatgtcgctggaaacagtgcggaatgacctgaaaaccgagggcaagaagtag

SEQ ID NO: 22894 - DNA, 1134 bp, synthetic construct
  misc_feature 1..1134: note = Description of Artificial Sequence: Synthetic coding sequence
  source 1..1134: mol_type = other DNA
atggagagcatcttccacgagaagcaggagggcagcctgtgcgcccagcactgcttaaacaatctgctgcagggcgaatatttttccccagtggagctctccagcatcgctcaccaactcgacgaagaggagcgaatgcgtatggccgaaggcggggttacctctgaggattacagaacctttttgcagcagccatcaggcaatatggatgactcaggctttttcagcattcaggttatatccaatgcattaaaggtgtgggggttggaactgatcttatttaactcgcccgagtaccagcggttgagaatcgacccaatcaatgagcgctccttcatttgcaactataaagagcattggttcaccgtgaggaaactcggtaaacaatggttcaacctgaatagtttactgacagggccagaactgattagcgatacatacttggctcttttcctagcccaacttcagcaggaaggatacagcatttttgtggtaaagggggaccttcccgattgtgaggcagaccaattacttcagatgatacgggtgcaacagatgcataggcctaaacttatcggcgaggagctggcccaattaaaagagcagagagtgcataagaccgatctggagcgtgtgctcgaggccaacgatgggtctggtatgctggatgaggacgaggaagaccttcagcgcgcgctcgcgctctctaggcaggaaatagatatggaggatgaggaggccgatctgcgcagggccattcagctgagtatgcagggtagctcacgaaatatctctcaggacatgacccagacatctggaactaatctgactagcgaggagcttaggaaacggagagaggcatacttcgagaaagtcttctttaagaatcttcagcaaaaccagcacttccatattctgaaacagcagcagaagcagcagcagcagcaacagcagcagcagcagggcgacctgtctggccagagctctcatccttgcgaacgccctgcaacgagtagcggggctctgggatcagacctcggagatgccatgagtgaagaagacatgttgcaagctgcagtgactatgagtcttgaaacagtgcggaacgacctgaaaacagagggtaagaagtag

SEQ ID NO: 22895 - DNA, 549 bp, synthetic construct
  misc_feature 1..549: note = Description of Artificial Sequence: Synthetic coding sequence
  source 1..549: mol_type = other DNA
atgatccgggtgcagcagatgcaccggcccaagctgatcggcgaggaacttgctcaattaaaggagcagagggttcataagacagacctcgagagagtgctcgaggctaacgatggcagcggcatgctcgacgaagatgaagaagacttgcagagggcactggccttatctagacaggagatcgacatggaagatgaagaggccgatttacgcagggccattcagttgtcaatgcaggggtcctcccgaaacattagtcaagacatgacacaaacatctggcacaaacttgacatcagaggagcttcgaaagaggagagaggcctatttcgaaaagcagcaacagaagcagcagcaacagcagcagcagcagcagcagggggatctctctggacagtctagtcacccttgcgagagacccgccacatccagtggagcgcttgggtctgacctgggagatgccatgagtgaggaagacatgctgcaggcagccgtgacgatgtctcttgagacagtaaggaatgatctcaagactgaagggaagaaatag

SEQ ID NO: 22896 - DNA, 3306 bp, synthetic construct
  misc_feature 1..3306: note = Description of Artificial Sequence: Synthetic coding sequence
  source 1..3306: mol_type = other DNA
atgagcgccaaggccatcagcgagcagaccggcaaggagctgctgtacaagttcatctgtaccacgagcgccattcagaatcgtttcaaatacgcacgggtcacccctgacacagactgggctagactcctgcaggatcacccctggcttctgtctcagaatctggtggtgaagccagaccaactaatcaaaaggagaggcaagttaggccttgtaggtgtgaatctgaccctggatggcgtgaaaagttggctcaaacccaggctgggccaagaggctaccgtgggcaaagcaacaggtttcctcaaaaattttttaatcgagcccttcgtgcctcattctcaggcagaggagttttacgtgtgtatttatgcaacacgggaaggggactacgttttgtttcatcatgaaggaggcgttgacgtcggagacgttgatgccaaggcccagaaactgctggtgggcgtggatgaaaagttgaatcccgaagatattaagaagcaccttctggtgcatgcacccgaagataagaaggagatcctggcctccttcattagtggtctgtttaacttctatgaagacttgtatttcacgtacctggagatcaatcctctagtcgttactaaagacggggtttacgttctagacctggccgccaaggttgatgccacagccgactacatatgtaaggtgaaatggggagacattgaattcccccctcccttcggccgtgaagcttatcccgaagaggcctacatcgccgacctggacgccaaatctggggccagcttgaagctgaccttgctgaacccaaagggtcggatttggaccatggtggccggcggcggagcatcagtggtgtactctgatacaatctgcgaccttggaggggtgaatgaattggctaattacggcgagtatagcggcgctccctcagaacagcagacctacgattacgccaagacaatcctgagcctgatgaccagggaaaagcatcctgacgggaaaattctgatcatcggcggtagtatcgccaatttcaccaacgtggccgccacctttaaggggattgtgagagcaattcgagactatcagggaccccttaaggagcacgaggtgacaatcttcgtgaggcgcggcggccccaactatcaggaaggtctacgagtcatgggagaggttggtaaaacaacgggcatcccaattcatgtctttggcacagaaacccacatgaccgccatagtcgggatggccttggggcatcgtcccatacccaatcagcccccgaccgctgctcacacggcgaattttctcctgaatgcctcagggtcgacctccacccccgccccatcacggacagcctccttcagtgagtctagagctgatgaagtggcccccgccaagaaagctaaaccagccatgcctcaggatagcgtcccatccccacgaagccttcagggtaaatcaactacactcttctcacgacacacaaaagccatcgtgtggggcatgcagactagagctgtgcaggggatgctcgattttgactatgtgtgctcccgcgatgagccatccgttgctgctatggtttacccattcaccggcgaccacaaacaaaagttctattggggacataaggaaatcctgattcccgtcttcaaaaacatggcagacgccatgcggaagcaccctgaggtcgatgtgttgataaatttcgcctctctgcgaagcgcttatgacagcacaatggaaacgatgaattatgctcagatccggacaatagctataattgctgaggggatacctgaagccctcacaaggaaactgattaagaaagctgaccagaaaggagtgacaatcatcggccctgctacggttggaggtatcaaaccaggttgtttcaaaatcggcaatacaggtggtatgttagataacattctggcaagtaaactctatcggcctggcagcgttgcctacgtgagtcgaagtggggggatgtccaacgagctcaataatattatcagcaggaccactgacggcgtttacgaaggggtcgccattggaggggacagataccctggatctactttcatggaccatgttctcagatatcaagatacgcccggcgtaaagatgattgtagtgttaggggagatcggagggaccgaggagtacaagatctgtcgcggaatcaaggaagggaggctgacaaaaccgattgtctgctggtgcattggcacctgtgccacaatgttcagctctgaagtgcaattcgggcacgccggcgcctgcgcgaatcaggcgtctgaaacggcggtcgctaaaaatcaagccctgaaagaggcaggagtctttgtgccaaggagtttcgatgagctcggcgaaattattcagagtgtttatgaagaccttgtggccaacggcgtgatcgtcccggctcaagaggtgccgcctcccactgtgcccatggattatagctgggctagggagctcggcctcattcggaaaccggccagttttatgacctctatttgtgacgagagaggccaggagctgatctacgcaggtatgccaattacagaagtgttcaaggaggagatgggcataggcggtgtcctgggattgctgtggttccagaagcggctccctaaatacagctgtcagttcatcgagatgtgtctgatggtcacggccgaccacgggcctgcggtcagcggagcacacaataccataatttgtgcacgagctggcaaggatctggtgagttccctgacatcgggcctacttaccataggcgatcggttcgggggcgctctcgatgcagccgcaaaaatgtttagtaaggccttcgattcagggattatcccgatggagttcgtaaataagatgaagaaggaaggaaagctgatcatggggattgggcacagggtaaaatcgatcaacaacccagatatgagggtccagatcctgaaggactacgtgcggcagcacttccctgctacacctctgctcgactatgctctggaggttgagaaaattacaaccagcaaaaaaccgaatctcatactgaacgtggacggactgatcggggtcgcgttcgtggacatgctgcggaattgcggctccttcacccgagaagaagctgacgaatacattgacatcggtgcactgaacgggatctttgttctcggacgctccatgggcttcattggacattatctggaccagaagcggttaaagcaggggctctaccgtcacccatgggacgatatatcttatgtgctgcccgagcacatgtcgatgtag

SEQ ID NO: 22897 - DNA, 3276 bp, synthetic construct
  misc_feature 1..3276: note = Description of Artificial Sequence: Synthetic coding sequence
  source 1..3276: mol_type = other DNA
atgagcgccaaggccatcagcgagcagaccggcaaggagctgctgtacaaattcatctgcacaacctccgccatacaaaacagattcaaatatgcccgagtgacacccgatacagattgggccagactcttgcaagatcacccatggcttctgtcacagaatttggtcgtcaaacctgaccagctaataaagagaagaggcaaactaggcctggtgggtgttaatttaaccctcgacggcgtgaaaagttggctgaagcctcggctcggacaagaagccacagtgggaaaagcaactgggttcctaaagaacttcctgattgagccattcgtacctcacagccaggccgaggagttctatgtgtgcatttacgcgacccgcgaaggtgattatgtactgtttcaccacgaaggaggagtggacgtcggcgacgtggacgctaaagcccaaaagctgttggttggcgtcgatgaaaagttaaaccctgaggatatcaaaaaacatcttttggtacacgcaccagaggataagaaggaaatattagcatctttcatcagcggccttttcaatttttacgaggacttgtatttcacttatttggaaattaaccctctggtcgtcaccaaggacggtgtgtacgtcttagaccttgcggcaaaggtcgatgcgactgctgactatatttgtaaggttaaatggggagatatcgaatttccccccccatttgggcgagaggcttaccccgaggaggcctacatagctgatctggatgctaagtctggcgccagcctgaagttaacactgctgaaccccaaaggccgaatctggacaatggtcgcaggggggggagccagtgtggtttattctgatacgatttgcgatttagggggggtgaacgaactggcaaactatggagaatactccggagccccaagtgagcaacagacgtatgactatgccaagactatcctttctcttatgacacgagagaaacatcccgacggaaagattctgatcataggaggatcaattgccaattttacaaacgtggcagcaactttcaaagggattgtgcgagctatacgggattatcaggggccactcaaggaacacgaagtgacaatcttcgtccgtagaggcggtccgaattaccaggagggattgcgggtcatgggggaggttggcaagaccaccggtattcccattcacgtgtttggcacagagactcacatgaccgctatagtaggcatggcgctcggccaccggccaatccctaaccagccgcccacggcagctcacacagctaactttttattaaatgcatcgggtagtacttccactcccgcgcccagccggactgcctccttttccgagtcgagagcagatgaagttgcccccgctaaaaaggccaaaccagcaatgccgcaaggaaagtccactaccctgttctccagacatacaaaggccattgtgtggggtatgcaaactcgcgctgtgcagggtatgcttgactttgattatgtgtgttcgagagatgagccgagcgtggctgctatggtttatcctttcaccggcgaccataagcaaaagttttactggggtcataaggaaatcctcatccccgtgtttaaaaatatggcggatgctatgaggaagcacccagaggtggacgtgctgattaactttgccagcctgagatcagcttacgattccaccatggaaaccatgaattacgcccagattcggacaatcgcaataatcgccgaaggcatccccgaggctctgacccggaaactgatcaaaaaagcggatcagaaaggcgtgaccatcatagggcctgccactgtgggcggcattaagcctggctgtttcaagatcgggaatactggcggaatgttagacaacatactcgcgtctaagctgtatcggccgggcagtgtggcatatgtgtccagaagcggcgggatgtccaacgagctgaataatatcatatcccgcacaacagatggagtatacgagggagtcgcaatcggaggggaccgttacccaggctccactttcatggaccacgtcctgcggtaccaggacacgcccggggttaagatgatcgtggtgctgggagagatcgggggcaccgaagagtacaagatctgtcgggggatcaaagaggggcgtctcactaagcccatcgtttgttggtgcatcggtacctgcgccactatgttcagctctgaggtacagttcggccacgcaggcgcatgcgcaaaccaggcatctgagacagctgtcgccaagaaccaggccctgaaggaagcgggggtgttcgttcctagatcatttgacgaactgggcgaaatcattcaatctgtatatgaagacctagttgccaatggggtgatcgttccggctcaggaggtgcctccaccgactgtgcccatggactatagctgggctcgggaactcggactgataagaaaacccgccagtttcatgacatccatctgcgacgagcgtggccaggaacttatttatgccggaatgcctatcactgaggtcttcaaagaggaaatgggaatcggaggagtactcggtctgctttggttccagaaaagactgcctaagtactcttgtcaatttattgagatgtgtctaatggtcacggcagaccatgggcctgctgtgtctggcgcgcataatactattatctgcgcacgcgccgggaaggacctcgtgtcttctctgactagtggcctgcttacaatcggcgaccgcttcgggggcgcacttgacgcggctgcaaagatgtttagcaaagcctttgatagcggcattatcccaatggagttcgtcaacaaaatgaagaaagagggcaagttgatcatgggcattgggcatagggtgaagagtattaacaatcctgatatgcgggtacagattttaaaggattatgtgcgccagcacttcccagcgacccctttgctcgactacgctctggaagtggagaaaatcaccacaagcaaaaagcctaatttgatactgaatgtggatggactgattggagtcgccttcgtggacatgctgcggaactgtggtagcttcactcgtgaggaagccgacgaatacatcgatatcggtgctctgaatgggatcttcgtcttgggaagatctatgggatttataggacattatctggaccagaagcggcttaagcagggcctgtaccggcatccttgggacgacatctcatacgtactccccgaacacatgtctatgtag

SEQ ID NO: 22898 - DNA, 3276 bp, synthetic construct
  misc_feature 1..3276: note = Description of Artificial Sequence: Synthetic coding sequence
  source 1..3276: mol_type = other DNA
atgagcgccaaggccatcagcgagcagaccggcaaggagctgctgtataaatttatttgtactacgagtgccatccaaaaccggtttaaatatgctagggtgacgccggacacagactgggctagactgttgcaggatcatccctggctcctgtctcagaatcttgttgtgaagccggatcagttgatcaaaagaaggggcaagcttggtctagtaggcgtgaacctgacactagatggcgtcaaatcatggcttaaacctagattaggccaggaagccaccgtgggtaaagcaaccggctttctgaagaattttctaatcgaacccttcgtcccccacagccaggcggaagaattctacgtttgcatctatgccactcgcgaaggagactatgtgttattccaccacgaaggaggcgtcgacgtgggggacgttgatgccaaggcccagaagctgctggtcggcgtggacgagaaacttaatcccgaggacataaaaaaacacctgctcgtccatgcaccagaagataagaaagagattctagcgagcttcattagtggtctctttaacttttacgaagatttatatttcacttatctggaaataaaccctctagtggtgaccaaggacggtgtttatgtgctggacctcgcagcaaaagtcgacgctacagctgactacatttgtaaagtaaagtggggagacattgagtttcctccgccctttggcagggaggcttaccctgaagaggcctacatagccgatcttgacgccaaaagtggcgctagtttgaaattgacacttctgaatccgaaaggccggatctggacgatggtggctggaggcggcgcttccgttgtttactccgataccatatgtgatctggggggcgtgaacgagttagccaactacggcgaatattctggagccccatccgagcagcaaacatatgattacgcgaagaccattctttctctcatgacaagagagaagcaccccgacggtaagatactgatcatcggaggctctattgccaattttaccaatgttgccgccacctttaaggggatagtgcgcgctatacgggattatcaaggacccctgaaagagcacgaggtcacaattttcgtcagaagagggggccccaactaccaggaaggtctcagagtgatgggagaggtggggaaaactactgggatcccaatacatgtgttcggaaccgagacacatatgactgctatcgtggggatggccctgggccatcgtccaattcctaatcagccacctacagccgctcacaccgctaacttcctccttaacgcaagtggttccaccagcacgccggcgccttctaggaccgcttccttttcagagagccgtgcggatgaagtggcacccgccaagaaggcaaaaccagccatgccacagggaaaatctaccactctattctcacgtcacacaaaagccatagtctggggcatgcaaacccgtgccgtccagggtatgcttgacttcgactacgtgtgctctagagatgaaccttctgttgctgcaatggtgtatccctttaccggtgaccacaaacagaagttttattggggacacaaggaaattctgatccctgtgtttaagaatatggcagacgccatgcgcaagcaccccgaggtggatgtgctgatcaatttcgctagcctacggtccgcctatgatagtaccatggagacgatgaactacgctcagatcaggacaatcgctataattgcagaggggattcctgaggcccttacccgcaagttgattaaaaaagctgaccagaaaggagttaccatcatcggcccggccactgtagggggcataaagcccggctgcttcaagatcgggaataccggcggtatgctagataatatactcgcaagcaaattgtacagacctgggagcgtcgcttatgtgtctaggtccggcggcatgtctaacgagctgaacaatattataagcagaacaaccgatggggtctatgaaggcgtcgcaatcggaggcgaccggtacccgggttcgaccttcatggatcacgttctcaggtaccaggacaccccaggggtaaaaatgatcgtggtgctgggtgaaatcggaggaacagaagaatacaagatctgtagaggcattaaggagggcaggttaactaagcccatcgtgtgttggtgcatcggaacgtgtgcaacaatgttctcttccgaggtccagtttggacacgccggcgcttgcgctaatcaggctagtgagaccgccgtggcaaagaatcaggcgctaaaagaagctggcgtgtttgtcccaagaagttttgatgaactgggagagattatccaaagcgtctacgaggacctggttgcgaacggggtgatcgtgcccgcccaggaggtgccccctccaaccgtcccaatggactatagctgggcgcgcgagctaggacttattaggaaacccgcgtcgtttatgaccagcatctgtgacgagagaggccaggaactcatctacgcaggtatgccaataactgaggtgtttaaggaggaaatgggaatcggtggcgtcctgggtttgctgtggtttcaaaaaaggctgccaaaatatagctgccagttcatagaaatgtgcctaatggttaccgcagaccacggtcctgccgtctctggggctcacaatacaatcatctgtgccagggcaggcaaggacctggtttcctctctgacttcaggactcctgacaattggagataggttcggtggggcccttgatgcggcagcaaagatgttttccaaggctttcgactctgggatcatcccaatggaatttgttaacaaaatgaagaaagaaggcaagctcattatgggaataggacaccgggtcaagagtattaataacccggatatgcgggtccagatactaaaagattacgtgagacaacacttccctgccactcccctcctggactatgccctggaagtcgaaaagattaccacgtccaagaaacccaatctgatcctcaatgtggatggacttattggcgtcgcttttgtggacatgctgcgcaattgtggttctttcacaagagaagaggcggatgagtacatcgacatcggggctttaaacgggatctttgtgcttggaaggtcaatgggcttcattggtcattatctggatcagaaaaggctgaagcaagggctgtatagacatccctgggatgatatcagttatgtgctacccgagcacatgtcaatgtag

SEQ ID NO: 22899 - DNA, 3468 bp, synthetic construct
  misc_feature 1..3468: note = Description of Artificial Sequence: Synthetic coding sequence
  source 1..3468: mol_type = other DNA
atgggcgccggcaagagccccgccggccccggccagaagcccgacccagggaagctcccggccgccggggttctgcgaatcctccgcggctcaagtgggttatggaaaaagagacgcgctcggacatccgccgaaaccgggagggctgggcttagcgccgcaatgtctgctaaagcaattagcgaacagacaggaaaggagctactttacaaattcatctgtacaaccagcgccattcagaataggttcaaatatgcaagggtgactccagatacggattgggcccgactgctccaggaccatccctggctgctcagtcagaatctggtagtgaaaccagatcagttgatcaaaaggagagggaaactaggcctggtgggagtcaaccttacgctggacggagtgaaatcctggttaaaaccgcggctgggacaggaggccacggttggtaaggccaccggtttcctgaagaacttccttatcgagccctttgtgccacacagccaagctgaggagttctacgtgtgtatttatgcgactagagaaggagattatgtcctctttcaccacgaagggggcgttgacgtgggtgatgtcgacgcaaaggctcagaaactgcttgtcggggtcgatgagaaactcaatcctgaagacattaaaaaacatttgcttgtgcacgcacctgaagataagaaagaaatactcgcctcctttatatcaggtctgttcaatttctatgaggatctgtatttcacctaccttgagattaaccctttagtcgtgaccaaggatggagtctatgttctggatttagctgcaaaagtcgatgccacggctgattatatatgcaaggtaaagtggggggacatcgaatttccgcctcctttcggacgagaggcctaccccgaggaggcttacatcgctgacctggacgccaaatccggtgcgtctctaaagctgaccctcttaaatcctaagggtcgaatttggaccatggtcgctggtggaggtgcctctgtagtgtactccgatacaatctgcgacctcggaggggtgaacgagctagcaaactacggtgaatattcaggcgcaccttctgaacagcagacctatgattatgccaaaaccattctcagcctcatgacgcgtgagaaacatcccgacggcaagatactgatcattggcggatccatcgcaaatttcaccaatgtggcagccacgtttaaaggaatcgtgcgggcgattcgggactaccagggtccactgaaggaacacgaagtgaccatcttcgtgagacgcggggggcccaactaccaagagggattgagggtgatgggagaggtggggaagacaacagggattcccatccacgtattcggcactgagactcacatgacggctatagtcggaatggccctcggccaccgtcctattcccaatcagcccccaactgccgctcataccgcgaactttctcctgaatgcttccggatcgacctcaaccccggctccctcccgcacagcctctttctccgagtcccgggccgacgaggtcgcacccgccaagaaggctaagcccgcaatgccccaggacagcgtgccttcccctagaagtctgcaaggcaagtccaccacccttttctcccggcacaccaaagctattgtttggggcatgcagaccagagcggtgcaaggaatgcttgacttcgactacgtgtgtagccgggatgagccaagcgtagcggcaatggtgtatccatttaccggcgaccacaagcagaagttttactggggtcataaagaaattctgattcctgtctttaaaaacatggctgacgctatgcggaagcacccagaagtcgatgtcctaattaacttcgctagtttacggtccgcctacgattcaaccatggagactatgaactatgcccagatcagaaccatcgccatcatcgccgaaggcatcccagaagcacttacaagaaaactaatcaagaaagccgatcagaagggtgtcactatcatcggacctgccaccgtcggcggaatcaagcccggttgttttaaaatcggcaatactggcgggatgttggacaacatcttggcatctaaactatatcgcccaggctctgtcgcatacgtgagtcgctcaggtggaatgtccaatgaattaaacaacattatttctaggactaccgacggcgtgtatgagggcgtcgcgatcgggggagataggtacccaggaagcacatttatggaccacgtgctccgctatcaagatacaccaggcgtaaaaatgattgtggttctgggcgaaattggcggaaccgaagagtacaaaatctgtcgcggaatcaaggagggcaggctgactaaacccatcgtctgctggtgcatcggaacctgcgctacgatgttctcatcagaggtccagttcgggcacgcaggtgcctgcgcaaaccaagcgtctgagaccgcagttgcaaagaaccaggcactaaaagaggccggcgtcttcgtaccacgatcatttgacgaactgggggagatcattcagagcgtctatgaggacctcgtggcaaacggagttatcgtcccggcacaggaggttccacctccaaccgtgcccatggactattcgtgggcacgtgaacttggtctgattcgtaaacctgcaagcttcatgactagcatttgtgatgagcgaggacaggaactcatctatgctgggatgcctattaccgaagtctttaaagaagagatggggatcggcggcgtgctggggctactatggttccagaagcgactcccaaagtactcctgtcagttcatcgagatgtgcctgatggtcactgctgatcatggccctgcggtgagcggcgctcataatacaataatatgtgcaagagcagggaaagatttagtatcttcactgacaagcggcctcctgaccatcggagacaggtttggcggcgctttagacgcagcagccaagatgtttagcaaggcttttgattccgggattattcctatggagtttgtcaacaaaatgaagaaggaaggcaagctgataatgggaatcggtcaccgggtcaaaagtataaataatcctgacatgcgtgtgcagattctcaaggattatgtccgccagcattttccagccacacccctgctagattatgctctcgaggtggagaagataaccacatcaaaaaaacccaatcttatcctgaatgtggatggactgattggcgtggcattcgtggatatgctaagaaactgcgggagcttcacaagggaagaagccgatgaatacatcgatatcggggccctcaacggaatcttcgtcctgggacgctcgatggggtttatcggacactacttggatcagaaaaggttaaaacaaggactgtatcgacacccttgggatgatattagctatgttttgccggaacatatgtctatgtag

SEQ ID NO: 22900 - DNA, 2493 bp, synthetic construct
  misc_feature 1..2493: note = Description of Artificial Sequence: Synthetic coding sequence
  source 1..2493: mol_type = other DNA
atgagcgccaaggccatcagcgagcagaccggcaaggagctgctgtacaagtttatttgcacaacatccgcaattcagaataggtttaagtacgcgcgggtaactcctgatacagattgggctagacttctgcaagaccacccctggctgctttcgcagaatctcgttgtgaaaccagaccagttgatcaaaagacgcggcaagctgggccttgttggcgtgaacctaaccctggacggagtgaaatcgtggctaaaaccccgactaggtcaagaagcaaccggcatcgtgcgcgccattagagattaccaggggccactcaaggagcatgaagttacaattttcgtccgaaggggaggcccgaactaccaagaagggctgagggtgatgggggaagttggtaagacgaccggcatccctattcatgtttttggcaccgagacacatatgaccgccattgtggggatggccctcggacaccggcctatccccaaccagcccccgactgcggcacatactgccaactttctcctgaacgcctctggctcaacatctacgccagcccccagtaggaccgcaagctttagtgaatcgcgtgccgatgaggtggcaccggcaaagaaagccaaacccgccatgcctcagggcaagtcaacaactctcttctcaagacacactaaggccatcgtctggggcatgcagacccgcgccgtccagggcatgctggatttcgactacgtgtgtagtcgagatgagcccagcgtcgctgcgatggtctacccattcacaggtgaccataagcagaaattctattgggggcacaaagaaatcctcatcccagtcttcaagaatatggccgacgccatgcgaaaacacccagaggtggacgtcttaataaatttcgcatcactgcggagcgcctacgattcgactatggagacgatgaattatgcacagataagaacaatagccataatagccgagggcattcccgaagccctgacacgtaagctgatcaaaaaagccgaccagaaaggggtgaccattatagggccggccactgtcggcggcattaaaccaggatgtttcaagataggcaacactggcggcatgctggataatatactcgcatccaaactctacagacccggctcagtggcttacgtttcccgctccggcggcatgtctaacgagctgaacaatattatttcgcgcaccaccgatggggtttacgaaggtgtggccattggcggggaccggtatccaggctctacattcatggatcatgttctaagatatcaggatacacccggagtgaaaatgattgtggtgctgggagaaattggaggcacggaggagtacaaaatttgccggggtattaaagaaggcagacttaccaagccaattgtgtgctggtgcatcggcacatgcgcaaccatgttctcaagtgaggttcagttcggccacgccggtgcctgcgcaaatcaggcctctgaaaccgccgttgctaagaaccaagctcttaaggaagctggggtcttcgtgcccagaagtttcgatgaactgggagagataatccagtctgtgtatgaggacctggtcgccaatggcgtgattgttcctgcccaggaagtccccccgccgaccgtgcctatggattactcttgggccagggagctggggctcatcagaaagcccgcgagctttatgaccagcatctgtgacgagcgagggcaggaactgatctacgctggcatgcctattacagaagtattcaaagaagaaatggggatcgggggcgtgctcggcctactgtggtttcaaaaacgactacctaaatattcttgtcaattcatcgaaatgtgcctcatggtcaccgctgaccatggtcccgctgtgtctggcgctcacaacaccattatttgtgccagagcgggcaaggacttggtgtcatccctgacctctggactgctgacaatcggagaccgctttggtggcgctctggacgctgccgctaagatgttcagcaaagcctttgacagtggaatcatcccaatggagttcgtgaataagatgaaaaaagaaggcaagctgatcatgggcattggccacagggtgaaatcgataaacaatcctgatatgcgcgtacaaatactgaaagactatgtcagacagcattttcctgcaaccccgctcctggactacgcgttagaggttgaaaaaatcactactagcaaaaagcccaacctgatcctcaacgttgacggcttgattggcgttgcttttgttgacatgctgcgcaactgcggatcttttaccagggaagaggcagatgagtatatagacatcggcgccctaaacgggatctttgtactgggtaggtcaatgggctttattggccactacttagaccaaaaaagattaaaacagggcttatatcggcacccctgggacgatatttcttatgtacttcctgagcatatgagcatgtag

SEQ ID NO: 22901 - DNA, 1512 bp, synthetic construct
  misc_feature 1..1512: note = Description of Artificial Sequence: Synthetic coding sequence
  source 1..1512: mol_type = other DNA
atgagcagcatcctggaggagcggatcctgggcgccgacaccagcgtcgacctggaagagactggccgcgtgctgagcataggagacggcattgcgcgggtacacggcctcaggaacgtgcaagctgaggaaatggttgagttctccagtggtctaaaagggatgtcactgaacttagagcccgataatgtaggagtcgttgtcttcggaaatgacaagctcattaaggaaggggacatcgtgaagcggaccggggctattgtggacgtgccagtcggcgaggagctgctaggccgtgtagtggacgctctaggtaatgccattgacggcaaagggcccatcggaagtaagacgaggcgccgggttgggctcaaagcccccggcattattccgaggatctctgttcgagaaccaatgcagacggggatcaaagccgtggacagtctggtgcctattgggcgaggccagcgcgagttgatcatcggggacaggcagaccggcaaaacgtcaatcgctatcgacacaataattaatcagaagagatttaatgacggatctgacgagaagaagaaactgtactgtatctatgtggccatcggccagaaacgctctaccgttgctcagttggtcaagcgtcttaccgatgccgacgccatgaaatacactatcgtggtgtccgcaactgctagcgatgctgctcccttgcagtacctggccccctatagcgggtgttccatgggagagtactttcgcgataatggcaagcacgcactcattatttacgatgacctgagcaaacaggccgtcgcttatcggcagatgtccctcttactgcggcggccccctgggagagaggcataccctggtgacgtgttctaccttcatagcagactgctcgagagagccgcaaagatgaatgacgcctttggaggcgggtccttaactgccctccccgtgatcgagacccaagctggggacgtttccgcctatataccgacaaatgtaatcagcattaccgacggacaaattttcctggaaacagagctcttttataagggcatcaggccagccattaacgtgggcttgtcagtgtccagagtgggcagcgccgcccagacgcgagcgatgaaacaagttgccggcaccatgaagcttgagttggcacagtaccgcgaggtagcggccttcgctcaattcggtagtgatctggacgctgcgacccagcaattactttcccgcggcgtgcgcctcacagagctcctgaagcaagggcagtactctcctatggccatagaggagcaagtggcagtcatttacgcaggcgtgcggggctatctggacaagctggaacctagtaaaatcacaaagttcgaaaatgcttttttatcccatgtggtctctcagcatcaggctttactaggcacaatccgcgcagacggcaagatttctgaacagtctgacgctaagctcaaggagatcgtcacgaatttcctggccggattcgaagcctag

SEQ ID NO: 22902 - DNA, 177 bp, synthetic construct
  misc_feature 1..177: note = Description of Artificial Sequence: Synthetic coding sequence
  source 1..177: mol_type = other DNA
atgctgagcgtgcgggtggccgccgccgtggtgcgggccctgccccgcagagctggattggtgtctaggaacgcccttggctcttcattcattgccgcccggaattttcatgcctctaacacacacctacagaaaacgggcaaattactgtttctgtccctgcggcggacctattag

SEQ ID NO: 22903 - DNA, 1596 bp, synthetic construct
  misc_feature 1..1596: note = Description of Artificial Sequence: Synthetic coding sequence
  source 1..1596: mol_type = other DNA
atgctgagcgtgcgggtggccgccgccgtggtgcgggccctgccccgcagagcagggctggtctcaagaaacgctctgggatccagcttcattgccgccagaaattttcacgcctcaaatacccacttgcagaaaactggaacagctgagatgtcgtccatactggaggagcggatcttgggcgcagatacaagcgtggaccttgaggagacaggccgagtcctgtccattggcgacggtatcgcgagagttcatggcctgcgtaatgttcaggccgaggagatggtcgagtttagcagcggtttgaagggcatgtcccttaacctggaacctgacaacgtcggggtggttgtgttcggcaatgataagctcatcaaggaaggggatatcgtgaagcggacgggtgctatcgtggacggacctattggatcgaagacgcgccgtcgcgtcgggctcaaggcacctggcatcataccgcgaatttccgtcagagagcctatgcaaactggcatcaaggctgtcgattcactggtcccaatcggtagaggacaacgggagttaatcataggggacaggcagacaggaaaaaccagcattgcgatcgatacgatcatcaatcagaagaggtttaatgacggttctgacgagaaaaaaaaactgtactgtatctacgtggctattggacagaagaggagtactgtcgcccagctagtgaaaagattaaccgatgccgatgccatgaaatatactatcgtggtgagcgccaccgcatccgatgccgctcctctgcagtacttggccccctattctgggtgtagtatgggcgagtactttagggataatggcaagcacgccctgatcatctatgatgatctttcaaagcaagcggtggcctaccggcagatgagtctcctcctgcggagacctcccggaagagaggcctaccctggtgatgtgttttacctgcactccagacttcttgagcgcgcagccaagatgaatgatgctttcggtgggggcagcctgaccgccctacccgtgattgagacccaggccggggatgtgtccgcttatatcccaaccaatgtgatcagtatcacagacggacagatctttctggaaaccgaactcttttataaaggcatcaggccggcgatcaacgtgggcctgtctgtgagcagagtcggatccgccgcccaaacgcgggctatgaagcaagttgcgggtactatgaaacttgaactcgctcagtaccgtgaggttgcggcctttgctcagttcggctccgacttggacgccgcaactcagcagctgttgagtaggggggttcgattgactgaactccttaagcaagggcagtattctcccatggccatcgaagaacaggtggcagtcatttacgccggcgtgcggggctacctcgataagttagaaccaagtaaaatcacaaaattcgagaacgcgttccttagtcatgtggtctcgcagcatcaagccttgcttggcacaattcgggctgacgggaagatatccgagcagagtgacgcaaagcttaaggaaatcgttactaacttcctcgcaggcttcgaagcctag

SEQ ID NO: 22904 - DNA, 1662 bp, synthetic construct
  misc_feature 1..1662: note = Description of Artificial Sequence: Synthetic coding sequence
  source 1..1662: mol_type = other DNA
atgctgagcgtgcgggtggccgccgccgtggtgcgggccctgcccaggcgcgccgggctggtttctagaaacgcattgggatccagcttcatcgctgcaaggaatttccatgcctccaacacccatctgcagaaaaccggaactgccgaaatgagctcaatcttagaggaacgcattctgggcgccgacacctctgtggacctggaagaaacgggcagagtgctttctatcggagatggcatcgctcgggtacacggattgagaaatgtccaggcggaggaaatggtggagtttagctcagggctgaagggcatgtctctgaatctggagcccgataatgtgggtgtggtggtgtttgggaacgacaagttgattaaagaaggcgacatagtcaaacggaccggcgcaatagtcgacgtaccggtcggagaagagcttctgggcagggttgtggacgctctgggtaacgccatcgatgggaagggacccatcggcagtaagactaggaggcgggtgggactcaaagcccccggcataatcccacgaatctccgtgcgagagccgatgcagactgggattaaagctgtggactcactggtgccgattggccgggggcagagagaattaatcataggagatagacaaactggcaagacatccatcgcgattgacactattataaaccagaaaaggttcaatgacggctccgacgaaaagaagaaactatattgcatatatgttgctattggccagaagagatccaccgtggcccaactggtaaaaaggttaacagatgccgatgccatgaaatacacaatcgttgtatcggccactgcctccgatgcggcacctctgcaatatctggctccgtatagtgggtgctccatgggcgaatacttcagagataacggtaagcatgctttgattatctatgacgacctaagtaaacaggctgtggcttatagacagatgagtttactgctgcgtcgtcctcccggacgcgaagcataccccggcgacgtattttaccttcactctagactgttggaacgagcggccaaaatgaatgatgcatttggaggtgggtccctgacagcactccccgtcatcgaaacccaagctggtgacgtcagtgcctatattccaaccaatgtcattagcatcactgatgggcagattttcttggagaccgagctattctacaaagggatcaggcctgccattaatgtgggtctgtctgtgtcccgcgtgggctcggcagcacaaacacgggctatgaagcaggttgctggtaccatgaaactcgaactggctcaataccgtgaagtagcagcctttgctcagttcggctccgacctggacgctgccactcagcagctgctctccagaggcgtgcgcctcaccgagctgttaaagcagggccaatactcccctatggcgatcgaggaacaggttgctgtgatttacgctggggttcgtggctatctggacaagcttgagccgtctaaaatcacaaagttcgaaaatgcgttcctctcacacgtggtctcccaacaccaagccctcttggggacaatcagagccgatggcaagatcagcgaacagtcagatgccaagctgaaagagatcgtgaccaactttctggctgggttcgaggcctag

SEQ ID NO: 22905 - DNA, 1662 bp, synthetic construct
  misc_feature 1..1662: note = Description of Artificial Sequence: Synthetic coding sequence
  source 1..1662: mol_type = other DNA
atgctgagcgtgcgggtggccgccgccgtggtgcgggccctgcccaggagagcgggcctcgtatctcgcaacgcattgggctcaagcttcatcgctgcgcgaaatttccatgcctccaacacacacctgcagaaaactggaactgccgagatgtcatcgatattggaggagcggatacttggggccgacacttccgtcgacttggaggagacagggcgagttctgtccattggagacggcattgcaagagtgcacggcctccgaaatgtgcaggccgaggagatggtcgagttctcgtccgggcttaaagggatgtcacttaatcttgagcccgacaatgtgggtgtcgtggtgttcggaaatgataagctgatcaaggagggcgatattgtgaagcgtacaggcgccatagtggatgtaccggtgggcgaagagctccttgggcgcgttgtggacgctttagggaacgctatcgacggtaagggcccaatcggttctaagacacgccgccgggttggtctcaaggcccccggtattattccacgcatctctgttagggaacccatgcagacagggattaaggctgtggacagcctcgtaccaatcggtcgcggacagcgagagctaataatcggggaccggcagaccggaaaaaccagtatcgcaattgacactatcataaaccagaagaggttcaatgacggcagcgatgaaaaaaaaaagctctactgcatctatgtggcgatagggcaaaagagatccactgttgcacagctggtgaaacggctgacggacgccgacgccatgaagtataccatcgtggtttctgcaacagcttctgacgcagccccgcttcagtatcttgcaccatacagtggctgcagcatgggcgaatatttccgcgataacggaaagcacgccctgattatttacgacgacctgtccaagcaggccgttgcttataggcaaatgagtttacttctgcgtagacctccggggcgcgaagcatacccaggcgacgtcttctaccttcattctcgactgctcgagcgggcagccaaaatgaacgatgctttcggtggtggcagcttgaccgccttaccagtgatcgagactcaagccggcgatgtttccgcttatatacctactaatgtgatttccataactgacggacagatttttctagaaacagagttgttttacaaaggtattcggccagcaatcaatgtgggcctgtccgtctcaagggtagggagcgctgctcagactcgagcaatgaagcaagtggccggaacgatgaagctagagctggctcaataccgagaggtagccgcattcgcgcaatttgggagcgatctggacgcagccactcaacaactgttgtctagaggagtccgattgacagagttacttaagcaggggcaatactccccaatggctatagaggagcaggtcgctgtcatctatgctggtgtaagagggtatctggataagctcgagccatctaagatcacaaagtttgaaaatgcttttctttctcacgtggtctcacaacatcaggccttgctggggacaatccgcgctgacggcaagattagtgagcagagtgatgccaagttgaaagaaatcgtgacaaatttcctggccgggtttgaagcctag

SEQ ID NO: 22906 - DNA, 1512 bp, synthetic construct
  misc_feature 1..1512: note = Description of Artificial Sequence: Synthetic coding sequence
  source 1..1512: mol_type = other DNA
atgagcagcatcctggaggagcggatcctgggcgccgacaccagcgtcgatctggaggagacgggcagagtgctgtccatcggcgatggcatcgctcgcgtgcacggattgaggaacgttcaagctgaagagatggtcgaattttctagtggcttaaaggggatgagtctgaacctcgaacccgacaacgtgggagtggtagtgtttggcaacgataaacttattaaagagggggatatagttaagaggaccggcgccatcgtggatgtccctgtgggcgaagagcttctgggccgagtagtcgacgccttgggtaacgcgatcgacgggaaaggccctattggaagtaaaacccgcaggagagtcggcctaaaggcccccggaatcataccaagaatctccgtgagggaacccatgcaaaccggcataaaggccgtggactcattagtgcctattggcagaggtcagagggagctaatcatcggtgacagacagactggaaagacgagtatcgcaatcgataccatcattaaccagaagcgcttcaatgacgggtcagatgagaagaaaaagctatactgcatctatgtcgcaataggtcagaagaggtcgacagtggcgcagctagtcaaaagactgaccgacgcggacgctatgaaatataccatagtcgtgtcagctacagcatcagacgcggctcctctccaatacctcgccccttattcaggatgcagtatgggcgagtacttcagggataatggaaagcatgctctgattatatacgatgacttatcaaagcaagctgttgcctacaggcaaatgagcctcctgttgcgcaggccgccaggtcgagaagcttacccgggggatgtcttttatctgcattctcggctgctggaaagagcagccaaaatgaatgacgcattcggcgggggctctctcaccgcactgcctgtcatagagacccaagctggcgatgtgtctgcttacattcccaccaatgtaatctccatcaccgatggccagatcttcctcgagacagagctcttctataaggggatcaggccagcaatcaatgtgggcctgagcgtctcccgcgtgggatcagcagcgcagacccgagctatgaaacaagttgcgggaactatgaaattggaactcgctcagtatagggaagttgctgcttttgcacagttcgggagtgatttggacgccgccacacaacaactactgtccagaggggtgcggctgaccgagctgctcaaacagggccagtactcccctatggctattgaagaacaggtcgccgtgatttacgcgggagtcagggggtacctagacaagctggaacctagtaagataaccaaatttgagaacgcctttttgagtcatgtcgtgagtcaacaccaagccctgctaggcacgatcagagccgatggaaagatttctgagcagtcagacgcgaagctgaaagagattgtgaccaacttcctggccggctttgaggcttag

SEQ ID NO: 22907 - DNA, 3843 bp, synthetic construct
  misc_feature 1..3843: note = Description of Artificial Sequence: Synthetic coding sequence
  source 1..3843: mol_type = other DNA
atggacctggagggcgaccggaacggcggcgccaagaagaagaacttctttaagctgaacaataaaagtgagaaagataaaaaggaaaaaaagcctacagtctccgtcttcagtatgttccgttacagcaattggctggataagctgtacatggtggtgggcaccctcgccgcaatcatccacggggcaggactgcccctcatgatgttggtcttcggtgaaatgaccgacatcttcgctaacgctggcaatcttgaggacctgatgagcaatatcaccaaccgtagcgatatcaatgataccggcttttttatgaatctggaggaggatatgaccagatacgcttactactactcagggattggggcgggggttttggtggcagcttatatccaagtcagtttctggtgcctagccgctggccggcagatccacaagattaggaagcagttcttccatgcaattatgcgtcaagagattgggtggtttgacgtccatgacgtgggagaattaaacacccgtctgacggacgacgttagtaagatcaacgaggggatcggcgataagattggaatgttcttccagtcgatggcaacattctttaccggctttattgtggggtttactcgaggatggaagttaaccttggtcatcctggccattagtcccgtgcttggattgagcgctgccgtttgggcaaaaatcctgtcctcctttactgacaaggaacttcttgcctacgccaaagccggggctgtggccgaggaggtcttagcagctatcagaacagtgatcgcttttggcggacagaagaaagaactggaaaggtacaataaaaatctcgaggaggcaaaaaggatcggaataaagaaagccattacagcaaacatctctattggcgctgcttttcttcttatctatgcctcttatgcccttgcgttctggtatggcactacccttgtcttgagtggcgagtacagcatcggtcaggtgctgacagtatttttttccgttctgataggagccttttccgtcggacaagctagccccagtatcgaagcctttgccaatgcgcggggggccgcctacgagatcttcaagatcattgataacaagcccagcatcgattcctattccaagagcggtcataagcctgataacataaagggcaacttggagtttcgcaatgttcacttttcataccctagccgcaaggaagtcaaaatcttgaaaggtttaaatcttaaggtgcagtccggtcaaacagttgcactggtcggcaactccggctgtgggaagtccaccacagtgcagctgatgcaaaggctctatgaccccacagagggcatggtttccgtggacggacaagatattcgcaccatcaatgtgaggttcctgagagagatcattggagtggtgtcgcaggagccagtgctgtttgccactaccatcgccgagaacatccgctacggtagagagaacgtgaccatggacgagatagagaaagctgtaaaggaggccaacgcctacgatttcatcatgaagctaccccacaagttcgataccctagttggagaaagaggagcgcaactgtcaggaggacagaagcagcgtatcgctatcgcgagggccctggtcaggaaccctaaaatcctgctgctggacgaggctacgagcgcactcgatacagagtctgaggctgtcgtccaggtcgcactggataaggcccgcaagggtcggaccaccatcgttattgcacaccgtctttctactgtcaggaacgccgatgtcattgccggatttgacgacggcgttattgtggagaagggtaaccacgatgagctcatgaaggaaaaaggcatatacttcaaactagtcactatgcagacggctggcaatgaggtagaactcgagaacgcagcagatgaaagcaagagcgagatcgatgcccttgaaatgagctcgaacgatagtcgctcctccctgatccgtaaaagaagtacccggcgttctgtcagaggcagccaggcccaggaccggaaactgtccacaaaagaagctctggatgagtctatccccccggtgagcttctggcggatcatgaaactgaatctgactgagtggccctactttgtagtcggtgtcttttgcgccattattaacggaggactccaaccagctttcgcgattatcttttctaagatcatcggagtgtttaccagaatagatgacccagagaccaagcgccagaattccaacctatttagtcttctcttcctggctctgggaatcatctccttcattactttctttctgcaaggcttcaccttcggcaaggccggtgagattctcacaaagaggctgagatacatggtatttagaagtatgctaagacaagacgtgtcctggtttgatgaccccaaaaacacaactggcgccctcaccacaagactggccaatgatgccgcacaagtaaagggcgcgattggctcgagacttgcagtcatcacccagaacatcgcgaacttaggtactggtattatcataagcttcatttacgggtggcagctcactctgctgctgcttgcaatagtgcctattattgctatagcgggcgtggttgaaatgaagatgctgagcgggcaggctttaaaggataagaaggagctggagggaagtgggaagatcgcaaccgaggccatagaaaactttcgaaccgtggtaagcttaactcaggagcagaaattcgagcatatgtacgcacagtcgcttcaggtgccatatcggaattctttaagaaaagcacacatttttgggattaccttcagcttcacgcaggccatgatgtatttctcttatgctggatgctttcgcttcggcgcctacctggtagctcataagctaatgtcgttcgaagacgtgcttcttgtgtttagcgctgttgtcttcggtgctatggcggttggccaagtgtcttcattcgctcccgattatgcaaaggctaaaatcagtgccgcccacatcattatgattatagaaaaaactcctctcatcgattcttacagtactgagggcttaatgccaaatactttggaaggcaacgtgacattcggagaggtggttttcaactaccctacgcgacccgatataccagtgctacaggggctgtccctagaggtgaagaaagggcagacgcttgctttggtgggttctagtggctgtgggaagtcaactgtggttcaactccttgagcgcttttacgatcccctagccggcaaagtgctactagacggaaaagaaatcaaaagactgaatgttcagtggctgagagcacacctgggcatagtttcccaggagccgatcctgtttgactgttctatcgccgagaacatagcctacggtgataactctagagtggtcagccaagaggagatcgtaagagctgccaaggaggcaaacatccacgccttcattgaatcactgcccaataagtacagcaccaaggtgggtgacaagggcacacagctgtctggcggccagaaacagcggattgctatagctagagcactggttaggcagccgcatattttactgctcgatgaggcgacctcagctcttgacacagaaagcgaaaaggtggtgcaggaggccctcgacaaggccagggaagggagaacttgtattgttatcgcgcaccgcctgagtacaatccagaatgctgatctcattgtcgtgtttcagaatggtagggtgaaagagcacgggacacaccaacagttacttgcacagaagggaatctacttctcaatggtctccgtgcaagcagggacaaagcgtcagtag

SEQ ID NO: 22908 - DNA, 69 bp, synthetic construct
  misc_feature 1..69: note = Description of Artificial Sequence: Synthetic coding sequence
  source 1..69: mol_type = other DNA
atggacctggagggcgaccggaacggcggcgccaagaagaagaacttttttaagctgaataataagtag

SEQ ID NO: 22909 - DNA, 147 bp, synthetic construct
  misc_feature 1..147: note = Description of Artificial Sequence: Synthetic coding sequence
  source 1..147: mol_type = other DNA
atggacctggagggcgaccggaacggcggcgccaagaagaagaactttttcaagttaaacaacaaatccgagaaagacaagaaagagaaaaagcccaccgtatccgtgttctccatgtttcgatactcaaactggctggataaatag

SEQ ID NO: 22910 - DNA, 3186 bp, synthetic construct
  misc_feature 1..3186: note = Description of Artificial Sequence: Synthetic coding sequence
  source 1..3186: mol_type = other DNA
gccctgagccccgtgatgggcgtgagcgccggctactggcccaagatactgtctagttttactgataaagagttgctagcttacgccaaagccggagccgtcgctgaggaggtcctcgcagccatcagaaccgttatcgcctttgggggacagaagaaagaattggagcgttacaacaagaatctcgaggaggccaaaagaattgggattaagaaagctatcactgccaacatctccattggcgccgcatttcttcttatctacgcatcgtatgctctcgccttctggtatggcactacgctggtgttgtccggggagtacagcattgggcaggtcctgacagttttttttagcgtgctgataggtgccttcagcgtaggccaggcgtctcctagcattgaagcatttgccaacgcacgaggtgcggcgtacgagatatttaaaattatcgataataaacccagcattgactcatattccaagtcagggcataagcctgacaatattaaaggcaacctggaatttaggaatgtgcacttttcttacccctcaaggaaggaggtgaagatcttaaaggggttgaatctgaaagtgcagtccggacagactgtggctcttgtcggcaattccggctgcgggaaaagcacgacagtgcagcttatgcagcggctgtacgacccaactgaggggatggtctccgtggacggtcaggatattagaacaattaatgtcaggttcctgcgcgagattatcggcgtggtgagccaggagcccgtgctgtttgccacaacaatagccgaaaacattcgctacggaagagagaatgtgacaatggacgagatcgagaaggccgtgaaggaagctaatgcttacgattttatcatgaaattgccgcacaagtttgacacactggttggcgaaagaggagcccaactgtctggaggccagaagcagcgaatcgccatcgcgagagccttagtcaggaatcctaaaattctgctcctcgacgaagccaccagcgcactagacactgagtccgaagccgtcgttcaagtggcattggataaagctcgtaaggggagaaccacgattgttattgctcatcgactctcaaccgtgagaaacgctgatgtaatagccggctttgacgacggtgtgattgtcgagaaggggaatcacgatgagcttatgaaagagaagggcatctatttcaaactggtgactatgcagaccgcaggaaacgaagtcgagctggagaatgccgccgatgagagcaagtccgagattgacgcccttgagatgtcaagcaacgattcccggtcctctcttatccgtaagcggtctacaagacgttccgtgagggggagccaggctcaggatagaaagctgagtaccaaggaggcacttgacgaatcgatcccccccgtcagcttctggcgtattatgaagctgaacttgactgaatggccttatttcgttgtcggggtgttttgtgcaattatcaatggcggacttcagcctgcattcgcgattatcttctcaaagatcataggagtctttacccgaatagacgaccccgagaccaagcgccagaactccaacttgttctccctattgtttttggccctcggaataattagtttcattaccttctttttacagggtttcactttcggcaaagctggggagatcttaaccaaacggctcagatacatggtttttcgctcaatgttaagacaggacgttagctggttcgatgaccccaaaaacacaacaggagccctcactacccggcttgccaacgatgccgcgcaggttaagggtgccattggctcccgcttggctgtcattacccaaaatatcgctaatctgggcacaggaattattatcagcttcatatacgggtggcaactgaccctgttgttactcgccatcgtgcctattatcgctatcgctggcgtggtggagatgaaaatgctgtccggacaagccctgaaagataagaaggaactggagggctccggaaaaattgctacggaagcgatagaaaacttcaggacagtcgttagtttaactcaggaacagaagtttgaacatatgtacgctcagagcctccaggtcccataccggaatagcctgcggaaagcacacatctttggtattacgtttagtttcacccaggccatgatgtatttctcgtacgctggttgtttccggttcggcgcttatctggtcgcacataaactcatgtcctttgaagatgtgcttctcgtgttcagcgctgtggttttcggcgcgatggccgtcggccaggtttcttcttttgccccagattacgccaaggccaaaattagcgcagcccacatcatcatgatcattgaaaaaaccccacttattgatagttactcaacagaaggattgatgcccaacaccctggaaggaaatgttacttttggggaagtagttttcaactatcctaccaggcctgatatccccgtcctccaggggctgagcctcgaggtgaagaaaggccagacgctggcactggtgggctcgagtgggtgcgggaagagcacggtggtccaactacttgagcgattctacgatccacttgctgggaaagtacttctggacggaaaggaaatcaaacgactaaacgtgcagtggctcagagcccacctgggaatcgtgtcacaagaaccgatactatttgattgttccatagcagagaatatcgcatatggcgacaattctcgggtggtctcacaggaggaaatcgtacgggcggcaaaggaagctaatatccatgcctttatcgaatcccttccaaacaaatactccacaaaggtgggcgacaaaggtacccaactctctggtggccaaaaacagcgaattgcaatcgcacgggccctggtaagacagccccacatcctcctcctggatgaagctacttcagccctggacactgaatctgagaaagtggtgcaagaggcattagataaagccagagagggccggacgtgtatagttattgcacaccgtctgtcaacaattcagaatgccgacctcatcgtagtgtttcagaatggcagagtcaaagagcatgggacccaccagcagctcctcgcccagaaggggatttatttttccatggtctctgtccaggccgggaccaaaagacagtag

SEQ ID NO: 22911 - DNA, 3651 bp, synthetic construct
  misc_feature 1..3651: note = Description of Artificial Sequence: Synthetic coding sequence
  source 1..3651: mol_type = other DNA
atggacctggagggcgaccggaacggcggcgccaagaagaagaactttttcaagcttaataacaagtccgagaaagacaaaaaagagaaaaagccaaccgtgagcgtcttctctatgttcaggtatagcaattggttggacaagctctatatggtggtcggaacactcgcagccatcatccacggcgccggccttcctctgatgatgttggtgttcggcgaaatgaccgatatctttgctaacgcaggaaacttagaggacttaatgtccaatattacaaatagatccgatatcaacgacaccgggttcttcatgaatcttgaagaggacatgactagtgacgtgagcaagatcaacgagggtatcggcgacaaaatcgggatgttcttccagagtatggccaccttcttcacggggttcattgttggctttacccgggggtggaagcttactttggtcatactggctatttcgcctgttttgggtctgagtgccgccgtgtgggcaaaaatcctgagcagcttcaccgataaggagctgctcgcctacgccaaagcaggggctgttgccgaagaggtgcttgccgcaatcagaaccgtcatcgctttcggcgggcagaagaaggagctcgagcgttataacaaaaacctagaggaagctaaacggatcggaatcaaaaaggcaatcaccgcaaacatatctattggggccgcatttctgttgatatacgctagctacgcgttagctttttggtacggcacgactttggtcttaagcggcgaatattccataggccaggtgcttacagtgtttttctcagtgctgattggcgcctttagcgtaggccaggcctcaccctcgatcgaggctttcgccaacgcaagaggagccgcttatgagatcttcaaaatcatcgataataaaccgtcaattgactcatactccaaatccggacacaagccagataacatcaaagggaacctcgaatttagaaacgtacatttttcatacccatcccgcaaagaagtcaagattttaaaaggcctgaacctaaaggtccagtccggccagacggtggcgctggtcggcaactcagggtgcggcaagagcactactgtgcaactgatgcagcggctgtatgaccccaccgaggggatggtgtctgttgacgggcaagatatccggacaatcaatgtcagattcttaagagagatcattggcgtcgtgtctcaggaaccagtgctgtttgctaccacgatagccgagaatataaggtatggaagggaaaacgtgacaatggatgaaatcgagaaggctgttaaggaggcgaacgcgtacgactttatcatgaagctgccacacaaatttgataccctagttggcgagcgcggcgcacaactctccgggggacaaaaacagcggatcgcaatagccagagccctcgtcagaaatcccaagatactgctcctcgatgaggccacatctgccctggataccgaaagtgaagctgtggtgcaggtggcgcttgataaggcacggaagggacgaaccaccattgtgatcgcacaccgcttaagcaccgtacgcaatgccgacgtgatcgccgggttcgacgatggcgtgatcgtagaaaagggaaaccatgatgagttaatgaaggagaaaggcatttattttaagctggtcaccatgcagacggccggtaatgaggtcgaactggagaacgccgcagacgaatctaagtcagagatcgatgccctcgagatgtcttccaatgattccagaagctcactaattaggaaacgctccactagacgttccgtgcggggtagccaggctcaggacaggaagctgtccaccaaggaagcactggatgagtcaattccacctgtgagcttctggcggatcatgaagctcaacctgaccgagtggccttactttgtggtgggcgtattttgtgcaattatcaatgggggcctgcagccagcttttgcaattatcttttctaaaataatcggcgtgttcaccaggatcgacgaccctgagactaagaggcagaactctaacttattttccctcctatttttggctctcgggataatcagttttattacattttttctgcaaggtttcacttttggcaaggcaggggaaatcctcaccaagcgcctgagatacatggtgtttcggagcatgttgagacaggatgtgtcctggtttgacgacccgaagaataccaccggcgccctgacaaccaggctggccaacgacgccgcccaggtcaagggtgcaattggctctcgcctcgcagtcataacacagaacatcgcgaacctcggtacaggcatcattatttcttttatatacgggtggcagctcaccttactattgctggccatcgtccctatcattgctatagccggagtggtggaaatgaagatgttgagcggacaagctttaaaggacaagaaggagctcgaaggttcgggaaaaatcgctaccgaagccatcgaaaacttcagaaccgtcgtatctctgactcaggagcaaaagttcgagcacatgtacgcccagagtttgcaggtgccctacagaaattccctccgcaaggctcatatctttgggatcaccttcagtttcacccaggccatgatgtatttctcatacgcagggtgcttccgtttcggtgcgtatctggtggcccacaagttgatgtccttcgaagacgtgctgctggttttttccgccgtggtgttcggagccatggccgtgggacaagtttcttccttcgcgcccgactacgcaaaagcaaagatcagcgccgctcatattattatgattattgagaagacaccgctcatcgatagctactcaacagagggcctaatgccaaacacattggaagggaacgtgacattcggagaggtagtctttaactaccccacccggccggatatccccgtcctgcagggactctcactggaagtaaagaaagggcaaacgttggcactggttgggagttctggatgtggaaagtcaaccgttgtgcagttgctcgaacggttctatgacccgttggcaggaaaagtactgctggacggcaaagagatcaagcgcctgaatgtccagtggctgagagcgcacctgggaatcgtgtcacaggaacctatactgttcgactgctcaatcgctgaaaatattgcgtatggcgataactctcgcgtggtgagtcaggaggagatcgtgagggccgctaaagaggctaatatccacgccttcatagagtcactgcccaataaatattcaactaaagtgggagacaaggggactcaattgagcggaggccagaaacagcggattgctattgccagggccctggttaggcagccgcacattctcctcctcgatgaggctaccagtgccctggacaccgagtccgaaaaagtggtgcaggaagcgctagataaggctagggaagggcggacttgcatcgtgatcgcacaccggctttcaacgatccagaacgctgatctgatcgtggtgttccagaatggcagagtcaaggagcacggcactcatcaacagttgctggcccagaaaggtatatacttcagcatggtttcagtccaggcagggacgaagcgacagtag

SEQ ID NO: 22912 - DNA, 4401 bp, synthetic construct
  misc_feature 1..4401: note = Description of Artificial Sequence: Synthetic coding sequence
  source 1..4401: mol_type = other DNA
atggccctgcggggcttctgcagcgccgacggcagcgaccccctgtgggactggaatgtgacttggaacacttccaaccctgacttcacaaagtgtttccaaaatacagtactggtctgggtgccctgtttttatttatgggcttgcttccctttctactttttgtacctgtcacggcatgatagaggatatatccagatgactcctctgaacaaaacaaaaactgccctcggtttcctgctctggattgtgtgttgggccgacctgttctactcattctgggaacgcagccggggcattttcctcgcccctgtgtttctggtcagccccacactgctcggaatcaccatgttgctcgccacgtttctgatccaattagagaggagaaagggagttcaatctagcggcattatgctgacgttttggctggtggctctcgtgtgtgccctggcaattctgcgaagcaaaattatgacagcgctaaaggaggacgcacaggtggatctgttccgcgacatcacattttatgtctatttctccctactgctgattcagcttgtgctgtcatgcttcagtgaccgttctccacttttttcagagaccatccacgatcccaacccttgccctgaatcttctgcatctttcctgagtaggatcaccttttggtggattaccgggctcatcgtgcggggatatcggcagccattggagggctcagacctgtggtccttgaataaggaggacacatccgagcaggtggtgcctgtcctggtgaaaaattggaagaaagagtgcgccaagacaagaaagcagcctgttaaggtcgtatactcttccaaagatcccgctcagccaaaagagtcgtccaaagtggatgccaacgaggaggtggaggccctgatcgtcaagagcccccaaaaggaatggaacccctccctctttaaggtgctctataaaacgtttggcccttacttcctgatgagtttcttttttaaagccattcacgatctcatgatgttttctggccctcagattttgaagcttctgatcaaatttgttaacgatactaaggctcccgactggcaggggtacttctacaccgtgctcctctttgtcacagcctgtttgcagactctggtccttcatcagtactttcacatctgttttgtcagcgggatgaggattaaaaccgctgttattggagcagtatacaggaaggcactggtcataaccaacagcgcccgaaagtcctccaccgtgggcgaaatagtaaatctgatgtctgttgacgcccagcgctttatggatctggcaacctatattaacatgatctggagcgctccgctccaggtcattctggctctgtatctactgtggctgaatctgggcccgtccgttctcgcaggggtggccgtgatggtgttaatggtccccgtgaacgctgtgatggctatgaagacaaaaacctatcaggtggcccatatgaagtccaaagacaatcgcatcaaacttatgaatgaaatattaaatggtataaaagtgcttaaactctacgcatgggaactggcattcaaagataaggtgttagctattcgccaggaagaattgaaggttttgaaaaagtcagcttatctcagtgcagtgggtaccttcacttgggtgtgcactccttttctcgtagcactctgtacatttgcggtgtacgtgactatcgacgaaaacaacatcctggacgcccagactgcattcgtatccttggcgctttttaatattttgcgctttcccctgaatatattgcctatggtaatttcgtccattgtccaggcatctgtctccctaaaaagactgagaatattcctgagtcatgaagaacttgagccggatagtatcgagcggagacccgtaaaggacggcggaggcacaaattctattactgtgagaaatgcaacatttacatgggcacgctccgatccaccaacactaaatgggattaccttttcaatcccagagggtgcgctggtggctgtggtcggacaagttgggtgtggaaaatcctctctcctgtccgccctactggccgagatggacaaagtggagggtcacgtagccatcaaagggtcagtcgcatatgtgccccagcaagcgtggatccagaacgacagtttgagggaaaacatactgttcggctgccagttagaggaaccctactacaggagtgtgattcaagcgtgtgcattactgcctgatcttgagatcctgccatcgggcgatcgcaccgaaattggggaaaaaggcgtgaatctgtcaggagggcagaagcagagagtctctctcgcccgggctgtttactctaatgctgacatctatctgttcgatgaccctcttagtgccgttgacgcccatgtcgggaaacatatcttcgaaaatgtcatcggtccaaaaggtatgctgaagaacaaaactcgaatcctcgtgacccacagcatgtcctaccttccacaggtggatgtgatcatcgttatgagcgggggcaagatctcggaaatgggcagctaccaggagctgctggcgcgagatggcgcctttgccgaattcctgagaacctacgcctccaccgagcaagaacaggacgcagaagaaaatggcgtgacaggggtgtcaggcccggggaaagaggcgaagcaaatggagaatggtatgctggtgacggattctgcaggcaagcaacttcagaggcaattatcctctagttcttcctactccggggacattagcagacatcacaactcaactgcagagctgcagaaggccgaggccaagaaagaggaaacatggaaactcatggaggccgacaaggcacagaccgggcaggtgaaactatctgtatattgggactacatgaaagcaatcggcctgtttatctcgttcctttccatatttctgttcatgtgcaaccacgtttcagctctagccagcaactattggctgtccctttggaccgacgacccaattgtcaacggaacacaggagcataccaaagtcagattatccgtttacggagctctcggcatcagccagggtatcgccgtctttggatactccatggcggtctcaatcggcggcatcttagcaagccgttgtctgcacgtggatcttctccactctattctccgatctcctatgtccttctttgagaggacaccatcggggaatctggtgaatagattctccaaggagctggatacagttgatagcatgatcccggaggtaatcaagatgtttatgggctcccttttcaacgtgatcggagcctgtatcgttatccttctcgctaccccgattgctgccatcatcattccccccctcggcctgatatattttttcgtccagcggttctacgtggcgtcttctcggcagctgaagagattggagagcgttagccgctcacccgtttactcgcatttcaatgagaccctgcttggcgtctctgtgattcgcgcctttgaagagcaggagaggttcattcaccaaagcgacctaaaggtagatgaaaaccagaaggcttactacccgagtatcgtggctaatcgctggctcgctgtccgactggaatgcgtcggtaattgtatcgtcctattcgctgctcttttcgcagtgatttcccggcatagccttagcgccggcttagtaggattgtcagtctcgtattccttgcaggtcaccacatacttaaattggctcgtaaggatgtcttcggagatggagacaaatatcgtcgcggtggaacggttgaaggaatactccgagactgagaaagaggccccctggcagatacaggagaccgcccccccctcaagctggccacaagttggaagagtggagttcaggaattactgtttgaggtatcgggaggatctggacttcgtgctacggcatattaacgtaactatcaatgggggcgagaaggtgggaatcgtcggtcggaccggtgctggaaaaagctccctgacactggggctttttaggattaacgagagcgccgaaggcgagataatcattgacggtattaacatcgccaaaattggcctccacgacctgcgatttaaaataacaattattccacaagacccagtgctgttttctggaagtttgcgcatgaatctggaccctttttcccagtacagcgacgaagaggtctggacttcccttgagctcgcccacctcaaggatttcgtttctgccttacccgacaaactcgaccacgaatgcgccgaaggcggggaaaatctcagagtcattgtgctcgataaaggggagatccaggaatacggtgccccttcagatctgctacagcagaggggccttttctactccatggcaaaggatgccggactagtctag

SEQ ID NO: 22913 - DNA, 4428 bp, synthetic construct
  misc_feature 1..4428: note = Description of Artificial Sequence: Synthetic coding sequence
  source 1..4428: mol_type = other DNA
atggccctgcggggcttctgcagcgccgacggcagcgaccccctgtgggactggaatgtaacttggaacacttctaatcctgacttcacaaaatgcttccaaaacactgttttagtgtgggttccatgtttctatctatgggcctgcttccccttttactttctgtatttgagccgacatgatcggggttacattcagatgacccccctcaacaaaaccaagactgccctaggctttcttctctggattgtctgctgggcagacttgttctacagtttttgggagcgatcgcgaggaatctttttagccccagtattcctggtctctcccactctgctggggatcaccatgctcttggccactttcctgattcagctggaacgaaggaagggtgtccagtcaagtggcatcatgctgacgttttggttagtcgctctagtttgtgctctggctattctgagatctaaaatcatgacggcattgaaagaagatgcacaagttgacttattccgcgacatcactttctatgtgtattttagtttactgctgatccagctggttcttagctgtttttccgatcgaagcccactgttttctgaaacaatccatgatcccaacccctgtccggagagctctgccagctttctgtcccgtatcaccttttggtggatcaccggcctcatcgtccggggttaccgccagccactggaggggagcgacctatggtctcttaacaaagaggatacatctgaacaggtggtccccgtgcttgtgaaaaattggaagaaagaatgcgcaaagaccaggaagcagcccgtgaaggtagtctactcttctaaggatccggctcaacctaaagagtcttctaaggtcgacgctaatgaagaggtagaggccctgatcgtgaagtctccccaaaaggaatggaatccttccctcttcaaggtgttatacaaaacatttggtccctatttcttaatgtctttcttcttcaaagccatccacgatctgatgatgttctcaggcccgcagatactcaaactgctgatcaagtttgtgaatgacaccaaagcaccagactggcagggatacttttacactgttcttcttttcgtgactgcatgcttgcaaaccctggtgctgcatcagtatttccacatttgcttcgtgtccggtatgcgaattaagacagccgttatcggcgcagtctatcggaaggctctcgtcatcaccaatagcgcacgcaaaagctccaccgttggagaaattgttaaccttatgtccgtggatgctcagcgatttatggatttggcgacctacatcaacatgatttggtcggcccccctacaggtaatactcgcactgtacctcctgtggctgaatttgggcccatctgtactggctggcgtagcggttatggtcttaatggtgccagtgaatgctgtaatggccatgaaaactaaaacctaccaagtggcccacatgaaatcaaaagacaatcggattaaacttatgaacgagatccttaacggcatcaaggtgctgaaactgtatgcttgggagcttgccttcaaggataaggtcttggccataaggcaggaagagctgaaggttctgaaaaagtcggcatacctatccgcagtcggtacatttacttgggtctgtactcctttcttagtggctttgtgcacctttgcggtgtatgtaacaattgacgagaacaacattctcgacgcccagactgcgttcgtgagcctcgcactgtttaatatcttgaggtttccattgaacatcctccccatggtgatttcctccatcgtacaggcttccgtgagcttgaaaaggttacggatcttcctgagtcacgaggagctggagcccgatagtattgagagacgtccagtaaaggacggtggcggaactaactccataacagtgcgcaatgccactttcacttgggctcgctccgatccccccactcttaacggtataaccttcagtatcccagagggggcgctagtcgctgtcgtcggccaggtggggtgtggtaagagctccctgctttctgcactgttggcggaaatggataaggtagaggggcacgtggcaattaaaggctccgttgcctacgtgcctcagcaagcttggatccaaaacgactcccttcgggaaaacatcctctttggctgccaattggaggagccctactatcggagcgtgatacaggcctgcgctctgctgcctgacctggaaatcctgccgtccggggaccgcaccgaaataggcgaaaagactcggattctggtcacccactcaatgagttacctcccacaggtggacgtgattatcgtgatgtcggggggaaagatctccgaaatgggctcctatcaggagttactggcacgcgacggcgcctttgcagaatttttacggacatacgctagcacagaacaggagcaggacgctgaggaaaatggagttactggcgtgtcagggccgggcaaagaggccaagcagatggaaaatggaatgctagttacagacagcgctggaaaacagcttcagagacaactgtcgtcttcatcttcgtattccggcgacataagccggcaccacaatagtacagctgagctgcagaaagccgaagctaagaaagaggagacttggaaactcatggaggccgacaaggcccaaaccggccaagtgaaacttagcgtgtattgggattacatgaaagccattggattgttcatttcatttctatcaatatttctttttatgtgcaatcacgttagcgctcttgccagtaattattggttgagcctgtggacagacgatcccatcgtgaatgggacacaggaacacactaaggtgagactgagcgtatatggtgcccttggcatctctcaaggtatcgctgtgtttggctacagcatggcagtatctattggcgggatcctcgcttcacgttgtctgcatgtggacctgctacattctattctccgctcacccatgtcattctttgaacgcaccccttcaggaaatctggtcaaccgcttttccaaggagctggataccgtcgacagcatgatccccgaagtgattaagatgtttatgggcagcttattcaacgtcatcggagcctgcatcgtaattctgctcgcaacgcctattgcagccataatcatccctccacttggcctcatttacttcttcgtgcaacggttttacgttgccagttcccggcagctgaaaagattagaatccgtatcacgctcacctgtgtacagtcattttaatgaaacactgctgggtgtgagtgtcatcagggctttcgaggagcaagaacgatttatccaccaaagcgatctaaaagtggatgagaaccagaaggcatattaccccagtatcgtcgccaacagatggctggccgttcgcctagaatgcgtgggcaactgcatcgttctctttgcggctctgtttgctgttattagtcgccactccctgagcgccgggttggttgggctgtctgtaagctacagtctgcaagtaactacctacctgaactggctggtgcggatgagttcggaaatggagactaatattgtggctgtcgagcgcctgaaggaatactcagaaacagaaaaggaggctccttggcagattcaggaaactgcgcccccatctagctggccccaggtgggacgcgtggagttcagaaattactgtttaaggtaccgcgaggacctcgattttgtgctcaggcacatcaacgtaacaataaacgggggcgagaaggtcggcatagtagggcgaaccggcgcgggaaaatcatcactgacccttggattgttccggatcaacgaatccgccgaaggcgaaatcataatcgacggaattaatattgccaagattggtctgcatgatttgagattcaagataacaatcattccccaagaccccgtcctatttagcgggagcctccgcatgaatctggatcctttttcccagtactccgacgaggaagtctggacatccctggagcttgcccatctcaaagactttgtgtcagctcttccagacaagctggaccatgaatgcgccgaaggtggcgagaacctgtccgtgggtcagcggcagttggtgtgtctggcccgcgcattgctgcgcaagaccaaaatcctggtgctggatgaggcgaccgccgccgtggaccttgaaacggatgacttaatccagagtaccatacgcactcaattcgaggactgtactgtcctgaccatcgctcaccggctcaataccattatggactacactcgcgtcatcgttcttgataagggcgagattcaggaatacggcgcaccctcggatctgttgcagcagcggggattattctactctatggctaaggacgccggcctcgtctag

SEQ ID NO: 22914 - DNA, 4251 bp, synthetic construct
  misc_feature 1..4251: note = Description of Artificial Sequence: Synthetic coding sequence
  source 1..4251: mol_type = other DNA
atggccctgcggggcttctgcagcgccgacggcagcgaccccctgtgggattggaacgtgacctggaatacatccaatcccgactttactaaatgcttccaaaatactgttctcgtttgggtcccctgcttctatttatgggcttgttttcccttttacttcctatatctgagccgccatgatagggggtatatccagatgaccccactcaataaaacaaagaccgccctggggttcttgctctggattgtgtgttgggccgacctgttttattcattctgggaacgctccagaggaatttttctcgctccagtgttcctggtgtctcccaccctgctgggcatcacaatgctcctcgccacttttttaatccagcttgagcgcagaaagggggtgcagagctcaggtatcatgctcactttctggctggttgccctcgtttgtgccctggccatcctgcggagcaaaataatgaccgctctgaaggaggatgcacaggtggatttatttagggatatcacattttatgtgtacttttcattactcttgatccagcttgtgttatcgtgttttagtgatcgctcaccactgttctccgagacaatccacgatcctaacccctgccccgaatcgagcgcgtcctttcttagcaggattacgttctggtggatcaccggactcatagtgcgggggtaccgtcagcccctcgaaggctccgatctgtggtctttgaacaaggaagacacaagtgaacaggttgtcccagtgttagtgaagaattggaagaaggaatgtgcaaagacaagaaagcagcctgttaaagtggtgtacagctctaaagatcctgcccagccaaaggagagtagtaaggtcgacgctaacgaggaggtagaggctctgattgtcaagagcccccaaaaggaatggaacccgtctctcttcaaagtcctttacaagacctttgggccttatttcctgatgagcttcttctttaaagccattcatgacctcatgatgttttctggacctcagattctgaagcttctgattaagttcgttaacgacactaaagcccctgattggcagggatacttctataccgtcctgttgttcgtgaccgcctgtttgcagacactcgtcctgcatcagtacttccacatttgctttgtctctggaatgaggattaagacggccgtcatcggggccgtgtaccgcaaggccctggttattactaacagcgcccgtaagagtagcaccgtgggtgagattgtgaacctgatgagcgtcgatgcacaacgttttatggacctagctacgtatatcaacatgatctggtccgccccactgcaggtgattttggccctgtatttactgtggctgaatctcggcccaagcgtgcttgccggtgtggctgtcatggtactgatggtgcccgtgaacgctgtcatggcaatgaagacaaaaacatatcaagtggcccacatgaagtccaaggacaatagaattaagctcatgaacgagatattgaacggaatcaaggttctcaagttgtacgcatgggagctagccttcaaggacaaggtgctggcaataagacaggaggagctcaaagtgttaaaaaaaagtgcctacctctcagctgtgggcactttcacttgggtgtgcactcctttcctcgtggctttgtgcaccttcgcagtgtatgttaccatcgatgagaacaatatccttgacgcgcagactgcattcgtctctctggccttgtttaatattttgaggttccccctcaatatccttcccatggtgataagtagcattgtgcaggcctctgtgtctctgaaacggctgagaatcttcttatcccacgaggagctggagcccgatagtatcgaacgacgtcctgtgaaggatggagggggaaccaatagcatcactgtaagaaacgcaacctttacttgggcgcgcagcgacccccccactttgaatgggatcacattctccatccccgagggcgccctcgtggcagtggttggacaggtggggtgtggaaagagctctctgcttagtgcgttgttggctgagatggataaggttgaggggcatgttgcaatcaaaacccgtattctggtcacccatagtatgtcctatttgccccaggtggatgttatcatagtgatgtccgggggaaaaataagcgagatgggttcatatcaggaactgctcgctcgcgacggtgccttcgcagaatttctccggacctacgcctccactgagcaggaacaggacgccgaagaaaacggggtaaccggcgtaagcggccctgggaaagaggcgaaacaaatggagaacggcatgctggtcaccgactcagctggtaaacaactgcagcgccagttaagctctagttcctcttactcgggcgacattagcagacatcacaacagcacagccgaattacagaaagccgaagccaagaaggaggagacctggaaactcatggaagcagacaaggcacagacaggccaggttaagctgagcgtttactgggactacatgaaggcgatcgggctcttcatttcatttctgtctatttttttgtttatgtgcaatcatgtaagcgcactcgcttcgaattattggctgagcctctggactgatgaccccattgtgaatggtactcaggaacacaccaaagttcgactttctgtctacggcgccctcggtatcagccaaggtattgcggtgttcggttattcgatggccgtgtccataggcggtatactggcctcaaggtgcttgcacgtagacctgttacactccatcctgcgatctcctatgtccttttttgaaagaacccccagtggaaacttggtgaacaggttcagtaaagagctagacaccgttgattctatgatacctgaagtgataaagatgttcatggggtccttgtttaacgtgatcggcgcctgtatcgtgatcctacttgcgactccaattgccgcaatcatcatacctccactcggactcatttatttctttgtgcagcggttttatgttgcgtcctcccgacagctgaagcggctggagagcgttagtcggtcacctgtgtatagtcacttcaatgagaccctcctgggcgtgagtgttatcagagccttcgaagagcaggagagatttattcatcagagcgatctcaaggtcgatgagaatcagaaggcttattatcctagcatcgtggctaaccgatggcttgcggtcaggttggaatgtgttggcaattgcattgttctgttcgcagccttatttgctgtcatatcacggcactccctgtcggcagggctggtgggcttgtcagtgagctactccctgcaggtgacgacgtaccttaattggttagtgaggatgtccagcgagatggagaccaacattgtcgcagtggaacggttgaaggaatactcagaaacggagaaagaggcgccgtggcagatccaggaaacagctccaccatcaagttggccccaggtaggacgcgtggagtttcgcaactattgcctgaggtaccgcgaagacctggacttcgttctgcgacacatcaatgtcacaataaacgggggagagaaggtggggatcgtgggcaggaccggcgccggaaagagttccttgacactgggcctgttccggattaacgaaagtgccgagggtgagattataattgacggaatcaacattgctaaaattggtctccacgacctgagattcaaaataacgattatcccgcaagatcctgtgttattcagtgggagcctgagaatgaacctggatccattcagccagtactccgatgaggaggtttggacgtctttggaactcgcacacctgaaggatttcgtatcagcgttacccgacaaactcgatcacgagtgcgctgagggaggggagaacctgtctgtcggccagcgtcagctggtgtgcctggcgagggcactgctgagaaagacaaagatactcgtcttggacgaggctaccgctgccgtcgatctggagacagatgatctgatccagagcaccatccgcacccaattcgaagactgcaccgttctgaccattgcccatcggcttaatactattatggattatactcgggtgattgtgcttgacaagggcgaaattcaggagtatggtgcaccctccgatctactgcagcagcgtggattgttttattccatggcaaaagacgctggccttgtgtag

SEQ ID NO: 22915 - DNA, 4419 bp, synthetic construct
  misc_feature 1..4419: note = Description of Artificial Sequence: Synthetic coding sequence
  source 1..4419: mol_type = other DNA
atggccctgcggggcttctgcagcgccgacggcagcgaccccctgtgggactggaacgtcacttggaataccagcaacccagatttcacaaaatgcttccagaatactgtgttagtatgggtgccatgcttttatctgtgggcctgttttcccttctattttctgtatctctcacgccatgacagagggtacatccagatgacacctctcaacaagaccaagacagcattgggtttcctcctatggatcgtctgttgggctgatctgttttattccttttgggagcgatctcgggggatcttcctggcccctgtctttctggttagccccacactactaggaattactatgcttctggctaccttcctgatccagctggaaaggcggaagggcgtccagtccagtggcattatgctcactttctggctagtggcacttgtgtgcgcattggccattctcaggagtaagattatgaccgcacttaaggaggacgcacaggtggatctgtttagagatataaccttttatgtttacttctctctactgcttatccaactggtgctaagctgtttttcggaccgctctcccctgtttagtgagaccatccacgacccgaacccttgcccggagtcatcagcctcattcctatcgcggattacattctggtggataacgggactaatcgtgcgaggctataggcagccactcgaaggttctgacctatggtctcttaacaaggaggacacgtccgaacaggtggtccccgtacttgtaaaaaattggaagaaggagtgtgccaaaacgagaaaacagcccgtgaaggtggtatactccagcaaggacccagcccagccaaaggagtcttcaaaagtggacgccaacgaagaggtcgaggcactgattgtcaagagtccacagaaagagtggaatccaagtcttttcaaagtattatacaagacctttggcccatatttcctcatgagtttctttttcaaagccattcacgacctcatgatgttctccgggcctcagattttaaagctcctgatcaagttcgtgaatgatactaaggcccccgactggcaggggtatttctacaccgtcctgctgttcgtgactgcctgcctgcagaccctggtgctgcaccaatacttccacatctgcttcgtttccggaatgcggatcaaaaccgcggtgattggcgccgtgtatagaaaggctctcgtcataactaattccgcccgcaaatcatccactgtgggagagattgtcaacctgatgagtgtagatgcccagaggtttatggacttggcaacttatatcaacatgatttggtctgctcccctgcaagttatcctcgctctgtatctactctggctcaatctcgggccttctgtcttggcgggagtagcagtgatggtgctgatggttcccgtcaacgccgtaatggccatgaaaactaaaacctaccaagtcgcacatatgaagtccaaggacaatcgcatcaagttaatgaacgagatcttaaatggcatcaaagtattaaaactgtacgcttgggaacttgcttttaaagataaggtcttggctattcgacaggaggagctgaaggtcctgaaaaaaagcgcttacctctctgcagttggtacatttacatgggtctgcacccccttcttggtggctctctgtaccttcgcagtgtacgtcacaatcgatgagaataatattcttgatgcccagaccgcttttgtgagtctggccctcttcaacatactgcggtttcccctcaacattctgccgatggtgatttccagtatcgtgcaggcctccgttagccttaagcgtttgcgtatctttctgtcacacgaggaactggaaccagattctatcgaacggcggccagtcaaggatggaggggggacaaattctattaccgttcggaatgcaacttttacttgggctaggtccgaccccccaacattaaatgggatcacattcagcataccggaaggggctctggtcgctgttgtcggccaggtgggctgtggtaaatctagtctcctatctgctcttctagcggaaatggacaaggtcgaggggcatgttgctattaagggagttaacctgtctggtggccaaaagcaaagagtgtcattggcccgcgccgtatacagcaatgccgacatctatctgtttgacgatcctctgagcgctgtcgacgcccacgtcgggaagcacatttttgaaaacgtgatcggtcccaagggcatgcttaagaataaaacgaggattcttgtcactcatagcatgtcctatctgccccaggtcgatgttatcattgttatgtcaggaggcaaaatcagtgaaatggggtcttatcaggaactccttgcccgagatggagcctttgctgaatttctccgaacgtatgcaagcactgaacaggagcaggatgctgaggagaatggagtcaccggggtgtccggtccaggtaaagaggctaagcagatggagaatggcatgctcgttactgacagcgcagggaaacagttgcaacgccaattatcttcttctagttcctattctggcgacattagtaggcaccataatagtactgctgagctgcagaaggccgaagctaaaaaagaggaaacctggaaactgatggaagccgataaagctcagacagggcaggtgaagctgtctgtgtattgggattatatgaaagccatcggtctgttcatctctttcttgtcgatcttcctgtttatgtgtaaccatgtgagcgcgctggcgagtaactattggctcagcctatggaccgacgaccctatcgtgaatgggacacaggagcacactaaagtgaggctgtcggtctacggagccctcggtattagccaagggattgctgtgttcggctattcgatggcggtgtccatagggggaatcctggcgagccgctgcctacacgtggacttactgcattcaatattgcgcagtcctatgtccttttttgagcgtaccccctccggcaatttagtcaaccgtttctctaaagagctggacacagtggattccatgatccccgaggttatcaagatgttcatgggatccttgtttaacgtcatcggagcttgcatcgtcatcctcttagcaacacccatagccgctattataattccaccactcggacttatctacttttttgttcaacgtttttacgtcgcatcttctcgccagctcaagagattagagtctgtcagccgtagcccggtgtattcacatttcaatgagacgctgctcggcgtgtcagtgattagggcattcgaggaacaggagcgcttcatccaccagtctgatcttaaagtggatgagaaccagaaggcctattaccccagcatcgtggccaatcggtggctcgccgtacgactggaatgtgtggggaattgcatcgtgctctttgctgccctctttgccgtcatcagtcggcactctttgtccgccggactggtggggctgtctgttagttacagcctgcaggttaccacctacttgaactggctagtaagaatgtcttctgaaatggaaactaatatcgttgcagtcgaaaggctaaaggagtattccgagacagaaaaagaagcaccatggcaaattcaggaaactgctcctccctcctcctggccccaggtcgggcgggtggagtttcgcaactattgcctgaggtatagagaggacctggattttgtcttaaggcacattaatgtcaccatcaacgggggtgagaaggtgggcatcgtcggaaggaccggcgctgggaagagttcattaacccttggattattcagaatcaacgaaagcgccgaaggagagattattatcgatggaataaacattgctaaaatcggcctgcacgatctccggttcaaaatcaccatcatccctcaggaccccgtattgttctccggaagcctgaggatgaatctcgacccatttagtcaatattcagacgaagaggtgtggacttccctggagctcgctcatttgaaggattttgtatccgccttaccggataaactggaccacgagtgtgccgaaggaggtgagaatctgagcgtgggacagagacagcttgtctgcttggccagagccttgctccgcaagaccaaaattctggtcctggatgaggcgaccgccgctgttgacctggaaaccgacgatctgattcagagtactattaggacacagttcgaggactgtacagtccttacaatcgcgcatcggctaaacaccataatggattatacccgggtcattgtgttggataaaggtgaaattcaggagtatggggcaccgtctgatctgctgcaacagcgcggacttttttacagcatggcaaaggacgctggactggtgtag

SEQ ID NO: 22916 - DNA, 4626 bp, synthetic construct
  misc_feature 1..4626: note = Description of Artificial Sequence: Synthetic coding sequence
  source 1..4626: mol_type = other DNA
atggccctgcggggcttctgcagcgccgacggcagcgaccccctgtgggactggaacgtaacgtggaacacaagcaaccccgattttacaaagtgcttccagaacaccgttctggtttgggttccatgcttctacttgtgggcatgtttccctttttacttcctatacctgtcccgacacgatagaggatacattcagatgacacctctgaacaaaacaaagaccgccctcggcttcctcctgtggatcgtctgctgggccgacctcttctactccttttgggaaaggagccgcgggattttcctggcccctgtgtttttagtgtctccgacactcttgggcattactatgctgctggctacattcctaatccagctggaaaggagaaaaggtgttcagtcctctggcatcatgctaactttctggctggtggccctcgtctgcgctctcgccatcctccgctctaaaattatgacagccctgaaggaggatgcgcaagttgatttatttagggacattacgttttatgtttatttctctctcctcttaattcaattagtcctgagctgtttctccgatcggtcacccctgttttcagaaacaatccatgatccaaacccttgccccgaatctagcgcctcctttctctctcgaatcactttttggtggatcaccggtctcatcgtcagaggctaccgacagcctcttgaaggatctgatctatggtccctgaataaggaagacacgagcgaacaggtggttcccgttctcgtgaaaaattggaaaaaagagtgcgctaagactcgcaagcagccagtgaaggtggtatacagttcgaaggacccagcccagcctaaagagtcttcgaaggttgatgcaaatgaggaagtcgaggccctaatcgtgaagagtccgcagaaagagtggaatccatcattgtttaaggtgctatataagacttttgggccctacttcttaatgagctttttctttaaagcgatacacgacctaatgatgtttagtggaccccagattctcaaattacttataaagttcgttaacgacaccaaagcaccagactggcaggggtatttctacacagtgctccttttcgtgacagcatgcctgcagacactggttctgcaccagtacttccacatctgctttgtcagcggcatgcggataaagactgcagttattggcgcagtctaccggaaggccttagttattacaaattcggctagaaaaagcagtaccgtcggggagatcgtaaacctcatgagtgttgatgcccagaggtttatggacctggccacttatatcaacatgatctggagcgctcctctccaagtcatcttagcactgtatctgctgtggctgaacctgggcccaagtgtccttgcaggtgttgctgtcatggttctcatggtacctgttaatgctgttatggcaatgaaaacaaaaacctaccaggtagctcacatgaagtccaaagacaatcggattaagctgatgaacgaaatattgaacggtattaaagtgctgaaactgtacgcgtgggaactggctttcaaggataaagtcctcgccatccgccaggaagaactcaaagtgctgaagaagtcagcgtacctttctgccgttgggacgtttacctgggtttgtactccctttctcgtggccctctgtaccttcgccgtatacgtgaccatcgatgagaacaacatcctggatgcgcaaactgcatttgtatcgctggctctgtttaatatcttacgcttcccactcaatatactgccgatggtgatctcgagcattgttcaggccagcgttagcctgaaacggctccgaatcttcttatctcacgaagaactggagccagatagcatcgagcgtcggccagtgaaggatgggggcgggaccaattcgatcactgtccgcaacgcaacatttacctgggcccggtccgatccgcccacactgaacggaattacgtttagcatcccagagggggccctggtggccgtggtcgggcaggtaggctgcggcaagtccagtctcctctcggccctccttgccgaaatggacaaggttgagggccatgttgccattaagggctcagtcgcatatgtgccacagcaagcttggatccagaatgactccttgcgggagaacattctttttggctgccagctcgaagagccttactacaggtcagtgattcaggcttgcgccctcctgcccgacttggaaatcctgccctcgggtgataggacagagattggggagaagggagtgaatctgtcggggggacagaagcagagagtctctctggcaagggccgtgtatagtaacgccgatatttatctgttcgacgatcctctgagcgccgttgatgcccacgttggaaaacacatcttcgaaaacgtgataggcccaaaggggatgctgaaaaacaaaaccaggatactggtgacacacagcatgtcctacctcccgcaggttgatgtcatcatcgtcatgagcgggggaaagatctctgagatgggttcttaccaggaactcctggcgagagacggggcttttgccgaattcctgagaacatatgcttccacagaacaggaacaggatgctgaagaaaacggcagcactgtgatggacgaagaggaggcgggcgtcacaggggtgtcgggacctggaaaagaagccaagcagatggagaatggcatgttagtaactgacagcgccgggaagcaactccagcgacagctgagcagttcatcgtcatacagcggcgatatcagtcgccaccacaattcgacagcagagttacagaaggctgaggccaagaaggaagagacttggaagctcatggaggccgacaaggcacagactggccaagtcaagctgagcgtctattgggattacatgaaagccatcgggctgtttatttctttcttgagcatatttctttttatgtgtaaccatgtgagcgcactggctagtaactattggctgagcctgtggactgacgaccccatcgttaacggcacccaagagcacaccaaggtgcgactgagcgtttatggagccctggggattagccagggcatcgccgtgttcggttattcaatggccgtcagcatcggcggaattcttgcatctcgttgtctgcacgtagatctcttgcacagcatccttcgctctcccatgtctttttttgaacggacaccaagcggcaatctggttaataggttcagcaaagaactggacacagtggattctatgatccccgaggtcatcaaaatgtttatgggctctctgttcaacgtgattggggcttgcatcgtgatcttactggccacccccatagccgcaattatcattcctcctctcggtctcatatacttctttgtgcagcggttttacgtcgcctctagccgccaacttaaacggttggagtctgtcagccggtccccagtgtacagtcactttaacgagaccttgctgggggtctccgtgattcgggcatttgaggaacaggagaggtttattcaccagtctgatttgaaggtggacgagaaccaaaaggcttattacccttctatcgtggccaatagatggttggccgtacgccttgagtgtgtaggcaattgcatcgtcctgttcgcagcactgttcgccgttataagcagacattctctctcagctggcctggtgggtctttccgtgtcctactccctgcaagtgactacctacctcaactggctggtcaggatgagctctgagatggagacgaacattgttgctgtcgagcggctgaaagagtatagcgagactgaaaaagaggctccatggcagatccaagagactgccccacccagcagttggccgcaggtgggccgcgttgagtttaggaattactgcctgagatacagggaggatctggattttgtgttgcgtcatattaatgtcacaattaacggcggcgagaaggtcgggattgtcgggcgaaccggcgctggaaaatctagtctgactctaggcttgttccggatcaatgagagcgctgaaggtgaaattatcatcgacggtatcaatattgccaagattggtctgcatgaccttcgtttcaagataacaatcattccccaagaccctgtcctgttcagcggaagcctccggatgaatctggatccattctcccagtattctgacgaggaggtgtggacatctttagagctagcccacctgaaagacttcgttagcgccttacccgacaaacttgatcatgaatgcgccgagggcggtgaaaatctgtctgtaggacagcgtcagctggtgtgcctggccagggctctcctgcgaaaaacaaagatcctggttctggatgaggcaactgctgcagtagatctggagaccgatgatctgattcagtctactataaggacccagttcgaggactgcactgtacttacaattgcgcatagattgaataccatcatggattacacaagagttattgtgctggacaaaggtgagatccaggagtatggcgctccaagtgatctgctgcagcagcgcggcctcttttatagtatggctaaagacgccgggctggtgtag

SEQ ID NO: 22917 - DNA, 4596 bp, synthetic construct
  misc_feature 1..4596: note = Description of Artificial Sequence: Synthetic coding sequence
  source 1..4596: mol_type = other DNA
atggccctgcggggcttctgcagcgccgacggcagcgaccccctgtgggactggaacgtgacatggaatactagtaatcccgactttactaagtgcttccagaatacagtcctggtctgggtcccgtgcttttatctgtgggcctgtttccccttctacttcctgtacctaagccgtcacgacaggggatacattcagatgacgccactgaacaagaccaagaccgcgctgggcttcttactatggatcgtctgctgggcggatcttttctactctttctgggagcggtcaagaggcattttcctggcgcccgtatttctggtcagccctacgctgctgggcatcactatgctgctcgccacttttctgatccaattagagcgccgcaagggagtccagtcttctggaattatgctcacattttggcttgttgcccttgtgtgtgctcttgcaatcctgaggtccaagatcatgacggcacttaaagaagacgcccaggtagatcttttccgtgatatcacgttctatgtgtatttttcactgctgctgatccagctagtgttgtcctgtttctccgaccgcagccctttatttagcgaaactatccacgaccctaatccttgtccagagagttcagccagctttttaagccgaattaccttttggtggattacggggcttattgtccggggctatcgccagccgcttgagggatctgacctgtggtcactgaataaagaggatacctcggagcaagttgtgccagttttagtgaaaaactggaagaaggaatgtgccaaaactagaaaacaacccgtgaaggtggtctacagctcaaaggatccagcccaacccaaggagagtagcaaagtggatgccaacgaggaagttgaggccttgattgtgaaatctccacaaaaagagtggaaccccagtctctttaaagtcctgtataagacgtttggcccttattttctcatgtcttttttctttaaagccatacatgacctcatgatgttttcggggcctcagattcttaagctgctgattaagttcgtgaatgataccaaagccccagactggcaaggctacttctacaccgtgttgttgtttgtgaccgcctgtctgcagacccttgtactgcatcagtatttccatatttgtttcgtgagcgggatgaggattaagacagcagtgatcggtgccgtgtaccggaaggcactagtcatcactaacagcgctagaaagagctccactgttggtgagatcgtgaacctgatgtctgtagatgcccagcgtttcatggaccttgccacctatatcaacatgatctggtcggctcctttgcaggtgatcctggcactgtacttgctgtggctgaacttaggcccatcagtgctggcgggcgtcgcagtgatggtcctgatggtaccggtgaatgcagtcatggctatgaaaactaagacctaccaggttgctcacatgaaatcaaaagataatagaattaagctgatgaacgagatcctgaacggtatcaaggtgctgaagttgtatgcctgggaactcgcttttaaagacaaggtgttggcaattcgccaggaggaactcaaggtgctgaaaaaatctgcctatctgtccgccgtgggaacctttacctgggtgtgtacccccttcttggtcgcgctgtgcacattcgctgtatacgttactatcgacgaaaataatatcttagacgctcagacggcctttgtgtccctcgccctgtttaatattctgcgcttcccactcaatatattgcccatggtgatttccagcattgtgcaggcttctgtctctctgaagcgactccgcattttcctgagtcatgaggagttggaaccagacagcatcgagcgccgtcccgtcaaagacggtggcgggacaaactcaataaccgtgagaaacgctaccttcacttgggctaggagtgaccctccaaccttaaatggtataactttcagcatcccagaaggcgccctcgtagctgtcgtgggccaggtggggtgtggcaagagttctcttctgagtgccctcttggccgagatggataaggtcgagggccacgttgcgataaagggttccgtggcgtacgtcccacaacaagcctggattcaaaatgactccctgcgggagaatatccttttcggctgccagctggaagaaccttactatcggtccgtgattcaagcctgcgcgctcctgcctgatcttgagattttgcccagcggtgaccgaacagagatcggagaaaaaggcgtgaacctcagcggaggtcaaaaacagagggtttctctggcacgggcagtgtattctaacgccgatatttacctgtttgacgatcccctctcagccgtcgacgctcacgtgggcaagcatattttcgagaatgtgatcggcccgaaaggcatgcttaagaacaagacgaggatcctggtgacccactccatgtcttatttgcctcaggttgatgtcatcatcgtaatgtctggcgggaagattagcgagatggggagttaccaggagctgctggctcgggacggcgctttcgcagagttcttaagaacctacgcgagcaccgagcaggagcaggacgcagaggaaaacggcgtgacaggcgtcagcggacccggtaaggaggcgaaacagatggaaaacggcatgctggtgactgactccgccggaaagcagctccagaggcagctcagttctagctcaagctactctggtgatatatccaggcaccacaatagcaccgcggaactccaaaaggccgaggcgaaaaaggaggagacatggaagctaatggaagcagacaaagcccaaacgggacaggtaaagctgagcgtgtactgggactacatgaaagcaatcggactctttattagttttttgtccattttcctcttcatgtgtaatcatgtgtctgccctcgctagtaactactggctttcactctggaccgacgatccgatcgtgaatggaacacaggaacacaccaaagtaaggctgtctgtgtatggcgccttggggataagccaggggattgccgtgtttgggtacagcatggcagtttccattggtggaattttggcctcccggtgtttgcacgttgacttgcttcacagcatcctcagaagccccatgtccttctttgaacggaccccaagcggaaatctcgttaacagattctccaaggagctggacactgtggacagcatgattcccgaagtgattaagatgtttatgggtagcctatttaacgtaatcggggcctgtatcgtcatcctgctggcaacacctatcgctgccatcataatacccccactcggactcatctatttctttgtgcagaggttctacgtggcatcgagccgccagttaaaacggctagaaagcgtctcgagatctccggtgtattcacactttaatgaaacgttgttaggcgtctctgtcattagagcctttgaggagcaggagcgcttcatacaccagtcagatttgaaggttgacgagaaccaaaaggcctattatccctccatcgtggcaaatcgttggctggcagtgcggctggagtgcgtggggaactgtattgtcctattcgccgccctgtttgccgtgatttctagacatagcttaagcgcgggcctcgtgggcctgtccgtttcttattcgcttcaggtgaccacctacctgaactggctggtgagaatgagctctgaaatggagaccaatatcgttgccgtggaaagattgaaagaatacagcgagaccgagaaggaagcaccctggcagattcaggagaccgcaccaccaagttcttggccccaggtcgggcgagtggaatttaggaactactgtctgaggtaccgggaggacctggatttcgttttgaggcacataaacgtaacaatcaacggaggtgagaaggtagggatcgtgggtagaacaggggccggaaagtcatcactgactctgggcttattcagaatcaacgagtcagccgaaggcgagatcatcatagacggcataaatattgctaaaattgggctgcatgatctgagattcaaaatcaccatcatcccacaggatcccgtgcttttcagcggctcacttcggatgaacctggacccattttctcaatacagtgatgaagaggtgtggacatcgctggagcttgcgcacttgaaggactttgtttccgccctgcctgacaagctggatcacgagtgcgccgagggaggtgagaatctatctgtgggccagcggcagttagtgtgcctggctagggcgttgttaaggaaaacaaagattctggtgctggacgaggcaacggcagcagtagacctcgaaacagacgacctgattcagtcaactataagaacccagtttgaggattgtaccgtcttgacaatcgcccaccgcttaaacaccatcatggattatacacgggtcatcgttttggacaaaggagagattcaagaatacggagctccgagcgacctgctgcagcagcgcgggctgttctactccatggcaaaagatgccggcctggtgtag

SEQ ID NO: 22918 - DNA, 3648 bp, synthetic construct
  misc_feature 1..3648: note = Description of Artificial Sequence: Synthetic coding sequence
  source 1..3648: mol_type = other DNA
atgagcttcttcttcaaggccatccacgacctgatgatgttcagcgggccccagattttgaagcttctaatcaaatttgtgaatgataccaaggctcctgattggcaggggtacttctacaccgtactactattcgtgaccgcatgtctgcagaccttggtcttgcaccaatatttccacatctgttttgtttccggcatgagaatcaaaaccgctgtcatcggtgccgtgtaccgaaaggcactggtcattaccaatagcgcaaggaagtcctcaactgttggagagattgtgaacctgatgtctgtggatgcacaaagattcatggatctggccacctatataaacatgatctggtctgcaccactccaagtaatccttgccctctaccttctctggttgaatctgggcccatcagtgctggctggggtcgcagtgatggtgctcatggtgcctgttaacgcagtaatggctatgaagacaaagacctaccaggtggcccacatgaagtctaaggacaacagaataaagctgatgaatgagatactaaatggcatcaaggttttgaaattatatgcctgggaacttgcatttaaggacaaggtgctggccatacggcaggaggaactcaaggttcttaagaagagtgcatatctgtcagctgtgggaactttcacctgggtctgtactccgttccttgtggctctgtgtacttttgccgtgtacgttaccatcgacgaaaacaacattcttgacgctcaaaccgcctttgtgtccttagctttgtttaatattctgaggttccccctcaacatccttcctatggtgattagtagcattgtccaggcttcggtgagccttaagaggctccggatcttcctgtcacatgaggaactcgaacctgacagcatcgagcgacggccagtgaaggatggcggagggactaacagcattacagtgagaaacgcaactttcacctgggctcggtcagacccacctaccctcaacggaattacctttagtattcctgagggggctctggtagccgtagtcggacaagtgggctgcggtaagtcatctttgctgtctgcactgctggcagagatggataaggtggaagggcatgtggctatcaagggatctgtggcctacgtcccccaacaagcctggatccagaatgactctctccgggagaatatcctgttcggatgccagctggaagagccttactaccggtctgtcatacaagcatgcgcactgctgcctgaccttgaaattctgccttcaggtgatagaaccgagattggagaaaaaggcgtaaaccttagcggaggccaaaagcagcgcgtgtccctagccagggccgtttactcaaatgccgacatatacttgttcgatgacccacttagcgccgtggacgcccacgtgggtaaacatatttttgaaaacgttattggccctaaggggatgctcaagaacaagacgaggatcctggtgacgcatagtatgagttatctgcctcaagtggatgtcatcattgtgatgtctgggggcaaaatttccgaaatggggtcttatcaagagctgcttgctagagacggggcatttgcagagtttctgagaacttacgcaagcacagagcaagagcaggatgctgaggagaacggtagcacagtgatggatgaggaggaagcgggcgtgaccggcgtttctggtccagggaaggaagccaagcaaatggagaacggcatgctagtgacagacagcgctggtaagcaactgcaacgccagctttcatcttccagcagctactccggagatatttctcgacaccacaatagtactgcagaactgcagaaggccgaggctaaaaaagaagagacctggaaacttatggaagctgacaaggctcaaacgggtcaggtcaaactctcagtgtactgggactacatgaaagctattgggctgttcatctccttcctcagtattttccttttcatgtgcaaccacgtttccgcacttgcttctaactactggctgtctctctggactgatgatccaatcgttaatggcactcaagaacacaccaaagtgcgtctctccgtctacggcgccctagggatcagccaggggatagctgtttttggatactcaatggcagtctcgattggggggatcctggcctcccgctgccttcacgttgacctccttcacagcatcctcaggtctccaatgagcttttttgagaggaccccgtccggcaatctcgtgaaccgcttctccaaagagctcgataccgtggatagcatgattccggaggttataaagatgtttatgggctctctgtttaacgtcatcggggcctgtatcgtgattctgttggccacaccgattgctgcaatcattattcctcctcttgggctgatttacttcttcgtccagcgcttttatgttgcatcctcaagacagttgaaacgtttggagtccgtgtctaggtcacctgtttatagccatttcaatgaaacattactgggggtcagcgttatccgggcctttgaggagcaggaacgattcattcatcaaagcgacctgaaggtggatgagaaccagaaagcctactacccctcaattgttgccaatcggtggctcgcagttcggttagagtgcgtgggtaattgtatagttctgttcgcagctctgttcgcggtgataagcaggcatagtctgtccgcaggtttagtgggcctttccgtaagttattccttacaggttaccacctacttgaattggttggtgaggatgtctagtgagatggagacaaacattgtcgccgtggaacggctcaaagagtattctgagaccgagaaagaagcaccatggcagatccaggaaaccgccccgccttcctcctggccccaggtcgggagagtagaattccgtaactactgcctgaggtatagagaagatcttgacttcgtgttgagacacataaacgtgactatcaacgggggtgaaaaggtgggcatcgtcggtcgcaccggtgctggtaagagtagtctgacgctgggcctctttagaataaacgaatcagctgagggcgagattatcattgatggtatcaatattgcaaaaatcggactgcatgatctgcggtttaaaattacaataatcccccaagacccggtcttattctcaggctccctgcggatgaacttagacccctttagccagtacagcgatgaggaggtgtggacctctttggaactggctcatttgaaagactttgtttctgctttacccgacaagctcgaccacgagtgtgccgagggcggcgagaatctcagtgttggacaaaggcagctggtttgcctggcgcgggccctgttacgaaaaaccaagattctggtgctcgatgaagccacagccgccgtggatctcgagaccgacgatctcatccaatctaccattcgcacccagttcgaagactgcacggttcttactattgcgcaccggctcaacaccatcatggactacacacgggtcatcgtgctggataaaggggagattcaggagtacggggccccaagcgacctgctgcagcagagggggctgttctattctatggctaaagatgccggactggtgtag

SEQ ID NO: 22919 - DNA, 1968 bp, synthetic construct
  misc_feature 1..1968: note = Description of Artificial Sequence: Synthetic coding sequence
  source 1..1968: mol_type = other DNA
atgagcagcagcaacgtggaggtgttcatccccgtgagccagggcaacacaaatggttttcctgcgaccgcttccaacgatctgaaagcgttcacagaaggcgctgtattgtcctttcacaacatctgctaccgtgtgaagttaaagtcagggtttctgccttgcaggaaacctgtagaaaaagaaattttgtcaaacatcaatgggattatgaagcctggactgaacgccattttggggcctaccggcggagggaaatcctccctcctagatgttctggctgcccggaaggacccctcaggcctgtctggcgatgtgctgattaatggtgcccctagaccagcgaatttcaaatgcaacagcggatacgtggtccaggacgatgtggttatgggtacactgacggtgcgggaaaatctgcagtttagcgcagcactgcggctggccacaactatgacaaatcatgaaaaaaatgagagaatcaatagggtaatacaagaactgggcctggataaggtggcagatagcaaggtcggcacccagtttatccggggcgtctcggggggtgaacgaaagagaacatcaataggcatggagcttatcactgatcctagcatactctttcttgatgagcccaccactggactggactcatccaccgcaaacgctgtcttgcttctgcttaagagaatgtctaaacaggggcgtacgattatattctctatccaccagcctcgctactctatctttaagttatttgacagtcttaccctattggcttcagggaggctgatgttccacgggccagcacaggaagcgctgggatacttcgagtctgcggggtaccattgcgaggcctacaacaatcccgccgactttttcttggacatcattaacggcgatagcactgctgtggccctgaatagggaagaggacttcaaagccaccgaaataatcgagccaagcaaacaagacaagcccctgattgaaaagctggccgagatctacgttaatagcagcttttataaggagaccaaagcggagctacatcagctgtcagggggcgagaagaagaaaaagattaccgtgtttaaggagataagctacaccacgtcattctgtcatcagctgcgctgggtaagtaaacgaagtttcaagaacctgcttggaaacccacaggcgtctatagctcagattatagtcactgtggtgcttggactggttatcggtgctatctattttgggctgaaaaatgattcgacagggattcaaaatagagccggggtacttttttttctgacgacaaatcagtgcttctctagtgtttccgccgtggaactgttcgttgtggagaagaagctctttatccacgaatacatttctggatactatagggtgagttcttactttcttggaaaactcctaagcgacttgttaccaatgcgaatgctcccttccatcatattcacatgcatcgtttactttatgctgggcctgaagccaaaagctgacgcatttttcgtgatgatgtttactttaatgatggttgcatattctgctagtagtatggccctggccatcgccgcaggccagagcgtggtgtccgttgctaccctgctgatgactatttgttttgtatttatgatgattttctctggcctcctggttaacctaacaactattgcttcatggctgagctggttgcaatatttctcaatcccaaggtatgggtttacagctctccagcataacgagtttctggggcagaatttctgccctggactcaacgctaccggaaacaacccttgtaattacgccacatgtaccggcgaggaatacctggtgaagcaggggatcgatctatcaccatggggtctctggaagaatcatgtggcgctcgcctgtatgattgtgatcttcctgaccattgcgtatctgaaattactcttcctgaagaaatacagctag

SEQ ID NO: 22920 - DNA, 1836 bp, synthetic construct
  misc_feature 1..1836: note = Description of Artificial Sequence: Synthetic coding sequence
  source 1..1836: mol_type = other DNA
atgagcagcagcaacgtggaggtgttcatccccgtgagccagggcaatacgaacggcttccctgccactgcttcaaacgatctgaaggctttcactgagggagctgtgctaagtttccataatatttgctatagggtgaaactcaaaagtggcttcctgccttgtcgtaaacccgttgaaaaagaaattttatcaaacattaacggcataatgaagcccggactgaacgcaatcctcggaccaaccgggggaggaaaatcttctctgcttgacgtgctagctgccagaaaagatcccagtggcctgagcggggacgttttaatcaatggggccccgaggccagctaactttaagtgtaattccgggtacgtagttcaggatgatgtggtgatgggcactttaacagtcagagaaaatctgcagtttagtgccgccctcaggctggccaccactatgactaaccatgaaaaaaatgaacggatcaacagggtgatccaggaattaggcctagataaagtggccgacagtaaggtcgggacccaattcatccggggcgtcagcggcggagaaagaaaacggacatcgatcggaatggaactgatcacagatccttcaattctgtttcttgatgagccaactaccgggctcgattcttccaccgccaacgccgtgctgttattactgaagcgcatgtcaaagcagggaagaacgataatctttagcatacatcaacctaggtatagcatattcaagctgtttgacagcctgaccttactagcatccggtcgtctcatgttccacgggccagcacaggaggctctggggtactttgagtccgcgggctaccactgcgaggcctacaataaccccgcagactttttcctcgacatcatcaatggagattcaaccgctgttgcattgaatcgggaggaggacttcaaagctaccgagatcatcgagcccagcaagcaggacaagcctctgatagagaagttggcagaaatctacgtcaatagcagcttctataaagagactaaagccgagctgcaccaactgtccgggggcgaaaagaaaaaaaaaataacagtcttcaaagagatctcttacaccacttctttctgtcaccaactgaggtgggtttccaaacggtcctttaaaaatctgctgggcaatccacaagcgtcgattgctcagataattgtcaccgtcgtgctggggcttgttataggcgctatatatttcgggctgaaaaatgatagcacaggcattcagaatcgtgccggagtgctcttcttcctcaccactaaccagtgtttctcttctgtgagcgccgtggagctgtttgttgtggaaaaaaagcttttcatccacgagtacattagtggatattaccgcgtgtccagttatttcttgggcaaactactgagcgatctgttgcctatgagaatgctcccctccatcatatttacatgcatagtgtattttatgttgggtttgaagcccaaggcggacgcattttttgtcatgatgttcaccctgatgatggtcgcgtattcagcctcctccatggccctggcgattgcggccggccagagtgtggttagcgtcgctactctcctgatgaccatttgtttcgtcttcatgatggtctgctggagcatcagccagcccctgcacctgggatgccacggcttctccactagtgcctttcacgacatggacctgcgtctgtgctcaatcatgaatttctgggataaaacatccgcacaggacagcatgcagcaagaaaccatcctggtcaccatgcagcacgtgctagccaagaatatctggtag

SEQ ID NO: 22921 - DNA, 1212 bp, synthetic construct
  misc_feature 1..1212: note = Description of Artificial Sequence: Synthetic coding sequence
  source 1..1212: mol_type = other DNA
atggaccggagcaaggagaactgcatcagcggccccgtgaaggccactgcacctgtaggcggacctaagagggtcctggtgacacaacagtttccctgccaaaaccccctccctgtgaattccggacaggcacagagagtgctctgcccatcgaacagctcgcaaaggattcctcttcaggcccagaaacttgtctctagccacaagcctgtacagaaccagaaacagaaacagttgcaggccacatcagtgccacacccagtgagcagacccttgaacaatactcagaagtcaaaacagcctctgcctagtgcaccagagaacaatccagaggaggaactggcaagcaagcagaaaaacgaggagagtaagaagcgacagtgggccctcgaagattttgagatagggcgccccttgggcaagggcaaattcggaaatgtgtaccttgcccgcgaaaagcagagtaagtttattctggccctaaaagtcttattcaaggctcagctcgaaaaggcaggagtcgaacatcaactgcgtagagaggttgaaattcagagtcacttgcgccacccaaatattctgcggctctacggttattttcatgacgctacccgcgtatacctcattctggagtacgccccattaggcactgtctacagagagctgcagaagctcagcaagttcgatgagcaaagaactgctacttacattactgagctggcgaacgccctgagctactgccatagcaagcgcgttatacatcgagacattaaacccgagaacttgctgttgggttccgccggagagctgaagatagcagattttggttggtccgtgcatgccccgagcagtagacggacaactttgtgcgggacactcgactatttacctcctgagatgatagaaggcagaatgcacgatgaaaaagtcgatttgtggtcactgggcgtactgtgttatgagttcttggtgggcaagccacccttcgaggcaaacacttatcaggagacctataaacgtatctcccgtgtggagttcaccttccccgacttcgtgaccgagggagcacgcgatctcattagcagattgctgaagcacaaccccagccagagacccatgctccgcgaagtgctggagcacccatggattaccgcgaactcctctaagccgtccaactgtcagaataaagagtccgcatctaagcagtcctag

SEQ ID NO: 22922 - DNA, 1212 bp, synthetic construct
  misc_feature 1..1212: note = Description of Artificial Sequence: Synthetic coding sequence
  source 1..1212: mol_type = other DNA
atggaccggagcaaggagaactgcatcagcggccccgtgaaggccaccgcccctgttggaggacccaaaagagttcttgtgacgcaacagtttccttgccaaaatccactgcccgtcaatagtgggcaggcccaacgcgttctttgcccgtctaacagttctcagcgcatccctttacaggctcagaaactagtgtcatctcataagccggtacagaaccagaagcaaaaacagcttcaggccacgagcgtccctcaccccgtgagccgcccactcaacaacacgcaaaaatctaaacagccgctgcccagtgccccagagaacaatcctgaggaggagctagccagcaaacagaaaaacgaggagagtaaaaaacgacaatgggccctggaggacttcgagataggcagacctctgggaaagggaaaatttggcaacgtgtacttagcccgggagaaacagagtaaattcattctggctctgaaggtcctgttcaaggcacagctagagaaggcaggcgttgaacaccagctgcgtcgcgaggtggagatccagagccaccttcgacacccaaacattcttaggttgtatgggtactttcatgacgccaccagggtttacctcattctagagtacgctcctcttgggaccgtgtaccgcgaacttcagaagctgtcgaagttcgatgagcagagaactgccacgtatatcacagagctcgcgaacgccttgtcctattgccactcaaagcgcgtaatacaccgcgatattaagcccgagaacttgcttcttggcagtgccggtgaactaaagattgccgactttgggtggtctgtgcatgcgccatcctccaggcgaaccactctctgtggaacactagactacctccccccagaaatgatagaaggacggatgcacgatgagaaggttgacctgtggagtttgggagtcctgtgttatgagtttttggtgggcaagccgccatttgaggccaacacttatcaggagacatataagcggatttcaagggtggagttcacattcccggatttcgttacggagggcgcaagggatctgatctcacgcctgctgaagcacaacccctcgcagcggcctatgctgagggaagtgctggaacatccctggataactgccaattcctctaagccctctaactgtcagaacaaggaaagcgcttctaagcagtcatag

SEQ ID NO: 22923 - DNA, 1212 bp, synthetic construct
  misc_feature 1..1212: note = Description of Artificial Sequence: Synthetic coding sequence
  source 1..1212: mol_type = other DNA
atggaccggagcaaggagaactgcatcagcggccccgtgaaggccacggcgcctgtgggaggaccgaagagagtgctagtcactcagcaattcccttgtcaaaatcctctgcctgtgaactcgggacaggcccagagagtcttgtgccccagcaattcttcccagaggattcccttgcaggctcagaaactcgtgtcatcacacaaaccagttcagaaccagaagcaaaaacagctgcaggcgaccagcgtgccacacccagtttctcgtcccttgaataacacgcagaagagcaaacaacccttaccgtccgcaccggagaataacccagaagaagaattggccagtaagcaaaagaacgaggagagtaaaaaacgccaatgggcactggaggacttcgagattggcagacctctaggaaagggtaaatttggcaacgtttatctggcacgcgagaaacaatctaaattcatcctggcactgaaagtcctatttaaggctcagctggaaaaggctggcgttgaacatcagcttagaagagaagtagagatccagtcccacttacggcacccgaatatcctgcggctctatggctacttccacgatgcaacccgggtgtaccttattttggagtacgctccgttgggtactgtttatcgtgagctccagaaacttagcaagtttgatgagcagaggaccgccacttatattacggagctggccaatgcactgagctactgccactcaaaacgcgtgatccatagagacattaagccagagaacctcctccttggtagtgccggggagctgaagatagccgatttcggttggagtgtacatgcacctagttctagacggactacactatgcggtactctcgattacttgccgcctgaaatgatcgaggggcgaatgcatgacgagaaggtggatctatggtcactgggtgtactttgctacgagtttttggttggaaagcccccattcgaggctaatacctatcaagaaacttacaaaagaatctcacgagtggaatttacttttcccgattttgtgactgaaggcgctcgggacttgatttctagactgctgaagcacaatccaagtcagagacctatgctccgggaagtgttagaacacccctggataaccgctaatagcagtaagccatcgaactgccagaacaaagaatccgcaagtaagcagtcatag

SEQ ID NO: 22924 - DNA, 1044 bp, synthetic construct
  misc_feature 1..1044: note = Description of Artificial Sequence: Synthetic coding sequence
  source 1..1044: mol_type = other DNA
atggaccggagcaaggagaactgcatcagcggccccgtgaaggccacagccccagtgggcggccctaaacgggtgctggtgacccaacagttcccatgtcaaaatcctttacctgttaattctggtcaggcccagagggtcctctgcccttcaaattctagtcagaggattcccctacaagcacagaaattagtatcatcacataaaccggttcaaaatcaaaaacaaaagcagctgcaggctaccagcgtgcctcacccggtgtcaaggccattgaacaacacccagaagtcaaagcagccgttgccatcagctccagaaaacaaccccgaggaggagctggcttctaagcagaagaatgaagagagcaaaaagcgacaatgggctttggaggacttcgaaataggtaggcctcttggcaaaggtaaatttggcaatgtgtatctcgccagggagaagcaaagtaaattcatccttgctctgaaggtgctgtttaaagcccagttggaaaaagccggcgtggagcaccaattgcgcagagaggttgagatacagtcacatctaagacacccaaatattctcagactctatggctactttcacgatgcaacgcgggtatatctcattctcgagtacgcaccgctcggaaccgtatatagagagcttcagaaactctccaaattcgacgagcaacgcacagcaacatatatcaccgaattggctaacgctctctcttactgccacagcaagagagtgatccacagagatatcaagcctgagaatctgctgctcggtagcgccggcgagttgaaaattgccgacttcggatggtctgtgcacgccccgagcagcaggcggaccacgctgtgcggcaccctggactacttacctccagagatgatcgaagggcgcatgcacgatgaaaaggtcgacctgtggtccctgggcgttctgtgctacgagtttttggtcggcaagccgccctttgaagcaaatacctaccaggagacctataagaggatcagcagggtgcggcgaaactag

SEQ ID NO: 22925 - DNA, 1212 bp, synthetic construct
  misc_feature 1..1212: note = Description of Artificial Sequence: Synthetic coding sequence
  source 1..1212: mol_type = other DNA
atggaccggagcaaggagaactgcatcagcggccccgtgaaggccactgctccagttggggggcccaaaagggtactcgtgactcagcaattcccatgtcagaaccctctccctgttaactccggccaagcacagcgtgtgttgtgcccctcgaacagcagccagaggatacctctccaggcgcagaaactcgtatcaagccataaacccgttcagaaccagaagcagaagcagttgcaggcaacttccgtgcctcaccccgtttcacggccactgaataacacccaaaaatctaagcagcctttgccaagcgccccggagaacaatcctgaagaagagttggctagtaaacagaaaaacgaggaaagcaagaaaagacagtgggccctagaggattttgaaattggccgcccacttggcaagggaaaatttggtaatgtctatctggctagggagaagcaaagcaagtttattctcgccttaaaagtattatttaaggcacagctcgaaaaagcgggagtggagcatcagctcagacgggaggtggagatccagagccatctgaggcaccctaacattcttaggctgtacggatatttccatgacgcaacccgtgtatacctgatcctggaatacgccccactgggcactgtttaccgcgagctgcagaaacttagcaagtttgacgagcagagaacggcaacatacataactgaactggcaaatgctttgtcttactgccatagtaagcgcgtgatccaccgggacatcaaacccgaaaacctactgctgggttcagcgggcgagttgaaaatcgctgattttggatggagcgttcacgcccctagctctcgtcggactaccctgtgtggcaccctggattacctgcctccagaaatgatcgaaggccggatgcatgatgaaaaagtggacttgtggagcttgggggtcctttgctatgagttcctggttggcaaaccgccattcgaagccaatacctatcaagagacatataagcggatttcgcgggtggagttcacttttccagattttgttacggagggagcaagggatctgatctctcgactgctgaagcacaatccaagtcaacgcccaatgttaagggaagtccttgagcacccatggattactgcaaatagctctaagcccagtaattgtcaaaataaggagagtgcatctaaacagtcgtag

SEQ ID NO: 22926 - DNA, 1212 bp, synthetic construct
  misc_feature 1..1212: note = Description of Artificial Sequence: Synthetic coding sequence
  source 1..1212: mol_type = other DNA
atggaccggagcaaggagaactgcatcagcggccccgtgaaggccaccgcccccgtaggcggccccaaacgggtgctggttactcagcagttcccgtgtcagaaccccctgccggtaaactccggccaggcacagcgggtgctatgtccttcgaattctagtcagaggatcccactgcaagcacagaaactggtgtctagccacaagccagttcagaaccaaaagcaaaagcaactccaggctacaagtgtacctcaccccgtcagtagacctctcaataacacacagaaaagtaaacagcctcttccgtccgcacccgagaataatccagaggaagagttggccagcaagcagaaaaatgaagagagcaagaaacgccagtgggccctcgaggattttgagattggccgacccctgggtaagggcaagtttggaaatgtctatctggcacgcgagaagcaatccaaatttatcttggcacttaaggtactgttcaaggctcagttggaaaaagcaggggtggagcaccagcttagacgggaggtggaaatacaaagtcacctccggcacccaaatatcctgaggctgtacgggtactttcatgacgccacacgggtgtatctcatcctggaatatgcaccgctgggcacagtgtaccgggagctacagaagctgagtaagtttgacgaacagagaaccgcgacatatatcactgagctcgccaacgcgttaagttactgtcactctaaaagggtgatccaccgtgatatcaaaccggaaaaccttctcctgggttcggccggtgagctaaaaattgccgactttggctggagcgttcacgctccttcttcacgtcgcaccacactgtgcggaacgctggactacttaccacctgaaatgatcgagggtcgtatgcatgacgaaaaggtcgatttgtggagtctgggggtcctttgctacgagtttctggtgggcaaacccccatttgaggccaacacatatcaagaaacctacaaaaggatttctcgcgtggaattcacctttcctgatttcgtgacggagggcgcacgagacctgatttctcgcctcttaaagcacaacccatctcagagacctatgctccgcgaggtcctcgaacatccctggattactgccaattccagcaagccatccaactgccagaacaaagagtctgctagcaagcagagctag

SEQ ID NO: 22927 - DNA, 1212 bp, synthetic construct
  misc_feature 1..1212: note = Description of Artificial Sequence: Synthetic coding sequence
  source 1..1212: mol_type = other DNA
atggaccggagcaaggagaactgcatcagcggccccgtgaaggccaccgctccagtcggggggcccaagagagtcctagtgacccagcaatttccctgccagaatccgctgccagtgaattccggtcaggctcagagggtgctgtgtccttcaaactccagtcagaggatccctctccaggctcagaagttggtctcctctcataagcctgttcagaaccagaagcagaagcagttgcaggccacatccgtgccccaccccgttagcaggcctctcaacaacacccagaaatcgaagcagcctttacctagcgcccccgagaacaaccctgaggaagagttagctagtaagcagaagaacgaggagagtaaaaaaagacagtgggccctggaagatttcgagattggacgcccactgggaaaaggcaaattcggaaacgtttaccttgccagagaaaagcaatctaaattcattctcgccctgaaagttctattcaaagcacaactcgaaaaggcaggagtggagcaccaactgcgacgcgaggtggaaatccaaagccacctgaggcaccccaacatcctccggctgtatggatacttccatgatgccacgagggtctacctgatcctggagtatgcacccctgggtaccgtgtatcgggagctccagaagcttagtaagtttgacgagcagcgcaccgccacatacatcactgagttggccaatgctctgtcctactgtcactccaagagggtgattcatagagatattaagcctgaaaacctgttactggggtctgctggagaactgaaaatcgccgattttgggtggagtgttcatgccccgagctcaagacgaacaacgctgtgcggaactttagattacctcccccctgaaatgatagaaggccgcatgcacgatgagaaagtagacctgtggagtctgggtgtattatgctacgaattcttagtgggcaagccaccattcgaggctaatacttatcaggaaacctataaacggatttcaagagttgaattcacgtttccagacttcgtaaccgaaggggcacgggacctgatttctcgccttttaaaacacaacccgtcccagcggcctatgcttagggaagtgctcgagcatccctggatcaccgcgaactctagcaaaccctcgaattgccagaacaaagagtcggcatccaagcagagttag

SEQ ID NO: 22928 - DNA, 1212 bp, synthetic construct
  misc_feature 1..1212: note = Description of Artificial Sequence: Synthetic coding sequence
  source 1..1212: mol_type = other DNA
atggaccggagcaaggagaactgcatcagcggccccgtgaaggccacagctcctgttggaggccccaagcgggtactggtgacgcagcagtttccatgtcagaaccctctccccgttaatagcggccaggcacaacgggtgctctgtccgtcaaactcatcccaaagaatccccctgcaggcccaaaaactggtatcctctcataagcctgttcaaaaccagaaacaaaaacaactccaggccacatccgtgccacaccctgtgagcaggcccctgaataacacccagaagtccaagcagcctctgccctccgcaccggagaataaccctgaggaagagctcgccagcaaacagaaaaatgaagaatccaagaagcgacagtgggcattggaagattttgaaatcggcaggccactgggcaagggcaaattcggaaatgtgtaccttgccagagagaagcagtcaaagttcatcttagctctcaaggtgttattcaaggcacaactagagaaagccggagtggaacatcagcttaggcgcgaggtagaaatccagtcccacctcaggcacccaaatattctccggttatacggttatttccatgacgcgacccgggtctatttgatccttgaatatgcaccattgggtacagtgtaccgcgagctgcaaaaactgagcaagtttgacgaacaacggaccgcaacatacatcacagagctggccaacgctctctcgtactgtcattccaagagggtcatccaccgggacatcaaaccggagaatctcctactgggctctgccggagagcttaaaatagcagacttcggatggagcgtgcacgccccgtcttcaaggaggaccaccctttgcgggaccttagactacctaccaccagagatgatcgaagggcgcatgcacgatgagaaagtggacctgtggtctctaggcgtattatgttatgagtttcttgtggggaaacctccctttgaggctaacacttatcaggaaacctataaacgaatctcacgggtcgagttcacgtttccagatttcgtgaccgaaggcgcgcgcgatctgattagtcgcttacttaagcacaatccgtcacagagacccatgctccgggaagtgctggagcatccctggatcaccgccaacagttccaaaccctcgaactgtcagaataaggagtctgctagtaaacagtcctag

SEQ ID NO: 22929 - DNA, 1212 bp, synthetic construct
  misc_feature 1..1212: note = Description of Artificial Sequence: Synthetic coding sequence
  source 1..1212: mol_type = other DNA
atggaccggagcaaggagaactgcatcagcggccccgtgaaggccacagcccccgtggggggccccaaaagagtattagttactcaacagtttccttgtcaaaacccactacctgtcaattcaggccaagcccagcgggtactgtgtccttctaacagttctcagcgcataccactgcaagctcagaagctggtgtcatcacacaagcctgtccaaaaccagaagcaaaagcagttgcaggctacatctgtccctcaccccgttagcagaccactgaataatacgcagaagtccaagcagcctctgccatctgctcctgagaacaatcctgaggaagagctggcctctaaacagaaaaacgaggagagcaagaagcgccagtgggctctagaagatttcgagattggtagaccattaggcaaagggaaatttggtaatgtctacctggctagggagaagcagtccaagttcatcctggctctcaaggtgttatttaaggcccagcttgaaaaggctggggtggaacatcagctgaggagggaggttgaaatccagtcccatttgcggcaccctaatatcttgcgattatatggctactttcacgacgctacgcgcgtgtatttaattctcgaatatgctccacttggcactgtctatcgcgagcttcagaaactctctaaattcgacgaacagcgcacagccacctatataacggagctggccaacgctctgagctactgccacagtaaaagggtcattcaccgcgacatcaaaccggagaatctgcttctggggtccgcgggtgagttgaagatcgcagatttcggctggtcagtgcatgctccatccagtagaagaacaacactgtgtgggacactggattaccttcccccagaaatgattgagggaaggatgcatgatgagaaggtcgacttgtggagcttaggcgtactctgttatgagttccttgtgggtaagcccccttttgaagcaaacacctaccaagagacctataagcgtataagtcgggttgagttcacctttccggacttcgtgactgaaggcgccagagacctgatctctcggctgcttaagcacaacccgtcacagagaccaatgctcagggaggtcctcgagcatccctggataactgccaatagctccaagccaagtaattgccagaacaaggagagtgcaagcaaacagtcatag

SEQ ID NO: 22930 - DNA, 570 bp, synthetic construct
  misc_feature 1..570: note = Description of Artificial Sequence: Synthetic coding sequence
  source 1..570: mol_type = other DNA
atggaccggagcaaggagaactgcatcagcggccccgtgaaggccactgccccagtggggggtcccaagcgggtcctggtgacccagcaattcccttgtcagaatccactgcctgtgaacagtgggcaggcacaaagagtcctgtgccccagcaacagctcccagaggatccccttacaagcccagaagctggtgtcaagtcacaagcccgtacagaaccagaaacaaaagcagctccaagcgacctctgtcccacatcccgttagccggcctcttaataatacccagaagagcaaacagcctctgccctctgcccccgagaataacccagaagaggagctggcttcaaagcagaagaatgaggaatccaagaagcggcagtgggccctagaggattttgaaattgggcggccactcggaaaaggcaagttcgggaatgtgtacctggcgagggaaaagcagagcaaattcattctggcattaaaggtccttttcaaggcccagttggagaaagccggtgtagagcatcagctgagacgggaggtcgagatccaaagccacctgcgctag

SEQ ID NO: 22931 - DNA, 444 bp, synthetic construct
  misc_feature 1..444: note = Description of Artificial Sequence: Synthetic coding sequence
  source 1..444: mol_type = other DNA
atggaccggagcaaggagaactgcatcagcggccccgtgaaggccaccgcgccagtgggtggaccaaaaagggtgctggtaacacagcagtttccatgccagaaccccctcccagtcaatagcggacaagctcagcgggtgctgtgtcccagcaacagtagtcagaggattcccctgcaagctcagaaactcgtgtcgtcccacaagccagtgcagaatcagaagcagaaacaattacaggctacatctgtgccccatcccgtgagcaggccacttaacaatacacaaaaatcaaagcagcccctaccatccgccccggagaataatccagaagaggaactcgcttctaagcagaagaatgaagagagcaagaagcgccagtgggccttggaagacttcgagatcgggcggcctctcggcaaaggcaagttcggaaatgtgtag

SEQ ID NO: 22932 - DNA, 816 bp, synthetic construct
  misc_feature 1..816: note = Description of Artificial Sequence: Synthetic coding sequence
  source 1..816: mol_type = other DNA
atggaccggagcaaggagaactgcatcagcggccccgtgaaggccaccgctccagtagggggccctaagagggtcctggtcacgcagcagtttccctgccaaaaccctctccctgttaacagcggacaggcccaaagagtgctgtgtccttccaatagtagccagcgtattccgcttcaggctcagaagctggtgtcctctcacaagcccgtgcaaaaccagaaacagaagcagctgcaggccacgagcgtgcctcaccccgtcagccgccccctgaataacacccagaaatctaagcaacccctgccaagcgcccctgaaaataaccctgaagaggaattagcatccaagcagaagaatgaggagtcaaaaaagcggcaatgggccctggaagacttcgaaattggccgccccctcggaaaggggaagtttgggaatgtgtatctcgcccgggaaaagcagtccaagtttatactggctctcaaggtgctattcaaggctcagctggaaaaagctggcgtggagcaccaacttcgaagagaggtggagattcaaagtcatttaagacaccccaatatactacggctctatggttacttccacgatgccactcgagtctacctgatcctggaatacgcccccctcggaaccgtgtaccgcgagctccaaaaactctcaaagttcgatgagcaacgcaccgcaacatatatcaccgagctcgccaatgcgctcagctactgtcactcaaagcgggtgatccatcgagacatcaaacctgaaaatctgctgctgggtagcgccggggaactgaagtag

SEQ ID NO: 22933 - DNA, 240 bp, synthetic construct
  misc_feature 1..240: note = Description of Artificial Sequence: Synthetic coding sequence
  source 1..240: mol_type = other DNA
atggaccggagcaaggagaactgcatcagcggccccgtgaaggccactgctccagttggcggaccaaaaagagtgctcgtgactcaacagtttccttgtcagaatccgcttccagtgaactctgggcaggcccagcgggtcctgtgcccttccaactccagccagcgcatccctctgcaggcgcagaagttagtctcctcacacaagcccgtacagaaccaaaagcagaaacagctctag

SEQ ID NO: 22934 - DNA, 321 bp, synthetic construct
  misc_feature 1..321: note = Description of Artificial Sequence: Synthetic coding sequence
  source 1..321: mol_type = other DNA
atggaccggagcaaggagaactgcatcagcggccccgtgaaggccacggcaccagtgggtggcccgaagcgagtgctcgtgacgcaacagttcccctgtcagaatccactgccagtgaactccggtcaagcacagcgtgtactgtgccccagcaatagtagccaacgaatcccattgcaagctcagaagttggtttcttcacataaacctgtacagaaccaaaagcaaaagcagctgcaggccacatcggtcccgcacccggtgagtcgacccctcaataatacacaaaagtccaagcagcctctccccagcgcaccttag

SEQ ID NO: 22935 - DNA, 1035 bp, synthetic construct
  misc_feature 1..1035: note = Description of Artificial Sequence: Synthetic coding sequence
  source 1..1035: mol_type = other DNA
atggcccagaaggagaacagctacccctggccctacggccggcagaccgcaccctcagggctaagcaccttgcctcaacgcgtccttagaaaggaacctgttacgcctagtgcgctggttctgatgtcgagatctaatgtacagcctaccgcggcacctggacagaaggtcatggagaattccagcgggactcctgacatactgacgcggcactttaccatagacgactttgaaattggccgaccccttggcaaaggaaaatttgggaatgtgtatttagcccgcgaaaagaaatcacacttcattgtagctctgaaagtgctgttcaaatcccagatcgaaaaggagggagttgaacaccagctgcggcgagagatcgaaatccaggcacacctgcaccacccaaacatccttagactgtacaactacttttatgatcggagacgtatctatctgatcctcgagtacgctccccgcggcgagctctataaagagctgcagaaatcttgtacctttgatgaacagaggaccgccaccattatggaggagttggcagatgctctcatgtattgtcatggaaagaaagttattcatcgtgatatcaaacctgagaaccttctgttgggcctgaaaggggagcttaaaatcgcagatttcggatggtcggtccatgctcccagtctccgcaggaaaacaatgtgcggcaccctggattacctaccacctgaaatgattgagggccgtatgcataatgaaaaggtcgatctctggtgcattggcgtcctctgttacgagctgcttgttgggaaccctccattcgaatccgccagccataacgagacatacagacgcattgtcaaggtggacctgaagtttccagcctctgtcccaatgggagcccaggatctgatttccaaactgctacggcataacccttcagagagattacccctcgctcaagtgagtgcccatccttgggtgagagccaacagccgtcgggttctgcccccctcggccctccaatcagttgcgtag

SEQ ID NO: 22936 - DNA, 912 bp, synthetic construct
  misc_feature 1..912: note = Description of Artificial Sequence: Synthetic coding sequence
  source 1..912: mol_type = other DNA
atgagccggagcaacgtgcagcccaccgccgcccccggccagaaggtgatggaaaattcttcaggaacacctgatattcttactcgtcatttcacaattgacgactttgaaattggcaggccacttggcaagggcaaatttggaaatgtatatctcgcaagggagaaaaagagtcactttattgtcgctctgaaagtgctttttaagagccagattgagaaagagggcgtggaacatcagttgaggcgggagatagagattcaggcccaccttcaccatcccaatattctaagactgtacaactacttctacgatagacggcgtatttacctcatactggagtacgcgccaaggggagagctgtataaagagctgcagaagagctgcacattcgatgagcaacggacagcaaccattatggaagagctcgcggatgctttaatgtattgtcacggcaagaaagtgatccaccgcgacatcaagcctgaaaatctcctgcttgggctgaagggggagctgaagatagccgactttggctggagcgttcatgcgcccagtttaagacgcaaaactatgtgcgggaccttagactatctgccaccggagatgatagaaggccgcatgcataacgaaaaggtcgatttatggtgcattggcgttctgtgctatgagctgcttgtcggcaacccccccttcgaatctgcttcccataatgaaacctatcggaggatcgtgaaagtggatctcaagtttccagcctcagtacccatgggagcgcaggatttaatctccaagctgctgaggcataatccttctgagcgcctgccacttgctcaggttagtgcgcatccatgggtgagagcgaactctagaagggtactgccaccctccgccctccaatcagtggcctag

SEQ ID NO: 22937 - DNA, 1035 bp, synthetic construct
  misc_feature 1..1035: note = Description of Artificial Sequence: Synthetic coding sequence
  source 1..1035: mol_type = other DNA
atggcccagaaggagaacagctacccctggccctacggccggcagacagctcctagcggcctgtcaacactccctcagcgggtcctgcgaaaggaacccgtgacaccgtcagcgctcgtgctgatgtctcgttccaacgtgcagccaacagccgcccccggccagaaggtgatggaaaacagttctggcactcccgatatattaaccaggcatttcactattgatgattttgagatcgggaggcccctcggcaaaggaaaattcggcaatgtatatcttgcaagggagaagaaatcccacttcatcgtcgcactgaaagtcctttttaaatcccaaattgaaaaagaaggcgtggaacatcagcttaggcgggagatcgagatccaggcacatctgcaccatcctaacattctgaggctgtataactatttctatgacaggagacggatatatctaatcctcgagtacgctccccggggcgaactctacaaggagctgcagaaatcttgtacatttgacgaacagcgaaccgccaccatcatggaggagcttgccgacgccctgatgtactgccacgggaagaaagttatacatcgcgacatcaagcccgagaatctgttgctggggctcaagggggaacttaagatcgccgattttggttggagcgtgcatgcacccagtctgagaaggaaaacaatgtgcgggacacttgattatctcccccccgagatgatagaggggcgaatgcataacgagaaagtggacctctggtgtataggcgtgctatgttatgagttgctggtgggcaatcctcctttcgaaagcgccagccacaatgagacttacagaaggatcgtgaaggttgacttaaaattcccagcttcagtccccatgggagcacaggatctgatcagtaagcttttgaggcacaaccccagtgagcggctgccattggctcaagtatcggcccatccttgggttagggctaactcacgcagagtcctcccaccttctgccttacaatccgttgcctag

SEQ ID NO: 22938 - DNA, 930 bp, synthetic construct
  misc_feature 1..930: note = Description of Artificial Sequence: Synthetic coding sequence
  source 1..930: mol_type = other DNA
atgagcagcccccgggccgtggtgcagctgggcaaggcccagcccgctggtgaggagctggccactgccaaccaaactgcgcagcaaccatcatcacccgcaatgcggagacttactgtagatgacttcgaaattgggaggcccctgggcaagggtaagtttggtaacgtgtatctggctcgcctgaaagaaagccattttattgtggcactcaaggtactgttcaagagtcagattgagaaggaaggtcttgaacaccagctaaggcgcgaaattgagattcaggctcaccttcagcacccgaacatcctgcggctgtataattactttcacgacgcacggagagtttacctgatcttagagtatgctccccgcggggagctctacaaggagctgcagaaaagcgagaaattggacgaacaaaggacggctacgatcatcgaggaactggccgatgcacttacctactgtcatgacaagaaggtgattcatcgcgatatcaaacccgaaaatctcctattgggctttagaggagaagtcaagatcgccgacttcggatggagcgttcacacacccagtctcaggaggaagaccatgtgcggtacattggactacctgcctccggagatgattgaaggccgcacgtacgatgagaaggtagatctgtggtgcatcggggtcctgtgctacgagctgctggtgggctacccacctttcgagagtgcctcgcattcggagacctatcgacgaattcttaaagttgatgtgcggttcccgctcagtatgccacttggcgccagggacctaattagtaggttactgaggtatcagcccctggagcggttgcctttggcgcagatcttgaagcatccgtgggttcaggctcattccagaagggtgctgcccccctgtgctcagatggcatcatag

SEQ ID NO: 22939 - DNA, 873 bp, synthetic construct
  misc_feature 1..873: note = Description of Artificial Sequence: Synthetic coding sequence
  source 1..873: mol_type = other DNA
atggccaccgccaaccagaccgcccagcagcccagcagccccgccatgcgacggcttacagtggacgatttcgaaatcggtcggcctttgggtaaaggaaagttcggcaacgtgtacctggcccgcctcaaagaaagccattttatcgtcgccctcaaggtactgttcaagtctcagatcgaaaaggagggactggagcatcaacttagacgcgagattgagattcaggcacatctgcaacacccaaacatccttagactgtacaattacttccacgacgcgcgaagggtgtatctgattcttgagtatgcgcctcggggcgagttgtataaagaattgcagaaatcagagaaactggacgagcagcgcacggcaaccatcatcgaggagctggcagacgctctgacttactgtcatgataaaaaggtgattcatagagatatcaagccagagaacctgcttctaggattccggggagaggtaaagatagccgactttggctggtcagtgcataccccatcccttaggcgcaaaaccatgtgcgggacgttagattacctgcctccagaaatgattgagggaaggacatacgatgagaaagttgacctctggtgtatcggggttctctgttacgaactgttggtgggatacccccctttcgaatccgcctctcactctgaaacatatcgccgcatcctgaaggtagacgtccgcttcccactgtctatgccacttggggctcgggatctcatatcgaggctcctaagatatcagcctctcgaaagactgcccttggcgcagatattgaaacacccttgggtccaggcccacagccgacgggtgctgccaccttgtgcacaaatggcatcttag

SEQ ID NO: 22940 - DNA, 828 bp, synthetic construct
  misc_feature 1..828: note = Description of Artificial Sequence: Synthetic coding sequence
  source 1..828: mol_type = other DNA
atgcggcggctgaccgtggacgacttcgagatcggccggcccctgggcaagggaaagttcggtaatgtgtacctagctcggctgaaagagagccatttcattgtcgctttgaaagttctctttaagtctcagatcgaaaaggaagggttggagcatcagttaaggagagagatcgagatccaggcccatttacagcaccccaacatattaagactgtataactactttcacgacgcaaggagagtctacctgatcttggaatacgccccacggggagaactttacaaagagctccaaaagtctgaaaaacttgacgaacagagaactgccaccatcattgaggagctggccgacgcccttacatactgccacgacaagaaggtcatccaccgtgacatcaagcctgaaaaccttctgttaggctttagaggcgaggtaaaaatcgcagacttcggatggtcagtgcacaccccttccctgcgccgcaagacaatgtgtggcacattggattacctccctcctgagatgatagagggaagaacatacgacgaaaaagtggacctttggtgcataggagtcttatgctacgagctcctggtcggctacccccccttcgaatcagcctctcactctgaaacataccgacgaattcttaaggttgatgttcgattccccctgtccatgcctcttggggctcgggacctgattagtagacttcttcgatatcaaccgttggagagactgccactggctcagattctcaaacatccctgggtccaagctcactccagacgcgtgctacctccatgcgcgcagatggcctcctag

SEQ ID NO: 22941 - DNA, 2589 bp, synthetic construct
  misc_feature 1..2589: note = Description of Artificial Sequence: Synthetic coding sequence
  source 1..2589: mol_type = other DNA
atgaacatccaggagcagggcttccccctggacctgggcgccagcttcacagaggacgccccccggcctcctgtgccaggagaggagggagagctggtatccacagatccacggcccgcttcatattcattctgttcgggtaaaggggtggggatcaaaggagaaaccagcacagccacgccacgaagatccgacctggacctgggatatgagcctgaggggtccgcctcccctacgcctccctaccttaagtgggcagaaagtctgcactcacttttagacgaccaggatgggatttctctctttcgaacttttctcaaacaggagggctgcgccgacttattagacttctggttcgcctgcacaggatttaggaaactcgaaccgtgtgattcaaatgaggaaaagcgcctgaagctggccagagcaatctaccgaaagtacatcctagacaacaacgggattgtgagccggcagactaagcccgccaccaagagcttcattaagggatgcattatgaagcagctgatcgatccagcaatgttcgaccaggctcagacggaaattcaggctacaatggaggaaaacacctatcccagtttcctgaagtccgatatctaccttgaatatacacggacaggtagcgagtcaccaaaagtatgttcagaccagtcatccggctcggggacaggaaagggtatcagcggctacctgcctactctgaatgaggacgaagagtggaagtgcgaccaagacatggatgaagatgatgggcgagacgccgccccaccaggtagactgccacagaaactcctgctggagaccgcagctcctcgggtgtcttccagtcgcagatatagtgagggccgcgaatttcgatatggatcctggagagaaccagtcaatccgtactatgtgaacgctggatacgctctggcaccggccacatcagctaacgattctgagcagcagagtctcagtagcgacgctgatactctgagtcttaccgactcatctgtggatggcatccctccctaccggataagaaagcaacatcgcagggagatgcaagaatccgtgcaagtgaacggaagggttcccctcccccatatcccacgcacctaccgcgtgcccaaggaggtgcgggtggaacctcaaaaatttgcagaggagctgatccaccgcctcgaagctgtgcaacggaccagggaagctgaggagaagctggaagaaaggcttaagcgcgttcgcatggaagaagagggcgaagacggagatccttcaagcggtccacccggaccttgtcataaactgccgcccgcccccgcctggcaccatttcccacctagatgcgtggatatgggctgcgccggcctacgcgacgcccacgaggaaaatccggaaagcatcctggacgaacatgtccagcgcgtactccgcactcctgggagacagagcccaggccccggacaccgtagcccagactcaggccacgtggcaaagatgccagtggctctaggaggcgccgcctccggacatggaaagcatgtgcccaaaagtggtgcaaaactggatgcggctggactgcatcaccaccggcacgtgcatcatcacgtgcaccacagtacggctcgaccaaaggaacaggtagaagcggaggccactaggcgggcacagagtagcttcgcctgggggctggagcctcacagtcacggcgcgcggagccgcggatactctgaatcagtgggtgcagctcctaacgctagtgacggccttgcccactctggaaaggtaggagttgcttgcaagcgtaatgccaaaaaagccgaatcggggaaaagcgcgagtaccgaagtgcctggcgcctctgaagacgccgaaaagaaccaaaaaatcatgcagtggatcattgagggtgagaaagaaatcagcaggcaccgcagaactggccacgggtctagtggtactagaaaacctcaacctcacgagaatagtagacctctgtcactggagcacccttgggctggcccacagttgcgcactagtgttcagccatcgcatctgtttatacaggaccccacgatgccacctcaccccgcacctaaccccctcactcagcttgaggaggctcgacgacggctcgaggaagaggaaaagcgggcaagccgggccccgtctaagcagcgatacgtacaggaagtgatgcgtcgtggtcgcgcttgtgtcagacccgcctgtgctcccgtcctgcacgtggtgcctgcggtgtctgacatggagcttagcgagaccgagaccagatcccaacggaaggtcggaggtgggtctgcacaaccctgcgacagtatcgtcgttgcatactacttttgcggcgaaccgatcccataccggacccttgttcgcgggcgtgctgtgaccctgggccagtttaaggagctcttgacaaagaaaggaagttatcgctactattttaaaaaagtgtccgacgaatttgactgtggggtagtcttcgaggaggtgcgcgaggacgaggccgtgttaccggtattcgaagaaaaaataatcggtaaagtagaaaaggtggactag

SEQ ID NO: 22942 - DNA, 2481 bp, synthetic construct
  misc_feature 1..2481: note = Description of Artificial Sequence: Synthetic coding sequence
  source 1..2481: mol_type = other DNA
atgaacatccaggagcagggcttccccctggacctgggcgccagcttcacggaggatgcacccaggccaccagtccccggagaagaaggtgagctcgtgtccactgaccctcggccagcctcttattctttctgttctggcaagggggtgggcatcaagggggaaacttccacagcaacaccccgccgctccgatctggatctgggatatgaacctgaaggaagtgcctcacccactccaccatacctcaaatgggcagaaagccttcattccctgttggacgaccaggacggtatctctctcttcaggacattcctgaaacaggaaggttgcgcagatcttctcgacttctggttcgcttgtacaggatttcggaagctcgaaccctgcgattcgaatgaggagaagcggctgaagctcgctcgggccatctatagaaaatacatcctggacaataatgggatcgtgtcccggcaaaccaagcccgccaccaaaagctttatcaaggggtgcattatgaagcagctcatcgaccccgccatgtttgatcaggcacaaacagagattcaagcaactatggaagagaatacatatcctagcttcctcaaatccgatatctacctggagtacacccggactgggtccgaatcacctaaagtgtgttctgaccagtcctctggttccggcacaggtaaggggatatcagggtacctgcccacccttaacgaggatgaggagtggaagtgtgatcaggatatggatgaggatgacggcagagatgctgcacccccgggcaggttgccgcagaagcttctgctcgagacagccgccccccgagtttccagcagcaggaggtatagtgagggcagggagttcaggtatgggagctggcgtgaacccgtgaatccttattatgtgaatgccggatatgctctggccccagccacaagtgccaacgactccgaacagcaaagtctgtcgtccgatgcagatacactcagcctcaccgattccagcgtggacgggatcccaccatacaggattcgtaaacagcacaggagggaaatgcaagagagcgttcaggtgaacggtagggtccccctccctcacattccgcgaacataccgggtgccaaaggaggtgagagtggaaccccaaaaattcgccgaggagctgattcatcggctggaggctgtgcagcggactcgggaggctgaggaaaaactggaggagagactcaagcgcgtgagaatggaagaggagggcgaggacggagacccctcctctggccctcccggtccctgccacaagctccctcccgcgcctgcttggcaccacttccccccaagatgcgtggacatgggatgcgccggcctgcgagacgcccacgaggagaacccagaatcaatcttggacgaacacgttcaaagggtgcttcggacacctgggagacagagccccggaccagggcacaggtcaccggactctgggcatgtggctaaaatgcctgttgcactgggtggcgcggcctctggccatggtaaacacgttcccaagagtggtgcaaaactcgacgccgccgggttgcaccatcatcgccatgttcatcatcatgtccaccacagcaccgcccgacctaaggagcaggttgaggccgaagcgacccggcgagcccagtccagtttcgcttggggccttgagccacattcacacggtgcacggagtagaggctattcagagagcgtgggggccgccccaaacgcttccgatggccttgcacactccggtaaagtcggcgtcgcatgcaaacggaatgctaaaaaggcggagagcgggaagagcgcatccacagaggtgccgggcgcctctgaagacgccgagaagaatcagaaaatcatgcagtggataattgagggagagaaggagataagtcgccacaggaggaccggccatgggagcagcggaactcgtaagcctcaaccccacgagaatagccgccctctgtccctggagcacccctgggctggaccccaactgagaacatccgtccagcctagtcacctctttatccaggatcctaccatgccaccccatcccgcacccaacccgttaacacagttagaggaggctcgacgtcggctggaggaggaagagaagagagcatcccgagccccttcaaaacagcgcactaggtctcaacgaaaagtcggaggtgggtcagcccagccatgcgacagtattgtggtggcgtattacttttgcggggagcctattccttacagaaccttagtgcgcggcagggccgtgacactgggacagttcaaggaattgctgacgaagaagggatcctaccgctactactttaagaaggtgagcgatgaattcgactgtggcgttgtgttcgaagaggtgcgtgaagacgaggccgtgctgccagtattcgaagagaagatcattgggaaggttgaaaaagttgattag

SEQ ID NO: 22943 - DNA, 309 bp, synthetic construct
  misc_feature 1..309: note = Description of Artificial Sequence: Synthetic coding sequence
  source 1..309: mol_type = other DNA
tgactggaggaggaggagaagcgggccagccgggcccccagcaagcagaggacccggtcccaacgaaaggtgggagggggtagtgcccagccttgtgattctatcgtggtggcatactatttttgcggtgaacctatcccatatcgtaccttggtgagaggcagagcggtaactttgggccaatttaaagaactgttgacaaagaagggatcctaccgccccccctcccacctccggtgctgtctgctcactgcgctgctgacgtctgtcctgcaaatcctactacaggagtccgaaagacgagtctag

SEQ ID NO: 22944 - DNA, 1824 bp, synthetic construct
  misc_feature 1..1824: note = Description of Artificial Sequence: Synthetic coding sequence
  source 1..1824: mol_type = other DNA
atggtgtgcacccggaagaccaagaccctggtgagcacctgcgtgatcctttcgggaatgacgaatatcatttgccttctgtatgttgggtgggtcaccaactatattgcatccgtttatgtgcgcggccaggaaccagctccagataaaaagctcgaggaagacaagggtgacacgctgaaaattattgagcggctggaccatctggagaatgtaatcaagcagcatatccaggaggctccagcaaagccagaagaagccgaagcggagcctttcaccgactcttctctattcgcccattggggacaggaactgtctcccgaaggaaggagagttgccctaaaacagtttcaatattatggttataatgcttacttgtctgacaggcttccattggatcggcctttgcctgacctgcggccatcaggctgcagaaatctgtcttttccagacagtctccctgaagtgtccatcgtgtttatctttgtcaacgaggctcttagcgttctgctgcgtagcatccactccgctatggagcggacccccccacaccttctcaaggaaatcattttggtcgatgacaattccagcaatgaggaactcaaagaaaagctcactgaatacgtagacaaggtcaacagccaaaagcccggattcataaaggtcgtccgtcatagtaagcaggagggtctcataaggagtcgggtgagtggctggcgggcggctactgcacccgtggtggccctcttcgacgcccatgtggaattcaatgttggatgggcagagccagtactgacacgaataaaagagaataggaaaagaattatctctccatctttcgacaacatcaagtacgataactttgaaatcgaggagtatccactcgcagcccagggtttcgactgggagttatggtgcaggtacctgaatccgccaaaagcctggtggaaacttgagaattctactgcgcccatcaggtcgcccgcactgatcggttgttttattgtcgacaggcaatacttccaggagatcggactgttggacgaggggatggaggtctatggaggtgagaatgtggaactcggaatacgtgtctggcagtgcggcgggagtgtggaggtgctcccttgttcacggatagctcacatagagcgcgctcacaaaccttacactgaagatctcaccgctcatgttcgccgcaatgcgctccgggtggcagaggtgtggatggatgagttcaaaagtcacgtttacatggcctggaacatcccgcaggaggactcaggcattgacatcggtgatatcaccgcgcgcaaggcactcaggaaacagcttcagtgtaagacgttccgatggtacctagtgtcagtatatcctgagatgcggatgtatagcgatattatcgcttatggagtcctgcaaaactccttgaagaccgatctgtgcctcgaccaaggtccagataccgaaaacgtgcccataatgtacatttgtcatggcatgaccccacagaatgtgtactatacttcttcccagcagatccatgttggaattctttcacccactgtcgacgacgacgataataggtgtctcgtggacgtgaattcccgcccacgtttgatcgaatgttcatatgcgaaagccaaacgcatgaaacttcactggcagtttagtcaaggggggcccatccaaaaccgaaaatctaaaaggtgtctagaactgcaggagaattctgacctcgagtttggctttcagttggtgctccagaagtgcagtgggcagcactggagcatcaccaacgttctcagatccctagcgtcatag

SEQ ID NO: 22945 - DNA, 1710 bp, synthetic construct
  misc_feature 1..1710: note = Description of Artificial Sequence: Synthetic coding sequence
  source 1..1710: mol_type = other DNA
atgagcacctacagcaccttccccgccggcgtgcccgtgagcgagagatcactggcacgcgccggtttttattatacaggcgtgaatgataaggttaaatgcttttgctgcggacttatgcttgataactggaagttgggggattctcccattcagaaacataagcaactctacccttcctgcagctttattcagaacctcgtatcagcatctctggggagcaccagtaaaaatacctctccaatgcggaactcctttgcccatagcctgtcccctaccctcgaacattctagcctcttttcggggagttattcctctttgtccccaaaccccctcaactcacgcgccgtcgaagatatttctagctctcgcaccaacccatattcatatgccatgtctactgaggaagctcgattcctaacctaccacatgtggcctcttaccttcctgtctccatccgaactcgctagagcaggtttctactatattggcccaggcgaccgcgtagcatgtttcgcatgtgggggtaagctctctaattgggaaccaaaagacgatgccatgagtgagcatcggcgccattttccgaattgcccattcttggagaactcgttagaaacccttcgttttagtatcagcaacctgtcgatgcagacacacgccgctcgcatgcgcactttcatgtactggccttcgtctgtgccggttcagccagagcagcttgctagtgctgggttctattacgtcgggcggaacgacgatgtaaagtgtttctgttgcgacggcggattgaggtgttgggagtccggggacgacccatgggtcgagcacgccaaatggttccctagatgtgaatttctgatcagaatgaagggccaagagttcgtagacgaaatccaaggacggtatccgcatttactcgaacagttgctctctacaagcgatactaccggggaagagaatgccgaccccccaattatccatttcggccctggagaatcctcctctgaagatgcagtgatgatgaacacaccggttgtgaagtcagccctggagatgggatttaatcgcgatctcgtaaagcagactgtgcaatccaagatcttaactaccggcgaaaactacaaaactgtgaatgatatcgtgtccgctctgttaaatgccgaggatgaaaagcgcgaggaggagaaagaaaagcaagctgaggaaatggcgtcagacgacctgtccctaatccgtaaaaaccgcatggcactcttccagcagctcacatgcgttctgcctatactggataatctgctgaaagccaacgtgataaataagcaggagcacgacatcatcaagcagaaaactcagatacctcttcaggcccgtgagctcatcgacacgatcctcgtgaaaggcaacgcagccgccaacatttttaaaaactgccttaaagagatagatagcaccctgtacaagaacttgtttgtggacaagaatatgaagtatatccccactgaagacgtgagcggcttgagtctagaggaacagctgagacggctgcaggaggaacggacttgtaaggtatgcatggacaaagaggtgtccgtagtgttcatcccctgcggccaccttgtggtgtgccaggagtgtgcacccagcctccgcaagtgccccatctgtagaggcattataaagggcaccgtcagaactttcctgtcctag

SEQ ID NO: 22946 - DNA, 1794 bp, synthetic construct
  misc_feature 1..1794: note = Description of Artificial Sequence: Synthetic coding sequence
  source 1..1794: mol_type = other DNA
atggaggacagcaccatcctgagcgactggaccaacagcaacaagcaaaagatgaagtacgatttttcctgcgagctgtaccgaatgtcgacgtattctactttcccagccggcgtgccagtgagcgaacggagtttagcccgagctgggttttactatacaggggtcaatgataaggtcaagtgcttttgctgcggcctgatgttggacaattggaagttgggcgactcacccattcagaagcacaagcaactgtacccatcatgcagctttatccagaatctggtctccgcttctttgggctccacttctaaaaacacatctcccatgcgcaattcattcgcgcattccctgtcacctacgctggaacattcaagtctgtttagtggcagttattcctctctatctcctaacccgctgaattcaagagcagttgaggatatttccagttccagaactaatccctactcctatgcaatgtccacggaggaggcacggttcctgacgtatcacatgtggccactgactttcttgagtccatcagaactggctagggctgggttttactatatcggccctggtgatcgagtggcttgttttgcctgtgggggcaaactatcgaattgggaaccgaaagacgacgccatgtcggagcatcggcgccattttcctaattgccctttcctggaaaacagtttggagactctgcggttctccatttccaatctatctatgcagactcacgcggcaaggatgcgaacttttatgtattggccctcctcagtccccgtgcagccagaacagcttgcatcagccggcttctactacgtgggccggaatgatgatgtgaagtgtttctgctgcgacgggggcctgcgctgttgggaatccggggatgatccttgggtcgagcacgccaagtggttcccacgctgtgaatttttgattcggatgaagggtcaggaatttgtggacgaaattcagggacgatatccccatctcctggagcagttgctttctacttccgatactactggcgaggagaatgccgaccctcctatcatacactttggacctggcgagagtagctcagaggatgcagtaatgatgaacacacctgttgtgaagagcgcattggagatgggctttaatcgtgatctcgtgaaacaaacagtgcagtcgaagatcttgacaacaggcgagaactacaagaccgtaaatgacattgtgtccgccttactgaacgccgaggatgagaaacgtgaagaagaaaaggaaaagcaagccgaagaaatggcctctgatgatctcagtttgatcagaaagaatcggatggccttgttccagcagctcacttgcgtcctgcccatcctagataatttgttaaaggctaatgtcatcaacaagcaagagcacgacatcatcaagcagaaaacccagatcccactgcaggcccgggagctgatcgacacaatactggtcaagggcaacgccgcggctaacattttcaagaattgtcttaaggaaattgattctactctctataaaaacctgttcgtggacaagaacatgaagtatatccctaccgaagatgtctcgggcttgtctctcgaagagcaactcagaagactccaagaggagagaacatgcaaagtctgtatggacaaagaagtcagcgtagtctttatcccctgcggccatttagtggtctgccaagagtgcgccccatctctgagaaagtgtcccatctgtagaggcatcataaaagggacagtcagaacgtttctcagttag

SEQ ID NO: 22947 - DNA, 1605 bp, synthetic construct
  misc_feature 1..1605: note = Description of Artificial Sequence: Synthetic coding sequence
  source 1..1605: mol_type = other DNA
atgcacaagaccgccagccagcggctgttccccggccccagctaccagaacataaagtcgattatggaggattcaacaatcctaagcgactggacaaactccaacaaacagaagatgaagtacgatttttcatgcgaactgtatagaatgtcaacctattcaaccttccctgctggcgtgccggtgtctgagagaagcctggctcgcgcgggattttactataccggtgttaatgacaaagttaaatgtttctgttgtggcttgatgctggacaattggaaattgggtgatagtccaatccaaaagcataaacaactctacccttcatgcagctttatccagaatctagtttccgccagcctcgggtccacatctaaaaatacaagcccgatgaggaactcctttgcccactcgctgagccccacgttagaacactcaagtctgttcagcggctcatactccagtttgtctccaaaccccctaaacagcagggccgtggaagacataagttcatcccggactaatccttattcctacgccatgtcgactgaggaagcccgttttctgacataccacatgtggccactgacatttcttagcccttctgaactggcacgggccggcttttattacattggtcccggggacagagtggcctgctttgcatgtgggggcaaactgagtaattgggagcccaaggatgatgcaatgtctgagcaccggcgccacttcccaaattgccccttccttgagaactccctggagactctgaggtttagcatttctaacctttcgatgcagactcatgctgccaggatgcggaccttcatgtattggccttccagtgttccggtgcagcccgaacagcttgcatcagctggcttctactatgtcggacgcaatgatgacgtgaagtgcttttgttgcgatggcgggctgcgctgctgggagtcaggggacgatccgtgggtcgagcacgctaagtggtttcctcgttgcgagttcctgattagaatgaaggggcaggagtttgttgatgaaatccaggggcgttacccacacctcctcgaacagctgctgtccacatccgacacaactggagaagaaaatgcagaccctccaataatccatttcggcccaggggaatcctcttcagaggatgccgtgatgatgaatactccagtcgttaagagcgcactggagatgggcttcaaccgagatctggtcaaacaaacggtccagtctaaaatcttgaccactggagagaattataagactgttaacgatattgtgtccgcattgcttaacgctgaggatgagaaacgagaagaggagaaggagaaacaggccgaggaaatggcgtccgatgacctgtccctgatcaggaaaaacaggatggctctttttcagcagctcacctgcgtgctgccgatccttgacaacctcctcaaggcaaatgtcattaacaagcaagagcatgacataataaagcaaaagacacagattccactgcaagctcgagaactgattgacactatactcgtcaaaggaaacgcagcagccaacatttttaagaattgcctgaaggtgaagcagcgattttag

SEQ ID NO: 22948 - DNA, 1815 bp, synthetic construct
  misc_feature 1..1815: note = Description of Artificial Sequence: Synthetic coding sequence
  source 1..1815: mol_type = other DNA
atgaacatcgtggagaacagcatcttcctgagcaacctgatgaagagtgcaaacacattcgagctgaaatacgaccttagttgtgagctgtacaggatgtcaacatactcaacatttccagctggggtgccagtatccgagcgaagcttagcccgggccggattttactacacaggcgtcaatgacaaggtgaagtgcttctgctgtggtctcatgttggataactggaaaagaggggattcccccacagagaaacacaagaaactgtatcctagttgtcgattcgtgcaatctctgaactctgtaaataacctcgaagccacctctcaacctactttcccatcctccgtgactaactccacccactcactgctgcccggaaccgagaactccggctattttagaggcagctattctaatagcccttctaacccggtcaattccagagcaaaccaggatttttcagcacttatgcgaagcagttaccactgcgccatgaataacgagaatgccagattgctgacatttcagacatggccgctaacgttcctgtctccaacggatttagcaaaggctggattctattatatcggaccaggagatagggttgcgtgcttcgcatgtggcgggaagctctcaaattgggaacctaaagataacgctatgtccgagcacctccgacacttccctaaatgtccattcatagaaaaccaactccaggatacctcccgttacaccgtttccaacctttctatgcagacccatgccgctaggttcaaaacgttttttaactggccctcttctgttctcgtgaatcctgagcagttggctagcgcagggttttactacgtcgggaatagcgacgatgttaagtgtttctgctgcgacggcggacttagatgttgggagtccggcgacgatccctgggtgcaacacgcgaagtggtttcctcggtgcgagtatctcatccgtatcaaaggacaggagttcattaggcaggtgcaggctagttaccctcacctcctcgagcagctgctctccacatcagattctcccggagacgaaaacgctgaatcctctattatacattttgagcctggggaggaccatagtgaggacgcaatcatgatgaacactccagttattaacgccgccgtggaaatgggctttagccgatccctcgtaaagcagactgtgcagagaaaaattctggctaccggggagaattaccgcctagtgaatgacttggttctggacctgctgaatgcagaagatgaaattagagaagaggaaagagagagggccaccgaagaaaaggagtccaatgatttactcctcatcaggaaaaataggatggcactgttccaacacctgacatgtgtgatcccaatcttggattcattactgacagccgggatcattaatgagcaagagcacgacgtgattaaacaaaaaacccagacttcactgcaggcccgcgagctgatagacaccatcttggtgaagggcaatatagccgcgactgtttttaggaattccttacaggaggccgaggccgttctctatgagcatctgttcgttcagcaggacataaaatacattcccacggaagatgtctccgacctgccagtcgaggagcaactcagacgcctacaggaggagaggacatgcaaagtgtgcatggacaaagaagtgagtattgtcttcatcccatgcggccatctagtagtttgcaaggattgcgccccctccctgagaaagtgccccatatgtagatctaccataaaaggaacggtgcgcacattcctaagttag

SEQ ID NO: 22949 - DNA, 1815 bp, synthetic construct
  misc_feature 1..1815: note = Description of Artificial Sequence: Synthetic coding sequence
  source 1..1815: mol_type = other DNA
atgaacatcgtggagaacagcatcttcctgagcaacctgatgaagagcgccaacacgttcgagctgaagtacgatctatcatgcgagctgtatagaatgagcacatatagcaccttcccagcaggagtgccagtgagcgagagatctctggcccgtgcaggattctattataccggcgtcaacgataaggtcaagtgtttctgctgcgggctcatgctcgacaactggaagcgcggtgactcgcctactgaaaaacataagaagctgtatccctcttgtcgcttcgtgcagtcgcttaactcggtcaataatctggaagcaacttcacagcctacatttcccagcagcgtgaccaactccactcattcactgttacctgggactgaaaactcgggatatttccggggatcatacagcaactctccctcgaatcccgtgaactcacgcgccaaccaagacttctctgcccttatgcggagctcctatcattgcgcgatgaataatgaaaacgcaagactcctaaccttccagacgtggcccttaacgtttctgtccccaacggacctcgcgaaagccgggttttattacatcgggccaggagatcgggtggcctgttttgcctgcggaggcaagctgtcaaattgggaacctaaagataacgccatgtctgagcacctgcgacatttcccaaaatgccctttcatcgagaatcaactgcaggacacgtcccgctatacggtgagtaatctttcaatgcagacccacgcagcacgtttcaagactttcttcaattggccatcctcagtcttagtgaacccagagcagctagcttctgcagggttttattacgtcggcaattccgacgacgtgaaatgtttctgctgcgacggcggactgcgttgctgggagtcaggggacgatccctgggtgcagcacgcaaagtggtttcctaggtgcgaatacctgatccgaatcaagggacaggaatttatccggcaagtgcaggcctcctatccccacctgctcgagcagctgttaagcacctcagactcaccaggtgatgagaatgctgaatcgtcaatcatccacttcgaacccggtgaagaccactctgaggatgccatcatgatgaacaccccagtgatcaatgccgcggtggagatggggttttcccgctccctcgttaagcagacagtgcagagaaaaatacttgctactggtgagaattaccggttagttaatgacctggtcctcgacctgctaaatgccgaagacgagatccgtgaagaggagagggaacgggctacagaggaaaaggagtccaacgatctcctccttattcgaaagaacaggatggcactattccaacacctcacttgtgtcatcccgatactcgacagcctgctaactgccggcatcattaatgagcaggagcacgatgtaatcaagcagaaaacacagacaagccttcaagcgcgagaacttatagatacaatcctggtgaaggggaatattgctgctaccgtgttccgtaatagcctccaggaagcagaggccgtgctgtacgagcacctgtttgtacagcaagatataaagtatattcctacagaagacgtgtcagacctgcccgtcgaggagcagcttaggagattgcaggaagaaaggacatgcaaggtctgtatggacaaagaagtgtcgatcgtgttcattccttgcggacatctcgtggtttgcaaggactgtgctccatctctccgaaaatgccctatctgtcggtctacaattaagggcacggtgaggacattcctgtcctag

SEQ ID NO: 22950 - DNA, 498 bp, synthetic construct
  misc_feature 1..498: note = Description of Artificial Sequence: Synthetic coding sequence
  source 1..498: mol_type = other DNA
atgggcgcccccaccctgccccccgcctggcagcccttcctgaaggatcataggatctctactttcaagaattggcctttcttagagggctgcgcttgcactcccgagcgcatggccgaggctgggttcatccactgccctacagagaatgagcccgatctcgcccagtgttttttttgcttcaaagagctggaaggatgggaacccgatgatgatcctattggtccaggtactgtggcttacgcctgtaatacatctactctaggaggtcgcggaggccggatcacccgggaagagcacaagaagcactcctccgggtgcgcttttctgtcagtcaagaagcagttcgaggagcttacactgggagagttcttaaagctcgaccgagaacgagctaagaacaaaatcgctaaagagacgaataataagaaaaaggagtttgaggagaccgctgagaaagtcaggagggcaatcgagcagctcgccgcaatggattag

SEQ ID NO: 22951 - DNA, 429 bp, synthetic construct
  misc_feature 1..429: note = Description of Artificial Sequence: Synthetic coding sequence
  source 1..429: mol_type = other DNA
atgggcgcccccaccctgccccccgcctggcagcccttcctgaaggatcataggataagtactttcaagaattggccattcctggagggatgtgcatgcactcccgagcgaatggccgaggctggatttattcattgcccaacagaaaatgaacccgacttagctcaatgctttttttgttttaaagagctggaagggtgggaacctgatgacgatcccatcgaggaacacaaaaaacattctagtgggtgcgcattcctctccgttaagaaacagtttgaagagctaactcttggggaattcctcaagctggatcgggagcgcgccaagaacaaaatcgccaaagagaccaataacaagaagaaggagtttgaggagacagcagagaaagtaaggagagctattgagcagcttgccgctatggactag

SEQ ID NO: 22952 - DNA, 414 bp, synthetic construct
  misc_feature 1..414: note = Description of Artificial Sequence: Synthetic coding sequence
  source 1..414: mol_type = other DNA
atgggcgcccccaccctgccccccgcctggcagcccttcctgaaggatcatagaatttcgacatttaaaaattggcctttccttgaggggtgcgcatgtactcccgagagaatggctgaggcgggattcatccattgccccaccgaaaatgagcccgacctcgctcaatgtttcttctgttttaaagaactggaaggttgggaacccgatgatgatcctatgcagagaaagccaactatacgcagaaagaacctgagaaaactaaggcgcaagtgcgccgtgccatcatcaagctggctgccctggatagaagccagcggccgcagctgtctggttcccgaatggctccatcacttccaggggctatttcccggcgcgacaagtctccccgtgggacccctggccatgtcttag

SEQ ID NO: 22953 - DNA, 432 bp, synthetic construct
  misc_feature 1..432: note = Description of Artificial Sequence: Synthetic coding sequence
  source 1..432: mol_type = other DNA
atgggcgcccccaccctgccccccgcctggcagcccttcctgaaggaccaccgaatatccacattcaaaaattggccattcctggaagggtgcgcatgcacccctgaaaggatggccgaagcaggattcattcattgccccactgagaacgagcccgacctggcccagtgtttcttttgcttcaaagagctcgagggctgggagccagatgacgatccgatcggccctggtaccgtggcctacgcctgcaacacgtccacactgggtgggagaggtgggcgcataacccgcgaagagcacaagaaacattcgtcagggtgcgccttcttgagcgtcaagaagcaattcgaagagcttacactgggcgagttccttaaacttgatcgggagcgggcgaagaataagatcgagagggcacttctggcagagtag

SEQ ID NO: 22954 - DNA, 14574 bp, synthetic construct
  misc_feature 1..14574: note = Description of Artificial Sequence: Synthetic coding sequence
  source 1..14574: mol_type = other DNA
atggtgaccggcggcggcgccgccccccccggcaccgtgaccgagcctctcccatccgtcatcgtgttgagcgccgggcgaaaaatggctgccgccgcagccgccgcctcgggtccaggatgttcctcagccgctggcgctggcgctgccggggtgtcagagtggctggtcctgcgcgatggctgcatgcactgcgacgctgacggactacattctctgtcctaccaccctgccttaaatgcgattttagcagtgactagtagaggaactatcaaagtgatcgacggcacatccggcgcaaccttgcaggcatcagctctctccgcaaagcctgggggacaggtgaagtgtcaatatatttcagccgtggacaaagtgatcttcgttgatgactacgctgtgggatgccgaaaagatctgaacggaatcctgctcctcgatactgctttgcagacgccagtgagtaaacaggatgatgtggtgcagttagagctacccgtgaccgaggcccagcagttgctttccgcctgcctggagaaagtggatatttcatccacggaaggttatgacctctttataactcaattaaaggatggcctgaagaacacatctcatgagacagcagcgaaccataaagtcgcaaaatgggctaccgtcacattccatttgccccatcacgtgctgaagagcattgcatcggcaattgtcaatgaactcaagaagattaatcaaaatgtcgccgccttaccagtagccagctccgtgatggatcgtttgagttacctgctaccaagcgcccgacccgagctcggagtgggaccaggccggagcgtcgataggtccctgatgtacagtgaagccaatcggcgtgaaactttcacatcctggccacacgtggggtacaggtgggcccagcctgaccctatggcccaggcgggtttctatcaccagcccgcatcaagcggcgatgatcgggcaatgtgcttcacctgctccgtttgcctcgtttgttgggaacctaccgatgaaccatggtcagaacatgaacgtcacagtcccaattgtccctttgtgaaaggggagcacacgcagaatgtccctctatctgttactctggcaacctcccctgcgcagtttccatgtaccgacgggactgaccggatttcatgctttggttccggcagctgcccacacttcttagctgctgcaacaaaacgaggcaaaatttgtatttgggacgtgtctaagctgatgaaggtgcacctgaaatttgagattaatgcctatgatcctgcaattgtgcaacagttgatattaagcggggacccaagctctggagttgattcgcggagaccgactctggcttggctcgaggatagcagctcctgctctgatatcccaaaacttgaaggggatagtgacgatttgttggaagacagcgatagcgaggaacactcgaggtctgattccgttaccggtcacactagccagaaggaagctatggaggtttctcttgacatcaccgctctgagcatcttgcagcagcccgaaaagctgcagtgggagattgtggctaatgtgcttgaagataccgtgaaggacctggaagaactcggggcaaatccttgtctcactaattccaagtccgagaagacaaaggagaagcaccaggaacaacataatatccctttcccctgcctcctcgctggcggactcctcacatacaaatcccctgcgacatcaccaataagttctaacagccatcggagcttagacggactgagtaggactcagggagaatccatttcagagcagggcagtaccgataacgagtcctgtaccaacagtgagctaaactctccactggtaagaagaacactccccgtgcttctcctctatagcatcaaagaatctgacgaaaaggccggcaagattttctcacagatgaataatattatgtctaagagtctccatgatgacgggtttaccgtcccccaaatcatagagatggagctggattctcaggaacagctgctgctccaagaccctcctgttacctacatccagcaatttgctgatgctgccgccaacctcacttcccccgatagcgagaaatggaatagcgtgtttcctaagcccggcacgctcgtgcagtgtttacggctacccaagttcgccgaggaagagaacttgtgtatcgacagcataaccccatgcgccgacggaatccacctgctggtgggtctccgcacttgtccagtggagagcttatcagccatcaatcaggtggaggccctaaacaacttgaataaacttaacagcgccctgtgtaatagaagaaaaggagaactcgaaagcaatctcgcagtcgtcaacggagccaacatcagcgttattcaacatgaaagtcccgctgatgttcagacacctctgatcatccagcctgaacagcgtaatgtgtctggcggctacctggtgctctacaaaatgaattacgcaacgcggattgtgacactggaagaagagcctatcaaaattcagcatatcaaagacccgcaggacactatcacaagcttaattttgctgcctcccgacattctcgataatcgcgaagacgactgcgaagagcccatcgaagacatgcaactgacatccaaaaatggcttcgaaagggagaagacatcagacataagcaccttggggcacctggtgattacaacacagggtggctatgtgaagattctcgacctgtccaactttgagatcctggctaaggtggagccacccaagaaggagggtacagaggagcaagacacatttgtatccgtgatctattgctccggcacagacagactgtgtgcctgcacgaaaggtggagagctgcattttctgcagattggcggcacctgtgacgacattgacgaggccgacatcttagtggacgggtcgttatctaagggaatcgagccctcttcagagggaagcaaaccgctgtcaaatccgtcttcacccggcatatccggtgtggacttacttgttgatcagccgttcacgttagaaattctgacaagcttggtcgagttgactaggttcgagacgcttacacctaggtttagcgctaccgttcctccttgctgggtggaggttcagcaggaacaacagcaacgacggcaccctcagcacctgcatcagcagcaccacggcgatgctgcacagcatactaggacctggaaactccagacggattccaatagttgggacgaacacgtcttcgaacttgtgctccccaaggcgtgcatggtcgggcatgttgatttcaaatttgtgttaaactcaaacattacaaacattccccagatccaagtcactctactgaagaataaggccccgggtctgggcaaggtaaatgcgttgaacattgaggtggagcagaacggtaagcccagccttgtggacttgaacgaggaaatgcaacacatggacgtagaagagagccagtgcctgcgtctatgccccttcctggaggaccacaaggaagacatcctgtgcggtcccgtatggttagcaagcggcttagacctgagcggccacgctggcatgctgacccttactagtccaaagctcgtgaaaggcatggctggtgggaagtaccggtcttttttgattcacgtgaaggcggtcaatgaaagaggcaccgaggagatatgcaatggagggatgcggccagttgtcagactgccttcactcaaacaccagtcaaataagggctactccctggccagcttgctggctaaagtggcggctggaaaggaaaagtcaagtaacgttaagaatgagaacacttctggaacccgaaagagtgagaatctgcgcggatgcgatctgctacaggaggtgtccgtgacaattcgacgatttaagaaaacgtccatctctaaggagagagtccagagatgcgctatgctccagttcagtgagtttcacgagaagctggttaataccttgtgtcgaaaaacagacgacggccagattacagagcatgcccaaagtttagtgctggataccctgtgttggctggctggagttcactctaacggccccggaagctcgaaagaggggaacgaaaacttactctccaagactaggaaattcctgtcagacattgtgagagtttgctttttcgaggccggacgatccatcgcacacaagtgcgcacgattcctggcgttatgcataagtaacgggaagtgcgatccttgccagccagccttcgggcctgtgctactgaaggctctgcttgataacatgagttttctcccagctgcgacaactggaggcagcgtgtactggtattttgttctgttgaattacgttaaagacgaggaccttgccggctgctctaccgcatgcgcctcgctgctcacagccgttagccgccaactccaagacagactgactccaatggaggctcttctccagacccgttacggactatacagttctccttttgatccagtgctattcgacctagagatgagcgggtcaagctgcaagaatgtttacaatagtagtatcggagttcagagtgatgagatcgacttgtcagacgttctgtcaggcaacgggaaggtgagttcgtgtaccgcagcagaaggctcttttaccagtctgacaggcctgctggaagtggagcctttgcacttcacctgcgtgtccacgtccgatggtacacgcattgaacgggatgatgccatgtcaagctttggagtaacccccgctgtcggcggcctgtccagtggtaccgtgggggaggcctctactgcgctcagttctgccgcacaagtggctctgcagtccctgtctcatgcaatggcctcagccgaacagcagctccaagtcctccaagaaaagcagcagcaacttctgaaattgcagcagcagaaagctaagctggaggcgaagcttcatcaaaccactgccgccgctgccgcagccgcctccgccgtcgggcccgtccacaactccgtcccctctaacccagtggcagcccccggcttcttcattcatccaagcgatgtcatccctcctacaccaaaaaccacccccctgtttatgacccctccgctcacccctccgaatgaggcagtctcagtcgtcattaatgcagagttagcccagcttttcccagggagtgtaattgacccgcctgcagtcaatttagcggctcataacaaaaatagtaacaagagtaggatgaaccctctggggtctggactggcactagctatcagccacgcctcgcattttctacagccccctccacaccaatcgatcatcattgaacgcatgcatagtggggctcgcaggtttgtgactttggacttcggcaggcctatcttgttgacagatgtgctgatacccacatgcggagatctcgcctccttaagtatcgatatttggaccctcggcgaagaggtggacggacgccggctcgtcgtggccactgacattagcacccatagtctgatcctgcatgatctcattccccctcctgtctgtcggtttatgaagatcactgtcattggccggtacgggagcacaaacgctcgagccaagataccgctcggtttctattatgggcacacatatatcctgccctgggagtctgaattgaagttgatgcacgacccacttaaaggagagggcgaatcagccaaccagcctgagattgatcagcatctggctatgatggtagcactgcaagaagacatacagtgtcggtataacttggcatgccatcgccttgagactctcttgcagtccatcgacctgccaccattaaactctgcgaacaatgctcagtatttcctccgtaagcccgacaaagcagtagaggaagatagtcgggtgtttagcgcttaccaagattgcattcagctgcagctgcagttgaatctcgcccataacgcagtccaaagacttaaggtcgccctgggtgcatctcgtaagatgctgagcgagacgagcaaccctgaggatctcattcaaacgtcctccaccgaacagctccgcacgataatacgctacttactggatactctcctctccctgctccatgcatccaacggccactcagtccctgccgtcctgcagtccacctttcacgctcaggcctgcgaggagttattcaaacacctctgtatcagcgggactccgaaaatccgcttgcatactggactgctgttggtgcagctatgcggaggcgaacgatggtggggccagttcctatcaaacgtgctacaagagctctataacagcgagcagctgttgatctttcctcaggatagagtgttcatgctactatcttgtataggccagaggagcctgtcgaatagcggtgttcttgagagtctcttgaacctcctggataatctgttgagccctctgcagcctcagttacctatgcacaggaggactgagggcgtgctggatatacccatgatttcatgggtagttatgctggtgtcgcggctcctggactacgtggccactgttgaggacgaggcagctgcagccaaaaaacctctgaacggtaatcaatggtccttcatcaacaacaatctgcacacacagagcctcaaccgcagcagtaaagggtcatctagtctggatcgtctatatagccgcaaaataaggaaacaattggtgcaccacaaacagcagctgaacctgctgaaggccaagcagaaggcacttgtggaacaaatggagaaggaaaaaatccagagcaacaaaggcagcagctataaactgctggtggagcaggctaagctcaaacaggctacctccaagcactttaaggacctcatccgtctgcggcgaactgcagagtggagccgatcaaatctggacacagaggtgacaacagccaaggaaagtcctgaaattgagccattgcccttcaccctggcccacgaaaggtgtatttcagtggtccagaaacttgtgcttttcttactgtccatggacttcacatgccacgcggacctgctgcttttcgtctgcaaagtgctggcacgaattgcgaatgccaccaggccgactatccatttatgtgaaattgtgaacgaaccccaattggaaaggctgctgttgctgctggtggggaccgatttcaaccgaggcgacatcagttggggcggcgcctgggcacagtacagcttaacatgtatgttacaggacattctggctggagagctgcttgctccagtcgcggctgaggccatggaggaagggacagtgggggacgatgtcggagctacggccggagatagcgacgactctctgcagcagagcagtgttcagctgctggaaaccatcgatgagcccttgacccacgacatcactggcgctccaccattgagcagtctggaaaaggataaagagattgacctggaactgctgcaggacctcatggaagtggatatcgacccacttgacatcgacctcgaaaaagaccccctggctgctaaagtgttcaagcccatttcatccacctggtacgactattggggcgctgattatggcacttataactacaatccgtacatcgggggcctcgggatacccgtcgcaaagccaccagcgaacacagagaaaaatggatcccaaacagtgagcgtgtccgtttcacaggcgctcgacgcccgcctggaggtgggcctcgaacagcaggcagaactgatgttgaagatgatgtcaaccctggaagccgacagcatcctgcaggcacttaccaacacaagcccgaccctgtcgcagagccctacaggcaccgacgactcgctcctcgggggactacaagccgcaaatcagacatcccagctcatcattcagcttagttcagtgcccatgctcaacgtttgttttaataagctgtttagtatgctccaggtgcatcacgtgcaattagaaagcctgctccagttgtggttgacactgtctctcaattcgtcatcaactggcaacaaagagaatggagccgatatcttcctgtataacgccaataggatccccgtgatctccctgaatcaggcctcaataacctcttttctaacagtcctcgcatggtatcccaacactctcctcaggacttggtgtctagttctgcattctctgaccctgatgactaacatgcagctgaactcggggagcagtagtgccatcgggacacaggagtccactgcgcacctgctcgtgtctgaccctaacttgatccatgtacttgtgaaattcctttcaggcacgagcccacatggaacaaatcagcacagtcctcaggttggccccactgctacacaggccatgcaggaattcttgaccagactgcaggtacacctgtcctccacatgccctcagatatttagcgagttcttgctcaagctcattcacattctcagcaccgagcgaggcgccttccaaaccggacagggtccgctagacgctcaggtgaagctgctggagtttaccttagagcagaacttcgaggtggtgagtgtgtccaccatctccgcagttatcgaatctgtgaccttcctcgtacatcactatattacctgctctgacaaagtgatgtctcgatctggctctgactcatccgtcggtgctagggcgtgtttcggcggtttgtttgccaacctgatcagacctggtgatgccaaagccgtgtgcggggagatgactcgagatcagctcatgttcgatctcttgaagctagtgaatatactcgtgcagctgcccttgtctggtaatcgagagtattcagccagggttagcgtcacaaccaatacaaccgactcagtttcagatgaggaaaaggtgtccggaggaaaggatggaaatggatccagcacgagcgtgcaggggtccccagcttacgtggccgacctggtgctagccaatcagcaaatcatgtctcaaatcctctctgctcttggactgtgtaactcaagcgccatggctatgatcatcggagcaagcggtctgcacctcacaaagcacgagaattttcacggtggtctagatgctatttctgtgggtgacgggctattcaccattcttactacactgagcaagaaggcttccaccgtccacatgatgctccaaccaatactgacttacatggcttgtgggtatatggggcgacagggcagtcttgccacctgccagctttccgaacctcttctctggttcattctaagggttttggatacatcagacgccctaaaagcattccatgatatgggtggcgtccagcttatctgcaacaacatggtcactagcactagggccatagttaacactgcccggagcatggtttccactattatgaagttcctggatagtgggcctaacaaagcagtggattcgactctcaaaactcgaatcttggcttctgaacccgataacgccgagggcattcacaacttcgctcctctaggcaccataacttcctcctccccaacggcccagccagccgaagtcctcctccaggcaacgccaccacatagacgggcccgctcagcggcgtggtcatatatcttcctgcccgaggaagcttggtgcgatctgacaatccacctgcctgctgccgtgctactgaaagagattcacattcagccccatctggcctctctcgcaacatgtccatctagcgtctcggtagaagtatcagccgacggagtaaatatgctgcccttatccactccagtagtcacctccggtctcacttatattaaaatccaacttgtcaaagcggaggttgcaagtgcagtctgtctccgattgcaccgccccagagacgctagcacactggggctgtcacaaataaagttactcgggttgacagctttcggcactacctcatcagccactgtgaacaacccctttctgcccagtgaagatcaggtgtctaaaacctccatcggctggctgcggctgttacatcactgtctgactcatatctcggacctcgaaggtatgatggctagcgccgcggccccgaccgccaacctactacagacttgcgccgccctgctgatgtctccatattgtggaatgcactcacccaacatcgaagtggtcctggtcaaaatcggattgcaaagtacccggattggccttaagctcattgatattctgctgcggaactgtgccgcgtccggttccgatccaactgaccttaattcaccacttctgtttggccgcctgaatggcctgagttccgactctacaatcgacattctgtatcagctcggcaccacccaggaccctggcactaaggacaggattcaggctctgctgaaatgggtcagcgactcagccagggtggccgctatgaaaaggtcaggcagaatgaactatatgtgtcctaattcgtccactgttgaatatggcctactgatgccgtcgccgtcccatctgcattgcgtagccgccattttatggcattcctatgaacttctcgtcgagtatgacctcccagcacttctggatcaggagctttttgagctgctgtttaactggtccatgagcctcccctgcaacatggtgctgaaaaaggcagtggactctctcctctgctccatgtgccacgtgcatcctaactacttctctctgcttatgggatggatgggaatcaccccgccccccgtgcagtgtcaccatcgcttatccatgaccgacgactctaaaaaacaggatctctcatcttccctcactgatgactctaaaaatgctcaagcgcctctggctctgactgagtcccaccttgcaacactggcttcgtcgtcacagagccccgaagcgattaaacaactgctcgatagcgggctgccatctttgcttgtgaggtccctggcttctttctgcttcagccacattagcagctccgagagcatcgctcagagcattgatatttctcaagataagctgcgccggcatcacgttccacagcagtgcaataaaatgccgatcacggccgatctggtagcgccaatactgcgtttcctcactgaggtggggaattcacacatcatgaaggattggctgggaggctcggaggttaaccctctctggacagccttgctcttcttgctgtgccactctggttcaacctcagggagtcataacttgggcgcacagcagacttctgcccgatccgctagtcttagctccgccgcaacgacaggcttgaccactcagcagcgcacagccatcgagaacgcgaccgtggcattttttctgcagtgcatctcttgccaccctaacaaccagaagctgatggcccaggtcctgtgtgaattgtttcagacctccccccagcgagggaacctcccaacctccgggaacatttctggcttcataaggagactgttcttacaacttatgctggaagacgagaaggtaactatgttcctgcagtcaccatgcccactgtataagggtaggatcaacgctacctcacacgtaatccaacaccctatgtatggtgctgggcacaaatttcgaaccctgcatctgccggtgtcaacgactctatccgacgtgctagatcgcgtgtccgacacgccaagcattactgccaagctgatttccgagcagaaggacgacaaggagaagaagaaccatgaagagaaggaaaaggtcaaggcggaaaacggatttcaggataactacagcgtggttgtcgcaagcggtctgaagagccagagcaaacgcgccgtctcagccactcctccgcggcctccgagcaggagggggcggacaattcccgacaaaatcggctccacaagtggcgcagaggcggctaataaaatcatcaccgtccccgtttttcaccttttccacaagctcctcgccggccaacctttgcccgccgagatgactctcgcccagctgctaactctcctgtacgacaggaagttacctcaaggctaccgatccatcgacctgaccgtgaaattaggcagcagggtcattacagaccctagcctgtccaaaacagatagctacaaaagactgcaccctgagaaagatcacggcgatctcttggcttcatgtcctgaggacgaggccctaacccccggtgatgaatgcatggatggcattctcgacgaatctctcctggagacttgtcctattcagtcgcccctccaggtcttcgcggggatgggtgggttggccctaatcgctgagagactgccaatgttgtaccctgaggtgatccagcaggtctccgcccctgtggtgacctccaccacccaggagaagcctaaggacagcgaccagttcgaatgggttactattgagcagtcaggagagctcgtttatgaggcccctgagaccgtcgctgctgagcccccacccattaagagcgctgttcaaacaatgagccccatccctgctcattccctagccgctttcgggttgtttctgcgcttacctggctacgcagaggtcctgctcaaggaacggaaacacgcacagtgcctgctgcgacttgttctcggcgtgactgatgacggtgagggctcacacatcctccagtcacctagcgccaacgtcctccctaccttgccgttccatgtcctgaggtctctgttctccacaactcccctcaccacagatgatggcgtccttctgaggcgcatggctctggagatcggagcgctccacctgatactggtgtgcctgtctgctctctcccaccattcgccgagggtccccaacagtagcgttaatcagacagaaccccaggttagctcttcacataaccccacttctacagaggagcagcagttatactgggccaagggtactggttttgggactggctccacagcgagtggctgggatgttgagcaggccctgacaaagcaacgccttgaagaggagcatgtcacatgcctgctgcaggtgcttgcctcttacatcaatccagtgagcagcgctgtgaatggggaggcacaaagttcacatgaaactcgcggacaaaatagcaatgccctaccaagtgtgctgctggagctcttaagtcaatcatgtctgatccccgctatgagtagttatctgagaaatgacagcgtgctcgacatggccagacacgtccccctctaccgggccttgctcgaactgctccgcgccattgcctcctgcgccgctatggttcccttactgctgcctctgtctactgagaacggagaggaggaggaagaacagagtgagtgccagactagtgtgggtacactgttggctaagatgaagacctgtgtggacacctataccaaccgcctgaggtccaagagagagaatgtcaagaccggagtcaaacctgatgcctctgaccaggagcccgagggcctgactttgttagtccctgacattcagaagaccgccgagatagtctacgccgctactacgagtctgcggcaggcaaaccaggagaagaaactcggagagtattccaaaaaggctgctatgaaaccaaagccactcagcgttctgaaatccctggaggagaagtatgtggcagtgatgaagaagctgcagtttgacacattcgagatggttagcgaggatgaagatgggaagttgggcttcaaggtcaattaccactacatgagtcaggttaaaaatgctaacgacgctaactcggccgcgagggctagacggctggctcaggaagctgtgactcttagtactagtcttcctctgtcttcgtcaagctctgtattcgtgagatgcgatgaggagcgcctggatataatgaaggtgctcatcaccgggcctgccgacaccccctatgccaatgggtgctttgaattcgacgtctatttcccacaggactacccctcttccccccctcttgtaaacctggagaccaccggcggccactctgtgcgattcaatcccaatctgtacaacgacggcaaagtgtgtctctccatcctcaatacatggcacggcagacctgaagaaaaatggaaccctcagacatcatccttcctacaggtgctcgtaagtgtgcagtccctgatactggtcgccgagccttattttaatgaacctggatatgagagatctagagggaccccctctggaacacagagctccagagaatatgacggaaacattagacaggcgactgtgaagtgggcaatgctggagcagatccggaacccttctccctgctttaaagaggtgatacataaacacttctacctcaaacgcgtggagattatggcccagtgtgaggagtggatcgccgacattcagcagtattcatccgataagcgagtagggcggacgatgtctcatcatgccgccgccttgaaacgtcatacggctcagctacgcgaagaacttctgaaactcccctgccccgaaggcctcgatccagacaccgacgacgcacccgaggtgtgccgtgccactaccggtgctgaagaaaccctgatgcacgatcaggtgaaaccctcctctagtaaggagctcccctcagattttcagctgtag

SEQ ID NO: 22955 - DNA, 1566 bp, synthetic construct
  misc_feature 1..1566: note = Description of Artificial Sequence: Synthetic coding sequence
  source 1..1566: mol_type = other DNA
atgagcctgagccggagcgaggagatgcaccggctgaccgagaacgtctacaagactataatggaacagttcaatccatccctccgcaatttcatagccatgggcaagaattatgagaaggcccttgctggagtcacctatgccgcgaagggttacttcgatgccctagtaaaaatgggcgagctagcatctgaatcacagggctctaaagagcttggagatgtactgttccaaatggctgaagtgcatcgtcagatacagaaccaactcgaggaaatgctcaagtcgtttcataacgagctcctcactcagctggagcagaaagtcgagcttgattctcggtatctctctgccgctcttaaaaagtatcaaactgagcagcgcagtaagggcgatgccctggacaaatgtcaggctgaactcaagaagttgcggaagaagtcccagggctcaaaaaacccccagaagtacagcgataaggagctgcagtacattgatgccatcagtaacaaacagggcgagttggagaactacgtgtcagatggttataagaccgccctaaccgaggaacgacggcgattctgtttcctggtggagaagcagtgcgccgttgccaagaatagtgccgcataccattcgaaaggaaaagagctgttagcccaaaagctgcccctgtggcaacaggcgtgcgccgatccgagcaaaatccccgagcgggcggtccagctcatgcagcaggtggcatccaacggcgccacattaccaagcgccctctctgccagtaagagcaacttagttatttctgacccaattcccggagcaaagcctctacccgtgccccccgagctcgccccatttgtcggacggatgtctgcacaggagagtacacctatcatgaatggcgtcacaggaccggacggggaagactacagcccctgggctgaccgtaaggccgcccaacccaagtccctctcccccccacagagccagtccaagctgtcggattcctactctaacaccttacctgtgcgcaaatccgttacaccaaagaatagctatgcaacaacagagaacaagacactaccccgcagcagctcaatggcagcgggtttggagcgcaacgggcggatgcgggtgaaggccatcttcagtcatgctgcgggagataattctactctacttagctttaaggaaggagatcttatcactctgttggtgcccgaggctcgagacgggtggcattatggggaaagcgaaaagacaaagatgaggggttggtttcctttcagctacacaagggttttggatagcgacggatccgatcgtcttcatatgtccctgcaacaaggcaagtcatcaagcacggggaatctcctcgataaagatgatctggccataccacccccagactacggagccgcctcaagggcttttcccgcgcagacagccagcgggttcaaacagagaccatacagcgtcgccgtccccgccttctcacagggtttggacgattatggggcccgctctatgagctctggttcaggaacgttggttagcaccgtctag

SEQ ID NO: 22956 - DNA, 1659 bp, synthetic construct
  misc_feature 1..1659: note = Description of Artificial Sequence: Synthetic coding sequence
  source 1..1659: mol_type = other DNA
atgagcctgagccggagcgaggagatgcaccggctgaccgagaacgtttataagaccatcatggaacagtttaacccttctctccggaattttatcgctatggggaagaattacgagaaggctctcgctggtgtcacttatgctgctaagggatactttgatgccctagtcaaaatgggagagctcgcgtctgaatcccagggcagcaaggagctcggagatgtcctcttccaaatggctgaggtgcataggcaaatccagaaccaactggaagagatgttaaagagcttccacaatgagctccttacccaactggagcagaaggtggagctcgacagtagatacctcagcgccgccctgaaaaaataccaaacagagcagcgctcaaagggagacgctcttgacaagtgccaggcggagctgaaaaagcttcgtaaaaagtcccagggctccaagaatcctcaaaaatattccgacaaagaactccagtacatcgatgcaatcagtaataagcagggcgagctggagaattacgtgtctgacgggtataaaacggcattgacggaagaacgccgccgtttctgctttttggtggagaaacagtgcgccgtggccaaaaattccgctgcctatcactctaaaggcaaggaattactggcccagaaactcccattgtggcagcaggcctgcgccgaccccagtaaaatccccgagcgcgccgtacagcttatgcagcaggtggccagcaacggagccacacttccttccgctctgtctgcgagcaaatccaatctggtgatttccgatccaatccctggcgccaagcccctgccagtacctcctgaactggcaccctttgtggggaggatgtctgctcaggagagcactccgattatgaatggtgtgacaggccctgatggagaagattactccccttgggccgatcggaaggccgcacaacctaagtcattaagcccgccacagtcacagagtaaactcagcgactcatatagcaacacattacctgttcgtaaaagcgtgacccctaagaacagctacgcgaccactgagaataagaccctgcccagatcttccagcatggcagcgggattggagcggaacggacgaatgcgtgtcaaggctatattttcccacgcggcaggtgacaactctacgttgttgtcttttaaagagggggatttaataactctgcttgtcccagaggcccgcgacgggtggcactacggagagtccgagaagaccaagatgaggggttggtttccgtttagctatactagagtcctcgactccgatggaagtgaccgactacatatgtcacttcagcaggggaagagttctagtaccggcaaccttctggacaaggatgatctcgcaattccacccccagactacggagctgccagccgggcttttcccgctcaaactgccagtggtttcaaacagagaccgtattctgtcgccgttccggctttctcccaaggcctcgacgactatggagcaagatctatgtctagaaacccgtttgcccacgtccagctgaaacccacagtgaccaacgatcgatgcgatctgagcgctcagggccccgaagggcgtgaacatggggatgggagtgcgcggactcttgctgggaggtag

SEQ ID NO: 22957 - DNA, 1371 bp, synthetic construct
  misc_feature 1..1371: note = Description of Artificial Sequence: Synthetic coding sequence
  source 1..1371: mol_type = other DNA
atggccgaggtgcaccggcagatccagaaccagctggaggagatgctaaaatcctttcacaacgagcttctgactcaactggagcagaaagtcgaactggacagtcgctacctgtccgctgccctaaagaagtatcagactgagcagagatccaaaggtgatgctctagataagtgccaggccgaactcaagaagctgcggaagaaatcccaggggagcaagaacccccagaagtacagcgataaggagttacaatatatcgacgcaatctctaataagcagggggagttggaaaactatgtttcagacgggtataaaacagctctgaccgaagaacgccggcgcttctgtttcctggtcgaaaaacaatgtgctgtcgccaagaatagcgcagcctaccactctaaaggcaaagagctgctggcccagaagctgcctctgtggcaacaagcttgtgccgatccgtcaaagattccagagagagccgttcaactgatgcaacaggtggcctcaaacggcgcaactctcccctctgccctgtccgcctctaagagcaatctcgtgatctctgaccctatccccggcgctaagccgctcccagtgccacctgagctggctccctttgttggccggatgtctgctcaggagtcgactccgatcatgaacggagttactgggccggatggcgaggactactctccttgggccgatcgcaaggcggcacaaccaaagagtctgagcccaccccaatcccaatccaagcttagcgactcttactctaacacgctacctgtcagaaagtcagtcacccccaagaacagctatgccacaaccgagaataagacactgccgaggtcaagctctatggccgcaggcctggagcgcaatggcaggatgcgcgtcaaagccattttctctcacgcggccggagataactcaactttactcagctttaaagagggagatctgattacgctgctcgtccccgaggcacgagatggctggcattatggtgaaagtgaaaagaccaagatgcgcggctggtttccattctcctacacacgcgtcctagattcagacggcagtgataggcttcacatgtctcttcagcagggtaagagctcctcaaccgggaacttacttgataaggatgacttagcaatccctcctccagactacggtgccgcttcacgggcctttccagcccagacagcctctggtttcaagcagaggccctactctgtcgcagtacctgccttcagccagggactcgacgactatggggcccggtcgatgagtagaaatccttttgcacacgtgcaactgaagcctactgtgacgaacgaccggagtgctccactgctatcgtag

SEQ ID NO: 22958 - DNA, 1128 bp, synthetic construct
  misc_feature 1..1128: note = Description of Artificial Sequence: Synthetic coding sequence
  source 1..1128: mol_type = other DNA
atgctgctgcccgagggccagcggcagcgggccctgggcttcggcacggttaccagcacctattcccctgttgggcaatatattgacgctatctcgaacaagcagggggaactcgagaactacgttagtgacgggtacaagactgccctgacggaggagcggcgcagattttgtttcttagtagagaaacagtgtgctgtagctaaaaattccgcggcttaccactctaaaggcaaggaattgcttgcgcagaaactacctctctggcagcaggcgtgcgctgacccatctaaaattcccgagagggccgtgcagcttatgcaacaggtggcctccaacggggccacacttccttccgccctttccgcttccaaatctaaccttgttatttccgatcccatacccggagcaaaacccctgcccgtcccccctgaacttgcacccttcgtggggcgcatgtcagcccaggagtctacgccaattatgaatggcgtgacaggcccagacggcgaagactactctccgtgggccgatcggaaggccgcgcaacctaagagtctgagtccaccccaaagtcagagtaagcttagtgacagctactcaaacacgcttcccgttcgaaagagtgttactcctaaaaatagttatgctaccactgagaacaagacgctgccacgcagcagctctatggccgccgggttagagcggaacggtagaatgcgggtgaaggcgatcttctcccacgccgcaggggataatagcaccctgctgtcttttaaggaaggggaccttattacactgctggtcccagaggcacgggatgggtggcattacggtgaatccgaaaagactaaaatgagagggtggtttcctttttcctacacccgagtgctggacagcgatggcagtgatcggttacacatgagcctgcagcaaggaaagtcctcttcaactgggaatctgctggacaaggacgatcttgccatcccacctcctgattatggagcggccagtagagccttccccgcccagacggcaagcggcttcaagcagcgcccatatagcgttgccgtccctgcgtttagccaaggtctcgacgattacggggccaggtccatgtcacggtag

SEQ ID NO: 22959 - DNA, 1605 bp, synthetic construct
  misc_feature 1..1605: note = Description of Artificial Sequence: Synthetic coding sequence
  source 1..1605: mol_type = other DNA
atgagcctgagccggagcgaggagatgcaccggctgaccgagaacgtgtataaaactattatggagcaatttaacccctccctcagaaacttcatcgcaatgggaaagaactatgagaaagctctagcaggcgtgacctacgcggccaaggggtacttcgatgccttggtcaaaatgggagagctggccagcgaatcgcagggaagcaaggagctgggggatgtcttatttcaaatggccgaggttcaccgccagatccaaaatcaattagaggaaatgctgaaaagctttcataacgagctgctgacacagttagagcagaaagtggaactcgactccagatatttatccgctgcactgaagaaataccaaacagaacagaggtctaagggtgacgccctggacaaatgccaggccgagttaaaaaaactgcgcaagaaaagccagggttcgaaaaatccccagaaatattcagataaagaattacagtacattgatgctatcagcaacaagcagggcgagctggagaactacgtgtccgatgggtacaagaccgcattaactgaagaacgccgacggttctgttttcttgtagagaaacagtgtgccgtcgccaagaactcagctgcttaccattccaaaggaaaggagctgctcgcacaaaagctacccctgtggcaacaggcctgtgcagatccaagcaaaattcccgaaagggcagtgcagcttatgcagcaggtggctagcaacggagccacccttccatccgcactgagcgcctcaaagagtaatcttgtcatctccgaccccatcccaggcgctaaaccgttacccgtgcctcctgaattggcaccattcgtgggcagaatgtcagcgcaggagtccacaccaatcatgaatggtgtcacaggtcctgatggagaagactactctccctgggccgatcggaaagccgcccagccaaaatctctgtccccgcctcagagtcagagtaaacttagcgatagttattctaacactcttcccgtgcggaaaagtgtgacccctaagaattcatacgccaccaccgagaataagacacttccccgtagttctagcatggcagcgggccttgagaggaacggacgcatgcgggtgaaggcaatcttttcccacgccgccggggataatagcaccctcctcagctttaaggaaggggatctgattactctcctggtcccggaggcccgtgatggttggcattacggggagtccgagaaaacgaaaatgagaggctggtttcctttcagctacacgcgggtgcttgacagcgacggtagtgaccgcctgcatatgagtctccagcagggcaaatctagcagtacagggaacctgttggacaaggatgatttggccatcccaccccctgactacggcgccgcttcacgggcttttcccgctcagacggcgtctggcttcaagcaaaggccttattccgtagcggtcccggccttcagtcaggggctggatgactacggggcgagaagtatgagtagaaatccattcgcccatgtgcagctaaaacccaccgtaacgaacgaccgttctgcgccactcctctcgtag

SEQ ID NO: 22960 - DNA, 1563 bp, synthetic construct
  misc_feature 1..1563: note = Description of Artificial Sequence: Synthetic coding sequence
  source 1..1563: mol_type = other DNA
atgagcctgagccggagcgaggagatgcaccggctgaccgagaacgtctacaaaactattatggagcaatttaatccgtccctgaggaactttatcgccatggggaagaactacgaaaaagccctggcaggagtgacctacgccgccaagggctactttgatgcattggtcaagatgggcgagctcgcttcagagtcacaggggagtaaagagctcggtgacgtcctgttccaaatggcagaagtgcatcggcagattcagaatcagctagaggaaatgctcaagagcttccataacgagcttctgactcagctggaacaaaaggttgagctagactcccgttatctctctgcagccctgaagaagtaccagactgaacaaagaagcaagggcgatgctctcgacaaatgtcaagccgagctcaaaaaacttcgaaagaaaagccaggggtcaaaaaacccgcagaaatactccgacaaagaacttcaatatatcgacgcaatctcaaacaaacagggcgaactggagaattatgtgtccgacggctataaaacagccttgactgaggagaggcgtcgattctgcttcttggtagagaaacaatgtgctgtggccaaaaatagcgccgcttatcattctaaaggcaaggagttactggcgcaaaaactccccctgtggcagcaagcctgcgccgacccatccaagattccagagagagctgtgcagctcatgcagcaggtggcctcaaacggagctacgctgcccagcgccctgagcgcctctaagtctaacctggtgatctccgaccccattcctggtgctaagccactgcccgtgccaccagagttggccccctttgtgggtcgtatgtctgcccaggagagcactcctatcatgaatggtgtgacagggcccgacggggaagactactctccttgggcggatagaaaggctgctcaacctaagagcctcagccccccccagagccagagtaaattatccgatagttattctaacacactgcctgtgcgaaagagtgtcacacccaagaactcctacgctaccacagagaacaagacactcccgcgtagctccagtatggccgcgggcttggagaggaacgggcgcatgcgagtgaaagctatcttttcccatgccgctggcgataacagcaccctgctctcgtttaaggagggcgatctcataactctgctggtcccagaagcgcgggatggatggcactatggcgagagtgagaagaccaagatgcgcggatggtttcccttctcatatactagagtgctcgatagcgacggctctgaccgcctgcatatgagcctgcagcaggggaaatctagttctaccggcaacctattggacaaagacgacctggcgatcccgcctcccgattacggagccgcctctagagcatttccagctcagaccgcctccggctttaaacagagaccctactctgtggctgtcccagccttctcccagggactggacgactacggggctcggagcatgtcaagcgctgacgtggaggtcgcccggttctag

SEQ ID NO: 22961 - DNA, 720 bp, synthetic construct
  misc_feature 1..720: note = Description of Artificial Sequence: Synthetic coding sequence
  source 1..720: mol_type = other DNA
atggcccacgccggccggaccggctacgacaaccgggagatcgtgatgaagtacattcattacaaactctctcagcgcggctatgaatgggacgcaggggacgtgggagccgcgccccccggagctgcgcccgcgcccggaatattcagcagccagccagggcacacaccgcatcccgccgcttcccgcgaccccgtagctagaacttcaccgctgcagacacccgccgcccctggcgcagctgcgggcccggcgctgagccctgtgcctcccgtcgtgcatttgacactgaggcaggcaggcgacgactttagcaggcgttatcggcgggattttgccgaaatgtcttcacagctacatctcaccccatttactgccaggggtaggttcgccaccgtagtcgaggagctgttcagggatggagtaaattggggtcgtatcgttgccttttttgagttcgggggcgtgatgtgcgttgaaagcgtgaacagggaaatgtccccgttggtcgacaacattgctctgtggatgacggaatatctaaacagacacttgcacacctggatccaagataacggaggctgggatgctttcgtcgaactctatggcccaagtatgaggccactttttgatttcagctggctctcactgaagacccttctgtccctcgccctagtgggggcttgtattaccttaggagcctatctcggccataagtag

SEQ ID NO: 22962 - DNA, 720 bp, synthetic construct
  misc_feature 1..720: note = Description of Artificial Sequence: Synthetic coding sequence
  source 1..720: mol_type = other DNA
atggcccacgccggccggaccggctacgacaaccgggagatcgtgatgaaatacattcactacaaactatcacagaggggatatgagtgggatgccggcgacgttggcgccgctcctcctggcgcagcccccgctccgggcatcttttcctcccaacccggccacactccacaccctgccgcatcacgggatcctgttgccaggacctctccattgcagacacctgccgcccctggggccgcggccggcccggcattaagccctgtacctccggtggtacatctcacactacgacaggccggggacgatttcagccggcgctacaggagagacttcgccgaaatgtcctcgcaactgcacttgaccccttttacggcgcggggacggttcgccaccgtggtggaagaattgtttcgggatggcgtcaactggggacgtattgtggcgtttttcgaatttggaggagtgatgtgcgtggaatccgtgaaccgggaaatgtcgcctcttgtggataacatcgcgctgtggatgaccgagtaccttaacaggcacctgcacacatggatacaggataacggaggctgggatgcatttgtggagctatacggaccatccatgcgaccactgttcgacttctcgtggctcagtctcaaaactttattgtctttagcgttggtcggagcatgcatcaccctgggcgcttatctagggcacaagtag

SEQ ID NO: 22963 - DNA, 618 bp, synthetic construct
  misc_feature 1..618: note = Description of Artificial Sequence: Synthetic coding sequence
  source 1..618: mol_type = other DNA
atggcccacgccggccggaccggctacgacaaccgggagatcgtgatgaaatatatacactacaagcttagccagagggggtatgaatgggatgcaggggatgtaggagccgctccaccgggagcagctcctgctcccggaatcttcagctcccagcctggccacacaccccatccagccgcctccagggaccccgtagcacgcactagtccgctgcagactccagcagcacctggagcagcagcgggccccgcactgtcccccgtgccaccagtcgtccatctgactctgagacaggcaggcgacgattttagtaggcgttaccggcgcgactttgctgagatgagctcccagctgcatctgacccccttcactgcacgaggcagattcgccacagtcgtcgaggaactatttagggatggcgtgaattgggggagaattgtggcttttttcgaatttggcggtgtcatgtgtgtggagtccgtgaatcgagagatgtctcccctagtggataacatcgcactgtggatgacagagtacctcaaccggcacctgcacacctggatccaggataacggaggttgggtaggggccttaggggatgtatcgctgggctag

SEQ ID NO: 22964 - DNA, 1578 bp, synthetic construct
  misc_feature 1..1578: note = Description of Artificial Sequence: Synthetic coding sequence
  source 1..1578: mol_type = other DNA
atgaaggccctgatcgccgccctgctgctgatcaccctgcagtactcatgtgcagtttctcctacagactgttccgccgtcgagccggaagcagagaaagccctggacctgattaacaagcggcgccgagacggctacctgttccaactgctaaggatcgcggatgcgcatctggacagagtagaaaacactactgtctattatctggtcctggacgtccaggagtctgattgctccgtactttcccggaaatactggaatgactgtgagcctccagacagcaggcggccaagtgaaatagttattggccagtgtaaagtcattgccacgagacactcacacgaaagccaggatttgcgagtaattgacttcaactgcacgacatcttcagtttcttccgcacttgccaacaccaaggactcacccgtgctaatcgatttttttgaggataccgagagataccgaaagcaggccaataaagccctcgagaaatataaggaggaaaacgatgactttgcatccttcagagtggaccgaattgagcgggttgcacgcgtgagagggggagaggggaccggttactttgtggacttttcggtcaggaactgtcccagacaccatttccctaggcatcccaatgtcttcgggttttgtagggccgatctcttttacgacgtggaagcactagacctcgagtccccaaaaaacctagtgatcaattgcgaagtgtttgacccgcaagagcacgaaaatatcaatggcgtacctccccacttaggacatccattccactgggggggtcatgagcgtagttccaccaccaaaccgccatttaaaccacacgggagtcgtgatcaccaccatcctcacaagcctcatgagcatggaccaccccccccacctgatgagagagaccactcacacgggcctccactacctcaggggccgccccccctcttacctatgagctgcagcagttgccagcatgccaccttcggcacaaatggtgcccagagacactcacacaataacaatagctcagacctccaccctcataagcaccactcacacgagcagcacccccatgggcatcatcctcacgctcatcacccacacgagcatgatacccaccgccagcacccccatggacatcatccacacggacaccacccacacggccaccaccctcacgggcaccatccacacggacaccaccctcactgccacgattttcaggattacggaccctgcgacccccccccccacaaccaggggcactgttgccatggccatggcccgccgccaggccatctgcgacgcagaggaccaggtaaggggccaaggccatttcactgtcggcagatcggatctgtatatcgcttgcctcctttaagaaagggcgaggtcttgccattgccggaggccaattttccctctttccctctgccccaccacaagcatcccttaaagccagacaaccagccatttccccagtctgttagcgagtcttgcccaggcaagttcaaatcaggatttccccaggtctccatgttctttacacacacattccccaagtag

SEQ ID NO: 22965 - DNA, 2121 bp, synthetic construct
  misc_feature 1..2121: note = Description of Artificial Sequence: Synthetic coding sequence
  source 1..2121: mol_type = other DNA
atggccagccccgccgacagctgcatccagttcacccggcacgcctccgacgttctgttgaatctgaatagactcagaagtagagatatactcaccgacgtagtcatagtcgtatcacgcgaacagttccgagcgcacaaaactgtactgatggcgtgcagcggactgttttactccatattcactgatcagttaaagtgcaatcttagcgtgattaatctggacccagagatcaaccccgaaggattctgtatcctcctcgattttatgtacacatctaggctgaatttacgggaaggcaacataatggccgttatggcaaccgccatgtatctgcagatggaacatgtggtcgatacctgcaggaaattcatcaaagcatccgaagccgaaatggtgagcgcgatcaagccaccacgggaagaattcctgaattctagaatgctgatgccacaggatatcatggcttatcgtgggcgggaggtcgtcgaaaataacctgcccctgcgtagtgctcccggatgcgaatctagagcttttgctccatcactttattccggcctctctaccccccctgctagctactcaatgtatagtcacctgcccgtgagctccctgttgttctcagacgaggaatttcgcgacgtcagaatgccggtagctaatccttttcctaaggagagagccctgccgtgtgattctgcacgacctgtgccaggcgagtattctagacctactttggaagtctccccgaatgtgtgccacagcaatatctattctccaaaagagacaatccccgaagaagcgagaagcgacatgcattattctgtcgcagaagggctgaagccagctgctcctagcgcccggaatgcaccttatttcccttgcgacaaagcatctaaagaggaagaacgaccatcttccgaagacgaaattgcccttcactttgagccaccaaatgcacccttgaatcgcaaggggctggtgagccctcaatcccctcagaagagcgattgccagccaaacagcccgactgagagctgcagtagtaagaacgcctgtattctccaggcctccgggtccccccccgctaagtcgcccactgaccctaaagcctgcaattggaagaaatacaagttcattgtcctgaattcgctgaatcagaacgcaaagccggagggccccgaacaggctgagctcggcagactaagcccaagagcatacacggcaccaccagcttgtcagccccccatggagccggagaacctggacctgcagagtcctactaaattgagcgcctctggcgaggacagcactataccacaggccagccggctcaacaacatcgtgaataggagcatgaccggttcccctcgctcctcctccgagtcacattctcccctgtacatgcatccacctaagtgcacaagctgcggctcacagtctccacagcacgctgaaatgtgtctgcacacagccggcccaaccttccccgaggagatgggtgaaacacagtccgaatattctgactcttcttgtgaaaatggggcattcttttgtaacgagtgtgattgtagattcagtgaagaggctagtttaaaacggcacacactccagacccattctgataagccttacaagtgcgatcggtgccaggcctcgtttaggtataagggaaatttggccagccataagactgttcacacgggcgagaaaccgtacagatgcaacatctgcggagctcagtttaaccggcctgctaatctgaaaactcacacccggatccactccggtgagaagccctacaaatgtgagacttgcggagcgagatttgtccaggtggcccatcttcgtgcccacgtgctaatccacactggcgaaaagccctacccctgtgagatttgcgggacacgatttaggcacctgcagaccctgaagagtcaccttcgcattcacacaggcgaaaagccgtaccactgcgagaagtgcaacctgcatttccgtcataagtcccagttgcggctccatttacgtcagaaacatggggccatcaccaataccaaagtacagtatcgagtcagcgctaccgatctgccgccagagctgcccaaagcctgttag

SEQ ID NO: 22966 - DNA, 369 bp, synthetic construct
  misc_feature 1..369: note = Description of Artificial Sequence: Synthetic coding sequence
  source 1..369: mol_type = other DNA
atggccagccccgccgacagctgcatccagttcacccggcacgcctcggatgtgctgctgaatctgaatcgtctgcgcagtcgagatatcctcactgatgtagtgattgtggtatcgagagaacagttcagagcccataaaacagtattaatggcctgttcaggtctgttttattctatcttcaccgaccagcttaaatgcaatctgtcagttatcaatctggacccggaaatcaaccccgagggcttctgtatactacttgatttcatgtacaccagccggctcaacctgagagaaggcaatatcatggccgtgatggcgacagctatgtatctgcaaatggaacacgtggtggatacctgccggtag

SEQ ID NO: 22967 - DNA, 315 bp, synthetic construct
  misc_feature 1..315: note = Description of Artificial Sequence: Synthetic coding sequence
  source 1..315: mol_type = other DNA
atggccagccccgccgacagctgcatccagttcacccggcacgccagcgacgtgcttctgaaccttaatagattaaggagtagggacatacttacagacgtcgtgattgtggtcagccgcgagcagttccgagctcacaaaactgtgctcatggcatgctctggccttttctacagtatctttaccgaccagttgaagtgcaacctttctgtcattaatcttgatccagagataaaccctgagggtttctgtatccttcttgacttcatgtacacatccagactgaatctgagggagggcaacatcatggcttag

SEQ ID NO: 22968 - DNA, 1953 bp, synthetic construct
  misc_feature 1..1953: note = Description of Artificial Sequence: Synthetic coding sequence
  source 1..1953: mol_type = other DNA
atggccagccccgccgacagctgcatccagttcacccggcacgcctctgacgtcttactgaacctgaatcgcctgagaagtcgagacattctgacagacgtggtaatagttgtatcgcgcgaacagttcagggcccacaaaaccgtgctcatggcctgcagtggtttgttctacagtatattcacagatcagcttaagtgtaacttatcggtaataaacctcgaccctgagatcaacccagaggggttctgcatccttctggactttatgtacacaagccgtttgaacctgcgcgaggggaacattatggccgttatggccactgcaatgtacctccaaatggaacacgtggtggacacgtgtaggaagttcatcaaagcttcggaagctgaaatggtgagcgccataaagccaccaagggaggaatttctcaattcccgcatgctgatgcctcaggatattatggcatacagaggcagggaagtggtggaaaacaacctcccactgaggtctgccccgggttgtgagtccagagccttcgcaccttccttgtacagtggactgagcacaccccccgcctcctattctatgtattctcacctccccgtgtcatccctgcttttctccgatgaggaattccgggacgttcgaatgccagtcgctaatccattcccaaaggagagggccctgccctgtgactccgcgaggcccgtaccgggcgaatatagccgacctaccctggaggtgtcccccaatgtatgtcattccaacatctactcccctaaagagacaatccctgaggaagctcgttcggatatgcactactccgtggcagagggccttaagccagccgcccctagcgcgcgaaacgcgccctactttccatgcgacaaagcttccaaagaagaagagcggcctagtagcgaggatgaaattgccctgcattttgagccccctaacgcgcccttaaaccggaaaggtctggtgagcccacagtccccacagaagagtgactgtcagcccaattccccaactgaaagctgttcttctaagaacgcctgtatactgcaggcctcaggaagtccccccgccaaatcccctactgacccaaaggcatgcaactggaagaaatacaagttcatagtgctaaactcactaaaccagaacgcaaaacccgagggtccggagcaggccgaactgggcagattgtcccccagggcctataccgccccacctgcgtgccaacctccgatggagcccgagaatctcgacttacagtcccctaccaagttgagcgcatccggcgaggattcaactatcccgcaggccagccgtctcaataacattgtgaacagatccatgactgggtctccaagatcaagcagcgagtcacactcacccctttatatgcatcctccaaagtgtacttcatgtggcagtcagtctccccagcacgctgagatgtgtctgcatacagccggtcctacgtttcctgaggaaatgggagaaacacaatcggagtatagcgactcctcatgcggagagaaaccctaccgttgcaacatttgcggtgcccaattcaacagacccgctaatcttaagactcacacacggatccacagcggagaaaagccctataaatgtgagacatgcggcgcccgatttgtacaggttgcacaccttcgggcccacgtcctgattcacaccggagaaaaaccgtacccttgcgagatctgcgggactcggtttcggcacctgcagacactgaagagccatctccgcattcacactggagaaaagccttaccactgcgagaagtgtaaccttcattttaggcataagagtcagctgcgtttgcacctgcgccagaaacacggggctattacaaatactaaggtacagtacagagtgagtgccactgatctaccccccgagctccccaaggcctgctag

SEQ ID NO: 22969 - DNA, 306 bp, synthetic construct
  misc_feature 1..306: note = Description of Artificial Sequence: Synthetic coding sequence
  source 1..306: mol_type = other DNA
atgaagttcggcatgggcagcgcccaggcctgcccctgccaggtgccccgtgctgcttcaaccacctgggtgccctgccagatctgcgagactaggggcgcagcagcggccccaccactgaccctggagggacctgtccagagccaccacggcacaccggcactgactcaggggcctcagagtccacgcgatggcgctcaactcggagcctgtacccgtcctgtcgacgtcagagatagcgggggacggccactgcctccgcctgacacattggcctccgccggcgattttctctgtacgatgtag

SEQ ID NO: 22970 - DNA, 396 bp, synthetic construct
  misc_feature 1..396: note = Description of Artificial Sequence: Synthetic coding sequence
  source 1..396: mol_type = other DNA
atgaagttcggcatgggcagcgcccaggcctgcccctgccaggtgccgcgggccgcttctacaacttgggttccctgccagatttgtggaccccagccaagcctgtctctggctgagcaacacctcgagagcccagttcctagcgcccccggtgctctggccggtggcccaacccaggccgcccccggcgttcgcggcgaggaggagcagtgggcacgagagatcggcgctcagctgcgtcgaatggccgatgatttgaatgcacagtacgaaaggaggagacaagaggagcagcagaggcatcgcccatctccttggcgcgtgttgtataacttaatcatgggccttttacccctgccacgaggccacagggcccctgaaatggaacccaactag

SEQ ID NO: 22971 - DNA, 582 bp, synthetic construct
  misc_feature 1..582: note = Description of Artificial Sequence: Synthetic coding sequence
  source 1..582: mol_type = other DNA
atggcccgggcccggcaggagggcagcagccccgagcccgtggagggacttgcgagggacgggccccgaccatttccgctgggccggcttgtgcccagcgccgtttcgtgcggtctctgcgagccgggcctggcagcggcccccgccgctccaaccttattgccggcggcgtacttgtgcgccccaacagcgccccctgctgtcactgcagcccttggaggatcacgctggcccgggggccctcgttcgcgcccacgcggtccgcgacccgatggcccacagccaagcctcagcctcgcagagcagcatcttgaatctccagttcctagtgcccccggtgctctggccgggggccccacacaagctgcacctggcgtgcggggcgaagaagaacagtgggctagggagattggggctcagctccgaaggatggcggacgatctgaatgcccaatacgaacgtcgcagacaagaggagcaacagcggcacaggccctccccctggcgtgtattgtacaatcttatcatgggcctcctcccactccctagaggccatagagccccagagatggagcccaactag

SEQ ID NO: 22972 - DNA, 786 bp, synthetic construct
  misc_feature 1..786: note = Description of Artificial Sequence: Synthetic coding sequence
  source 1..786: mol_type = other DNA
atgaagttcggcatgggcagcgcccaggcctgcccctgccaggtgccacgggcagccagcacaacctgggtcccgtgccagatctgcggacctcgggagcgtcacggacctagaaccccaggggggcagcttccaggagcgcgtcgcggcccagggccaagaagacctgcccctctgccagcgaggcctcccggagccctcggctcagtgctgagaccgcttcgggctcgcccggggtgtcgaccacggagaccacatcctgccgcccgctgtctgcccctgcgacctcaccgacccacacgtaggcacagacggcctggcggattccctctggcttggggatcgccccaacctgcaccccggcccgcgccagggaggagtagcgccctggccctagccggaggcgccgcacctggggtagctcgcgcccagaggcctggaggttccggcgggcggagtcaccccggaggtcccggaagccccagaggtggagggactgtcgggcctggtgacagggggcccgccgctgcggatggaggtaggccccagcggactgtccgggccgccgaaacaaggggagcggcggccgctccaccattaaccctggagggaccagttcagtcacaccatggcaccccagccctgacccagggaccacagtcccctcgggatggggcccagctcggagcgtgcaccaggcctgtggacgtcagagacagtgggggccggccattgcctcctccggatacgttggctagtgctggagacttcctttgtacgatgtag

SEQ ID NO: 22973 - DNA, 1308 bp, synthetic construct
  misc_feature 1..1308: note = Description of Artificial Sequence: Synthetic coding sequence
  source 1..1308: mol_type = other DNA
atgctgtgcggcttccaggaggacgccacccccccccccccccccagaccaagaaggttacatcgaagactgcccagaccggaagaagtcggcatgttatcccttccaccaggcctacttacggtgtccggtagtgcggcagccgccgacgcagttccactgagaccgggtgattgggccggtgtgtcaaccgcggacaggggcgagcgggcccctctgggaccagcattctgtgatttggcagtctcacccacttccccggcttggagaggggaagaggacgagggagcaaaagcatcatctggtgacatcgggagcttggactaccaggagtttgtagtagatattgaaagcagactgagaatggagggtgtcgagctgaaggaggagtggcaggatgaagactttcccattccactgcccgaggacgattccattgaagctgacatccttgccatcacaggccccgaagatcagcctggtagcctggaggtgaacggcaataaagtgcgtaagaaactgatggcccctgatatctctctgactttggaccctagcgacggcagtgtgcttagcgatgaccttgacgaatctggagagattgatctagatgggttagatactccgtctgagaattcaaacgagttcgagtgggaagatgacttaccaaagcccaagactactgaggtgattcggaagggttccattactgagtacacagctgcagaggagaaagaggatggccgtaggtggagaatgtttcgcataggagagcaggaccacagggtggacatgaaggcaatcgagccttacaagaaagtcatctctcacggaggttactacggggatggtctcaatgccatcgtggtttttgccgtgtgctttatgcctgagtctagccaacccaattaccgctacctaatggacaacttgttcaagtatgtgattgggactcttgagctgctcgtcgccgagaactacatgattgtttatcttaatggtgccactacacgacgcaaaatgcctagcctgggctggttgcggaagtgctaccagcagatcgataggagactgaggaaaaacctgaaatccttgataattgtgcatcctagctggttcattagaaccctgctggccgtgacgcggccgtttatttcttcaaaattttcgcagaagattcgctatgtttttaacctggcggaacttgccgagctggtgccaatggaatatgttgggatcccagagtgtattaaacaggtggatcaagagctgaatggcaagcaagacgagccaaaaaacgaacaatag

SEQ ID NO: 22974 - DNA, 1131 bp, synthetic construct
  misc_feature 1..1131: note = Description of Artificial Sequence: Synthetic coding sequence
  source 1..1131: mol_type = other DNA
atggagccctgccccagcagcgcccccccccccttctaccccggcgtgggcgaggtcgcaggactgagatggttttccatctacgatcagagaccaagttggtaccgtactaaaaagctaggcttgttggatatcggaagcctcgactaccaagagtttgttgtggacatagaatcacggcttaggatggagggtgtggagttaaaggaggagtggcaggatgaggatttcccaatcccgctgccagaagatgactctatagaggccgacattctagcaattactggcccggaggaccaaccaggatctctcgaagtgaatggcaacaaggtccggaagaaactgatggctccggatatctccttgaccctcgatcctagtgatggctcggtactgtcagatgaccttgatgagtccggcgagattgacctggatggtttggacacgcccagcgagaattctaacgagttcgagtgggaagatgatttaccaaagccaaagaccaccgaggtgatcaggaaaggttctataacggagtacacagccgctgaagaaaaggaagatggcaggagatggagaatgtttcgcattggcgagcaagatcacagggtggacatgaaagcaattgaaccatacaagaaagttatctctcacggaggatattatggtgacgggcttaatgcgatcgtcgtgtttgccgtgtgcttcatgcctgagagtagtcaaccaaactatcggtacctgatggacaatttgttcaaatacgtgatcggaactctcgagctgctcgttgcagagaattacatgattgtgtaccttaacggcgctacgacacgcagaaagatgcccagtctgggatggctgcggaaatgctaccagcagatcgatcgcagactacgaaagaatctcaagagcttgatcattgtgcacccgtcctggtttatccgaacattgctggctgtcacgcgccccttcatctctagcaagttttctcaaaaaataagatacgtctttaacttagctgagttggcagaactggtgccaatggaatatgtgggaatacctgaatgtattaaacaggtagatcaagagctgaacgggaagcaggatgagcctaagaacgagcaatag

SEQ ID NO: 22975 - DNA, 939 bp, synthetic construct
  misc_feature 1..939: note = Description of Artificial Sequence: Synthetic coding sequence
  source 1..939: mol_type = other DNA
atggccaaggtgttcagcttcatcctggtgaccaccgccctgaccatgggccgagagatatccgcccttgaggactgcgcacaggaacagatgaggctgcgggctcaggtcaggctcctagagaccagagtgaagcaacaacaggttaaaataaagcagctcctccaggaaaatgaagtgcagttcctggacaagggcgacgagaacactgtgatcgacctgggttccaagcggcaatacgccgactgtagtgagatctttaatgatggttataaactgtccgggttctacaaaattaagcctctacagagcccagctgagtttagtgtgtactgcgatatgagtgatggggggggatggacagtgattcagcgcaggagcgatggttcggagaattttaatagggggtggaaagattatgagaatggcttcgggaacttcgttcagaagcacggcgaatattggcttgggaataagaatctccattttctgaccacccaagaggactatacactaaaaatcgatctggctgactttgaaaagaatagtagatatgcccagtacaagaattttaaggtcggtgacgagaagaacttttatgagctgaacattggggaatacagcgggacggcaggggacagcctggcaggtaatttccaccctgaggtgcagtggtgggcttcccaccagcggatgaaattctctacatgggatcgagatcacgataattatgaaggaaattgcgctgaagaagaccaatcaggctggtggtttaatcgctgtcactccgcaaacctcaatggcgtgtattactcaggcccctacaccgccaaaactgataacggtatcgtgtggtacacctggcacgggtggtggtacagcttaaaatcggtcgtgatgaagatcaggcctaacgactttattccgaacgtgatctag

SEQ ID NO: 22976 - DNA, 660 bp, synthetic construct
  misc_feature 1..660: note = Description of Artificial Sequence: Synthetic coding sequence
  source 1..660: mol_type = other DNA
atgagcagccacctggtggagccccccccccccctgcacaacaacaacaataattgcgaggaaaacgaacagtccctgccccctccagccggactgaattcgtcctgggttgagctgccaatgaacagctctaacggcaacgataatgggaacggtaaaaatggcggactagaacatgtgccctccagcagctctattcacaacggtgacatggaaaaaatcctgttggacgcccaacatgagagtggtcagtcctcaagccgcgggtcatcccattgtgacagtccttctccccaggaagacgggcagatcatgttcgacgtcgaaatgcatacgagccgcgatcacagttctcagtccgaagaggaggtagtggaaggagagaaggaggtggaagccctgaaaaagtccgcagattgggtgagcgactggtcgtccaggcctgagaatattcctcctaaagaatttcacttcagacacccaaagagatctgtttcgctgagcatgaggaagtccggagctatgaagaaaggtggtattttttcggccgaattcttgaaggtgtttattccatccctttttcttagccacgttctggctctggggttgggaatctatattggaaaacggctcagtacaccctctgcctcgacatactag

SEQ ID NO: 22977 - DNA, 540 bp, synthetic construct
  misc_feature 1..540: note = Description of Artificial Sequence: Synthetic coding sequence
  source 1..540: mol_type = other DNA
atgaacagcagcaacggcaacgacaacggcaacggcaagaacggcggtctagagcatgtgccctccagctcctccattcacaatggcgacatggagaaaatactgcttgacgcgcagcacgaatctggtcaatcttcctctcgcggcagtagccattgcgactccccatctccacaagaagacggtcagatcatgtttgacgtggaaatgcacactagccgcgaccattccagtcagagcgaggaggaggtggtcgagggagaaaaggaagtagaggccttgaagaaatcagccgactgggtctctgactggtctagtcgccctgaaaacatcccccctaaggaattccatttccggcaccccaagcgtagcgtgtcgcttagcatgagaaagtccggtgccatgaagaagggcggcatttttagcgccgaatttcttaaggtcttcatccccagccttttcttgagccacgtgctggccctggggctcgggatttatattggcaaaagacttagtacaccctcagctagtacttactag

SEQ ID NO: 22978 - DNA, 540 bp, synthetic construct
  misc_feature 1..540: note = Description of Artificial Sequence: Synthetic coding sequence
  source 1..540: mol_type = other DNA
atgaacagcagcaacggcaacgacaacggcaacggcaagaacggcggcctggagcacgtcccgtccagttcctctattcacaatggtgatatggaaaaaatccttctggatgcccagcatgaaagcgggcagtctagttctaggggatctagtcattgtgatagtccttcgccccaggaagacgggcaaatcatgtttgacgtggagatgcacacctcccgggaccactcctcacaatctgaagaagaagttgtagaaggagaaaaggaagtggaagccctgaaaaagagtgccgattgggtttcagactggagctctcgcccagagaacatcccccctaaggaattccatttccgccacccaaaaagaagcgtgagcttatccatgagaaaaagcggagcgatgaaaaaggggggcatattcagcgctgagttccttaaggttttcattccgtcactttttctttcacatgttctggctctaggactggggatatatattggcaaaaggttgagcacgcctagtgcttctacctattag

SEQ ID NO: 22979 - DNA, 540 bp, synthetic construct
  misc_feature 1..540: note = Description of Artificial Sequence: Synthetic coding sequence
  source 1..540: mol_type = other DNA
atgaacagcagcaacggcaacgacaacggcaacggcaagaacggcggcctggagcatgtcccaagcagtagctctatccacaacggagatatggaaaagattctcttggatgcgcagcatgaaagtggtcagtcctcctcccgagggtcgtcccattgcgattctccctcgccccaagaagacggacagatcatgttcgacgtggagatgcacacatctcgcgatcactccagccagagtgaggaggaagttgtcgaaggcgagaaggaggtggaggccttgaagaagagcgctgactgggtgtcagattggtcgtcaaggcctgaaaatattccaccaaaagagttccacttcaggcaccccaagaggagtgtatccctcagcatgcggaaaagtggcgctatgaagaaaggcggaatcttttccgcagaattcctcaaagttttcatacccagcctatttctctctcacgtgttggcactaggattaggaatctacatcgggaaaaggttatcaacgccatcagcctccacttattag

SEQ ID NO: 22980 - DNA, 636 bp, synthetic construct
  misc_feature 1..636: note = Description of Artificial Sequence: Synthetic coding sequence
  source 1..636: mol_type = other DNA
atggccagcggccagggccccggccccccccggcaggagtgcggcgaacccgcattgccttccgccagcgaagaacaggtagctcaagataccgaagaggtttttagatcgtacgtattctacaggcaccagcaggaacaggaagctgaaggcgttgccgcgcctgctgacccagagatggttacgctgccacttcagccttcatcaacgatgggccaggtcggtcgccaactcgctatcatcggggacgacatcaataggcgctatgattccgagttccaaacgatgcttcagcatctgcagcccaccgcggagaatgcctacgagtacttcacaaaaatagccaccagcctcttcgagtcgggtataaactggggcagagtcgtggctttattaggctttggataccgattggccctgcacgtttaccagcatggcctgacaggctttcttggccaggtcacacgcttcgtggttgacttcatgttgcatcactgcatagccagatggattgcacagagaggcgggtgggtagcggctctgaatctgggtaacggcccaatcctcaacgtactcgttgtgctgggcgtcgtgttgcttggccagttcgtggtccggcgattcttcaagtcctag

SEQ ID NO: 22981 - DNA, 576 bp, synthetic construct
  misc_feature 1..576: note = Description of Artificial Sequence: Synthetic coding sequence
  source 1..576: mol_type = other DNA
atggccagcggccagggccccggccccccccggcaggagtgcggcgagccagcactgcctagcgctagcgaggagcaagtagcccaagatactgaagaagtgtttaggtcctatgtgttctaccgccaccagcagcagccttcatctaccatgggccaggtgggacggcaattagccatcattggtgacgacatcaatcggcggtatgactccgaattccagactatgctgcaacatttgcagcccaccgccgagaacgcatacgagtattttactaaaattgctacaagcctgtttgaatccggaataaactggggacgagtggtggctctgctgggcttcggctaccggctggcgcttcatgtgtaccaacacggcttgaccggctttctgggccaggtgacgcgtttcgtcgtggattttatgttgcatcactgtattgcgaggtggatcgcccaaagaggcggatgggtcgctgctctgaacctgggaaatggaccgattctcaacgtgttggtggtgcttggggttgttttgctgggacagttcgtagtccggcgcttcttcaagtcctag

SEQ ID NO: 22982 - DNA, 636 bp, synthetic construct
  misc_feature 1..636: note = Description of Artificial Sequence: Synthetic coding sequence
  source 1..636: mol_type = other DNA
atggccagcggccagggccccggccccccccggcaggagtgcggcgaaccggcccttccaagcgcctcagaggagcaggtcgcccaggataccgaggaagtttttcggtcgtacgtgttctacaggcaccagcaggagcaagaagccgaaggcgtggccgcaccagctgatcccgagatggttaccctgccgttacagcctagtagtacgatggggcaggtcgggcgccagctcgccataatcggggatgatatcaaccggcgttatgattctgaattccagaccatgctgcagcatttgcaaccaaccgccgaaaatgcctacgagtacttcaccaaaatagctacctcactgttcgaatcgggcatcaattggggacgtgtggtagctttacttgggttcggttaccggttggctctccacgtctatcagcacggcctcacaggcttcctggggcaagtaacgcgattcgttgtggacttcatgcttcaccactgcatcgctcgctggatcgcacagagaggtgggtgggtggccgcactgaatctgggcaacgggcctatcctaaatgtgttagtggtcctcggcgttgtcctcttgggccagttcgtggtgcggcggttcttcaaatcatag

SEQ ID NO: 22983 - DNA, 462 bp, synthetic construct
  misc_feature 1..462: note = Description of Artificial Sequence: Synthetic coding sequence
  source 1..462: mol_type = other DNA
atggccagcggccagggccccggccccccccggcaggagtgcggcgaacccgccctacccagcgcgtccgaagaacaggtggctcaggacacagaagaagtgttccgatcctacgtgttttatcggcaccaacaagaacaagaagccgaaggcgtggcagcccctgcggacccagaaatggtcactttgcctctccagccgagtagtaccatgggccaagtcggccggcaactcgccataattggggatgatataaacagaagatacgattccgaattccaaacaatgctacagcacctgcagcccactgcggaaaatgcgtatgagtatttcaccaagattgcgactcgtcccgccgccactcctaccgcctgtcttagggtcgcctcaatcggagctgtatggtggctgttctgggccagtgctactgtgtggccatatacatcaacaagcatggcatag

SEQ ID NO: 22984 - DNA, 507 bp, synthetic construct
  misc_feature 1..507: note = Description of Artificial Sequence: Synthetic coding sequence
  source 1..507: mol_type = other DNA
atgttccagatccccgagttcgagcccagcgagcaggaggacagctccagcgcggaaaggggactcggaccgagtcctgccggcgatgggcccagcggcagcggaaagcaccaccgccaggctccaggcctgctgtgggacgccagccaccagcaagagcagccaacatcctcttctcaccacggcggagcgggggccgtagagattagaagccgtcatagttcctaccctgctgggactgaagacgacgagggaatgggcgaagagccttcccccttccggggcagaagccgctccgccccacccaacctgtgggcagctcagcgctatggccgcgagttgagacggatgagcgacgaatttgtagacagttttaaaaaggggctacccaggccaaagagcgctggcactgcaactcaaatgcgacagagttcctcgtggactagagtgtttcagtcttggtgggataggaaccttggccgaggttcaagtgcgcctagccagtag

SEQ ID NO: 22985 - DNA, 507 bp, synthetic construct
  misc_feature 1..507: note = Description of Artificial Sequence: Synthetic coding sequence
  source 1..507: mol_type = other DNA
atgttccagatccccgagttcgagcccagcgagcaggaggacagcagctcagcagagcgaggcctcggcccatcaccagctggcgacggcccaagtggatccggcaagcaccacagacaggcccccggtctgctctgggacgcttcgcatcagcaggagcagcctaccagcagctctcaccacggaggggccggcgctgtggagattcgaagtcgccattccagctacccggccggcactgaagatgatgagggtatgggggaagagcctagccctttcagagggagatccagatccgctcccccgaacttgtgggcggctcagcgttacggtcgggaactgaggcggatgtccgacgagtttgtggatagcttcaaaaagggcctgccccgccccaagtctgctggaaccgcaactcaaatgcggcagtctagcagctggactcgagtctttcagagttggtgggacaggaatctcggacgcggtagttcagccccctcccagtag

SEQ ID NO: 22986 - DNA, 450 bp, synthetic construct
  misc_feature 1..450: note = Description of Artificial Sequence: Synthetic coding sequence
  source 1..450: mol_type = other DNA
atgttccagatccccgagttcgagcccagcgagcaggaggacagcagctcagctgagagggggctcggcccaagccccgcgggcgacgggccttctggcagcggaaagcatcatcggcaagcacctggtcttctgtgggatgcctcacaccagcaggaacagcctacttcatcaagccaccacggaggagctggcgccgtagagatccgttctagacacagcagttacccagcgggaactgaagacgacgagggcatgggagaagagccctctcctttcagaggaaggtcaagatcagcccctcccaatctgtgggcagcacagcggtatgggagagagctccgaagaatgtccgatgagttcgtcgactcttttaagaaaggcttacccagacccaagagcgcaggcactgccacacaaatgcgtcaaagttccaggaggctacggtag

SEQ ID NO: 22987 - DNA, 591 bp, synthetic construct
  misc_feature 1..591: note = Description of Artificial Sequence: Synthetic coding sequence
  source 1..591: mol_type = other DNA
atgaaccggagccaggaggtgacccgggacgaggagagcacccggtccgaagaggtcactcgcgaggagatggccgctgccgggttaactgttactgtgacccactcaaacgagaaacacgatctacatgttacctcgcagcagggttcctccgagcccgtggtacaggaccttgctcaggtggttgaggaggtgatcggcgttcctcagagttttcaaaagcttatttttaagggtaagtcactgaaggagatggaaacacctctcagcgcactaggaatccaggatggatgtcgcgtgatgcttattggcaagaaaaatagtcctcaagaagaggtggagcttaagaagttaaagcacctagagaagtctgtggaaaaaattgccgatcagctggaggaacttaacaaagaactgaccggaattcaacaaggctttcttcccaaagatcttcaagccgaagccctttgtaagttggatcggagagtaaaggcgacgatcgagcagttcatgaagatacttgaggagattgatacactcatcctgcccgagaactttccaactctcaccttggtgctgaatgagaagtag

SEQ ID NO: 22988 - DNA, 693 bp, synthetic construct
  misc_feature 1..693: note = Description of Artificial Sequence: Synthetic coding sequence
  source 1..693: mol_type = other DNA
atgaaccggagccaggaggtgacccgggacgaggagagcacccggagcgaggaagtcactcgggaagaaatggccgccgccggtcttactgtgacggtaacgcatagcaacgagaaacacgatctacacgtgacttcccagcaaggaagctccgaacccgttgttcaggatttagcccaggtcgttgaagaagtcattggagttccacagtcgttccaaaaactcatcttcaaaggaaagagtttgaaagagatggagacaccactgtctgcactgggtatacaggatggctgtcgcgtgatgctgatcggaaaaaagaactccccccaggaagaagtggagctcaagaagctcaagcaccttgagaagtcagtggagaagatcgccgatcagctggaagaactgaataaggagctgacagggattcaacaggggttcctgcccaaggacctccaggctgaagcgctttgtaaattagaccggagagtgaaggcaacaatcgagcagttcatgaaaatcctcgaggagattgatacgctgattcttcctgaaaattttaaggatagcaggctcaaaaggaagggactggttaagaaagtgcaggcctttctggccgaatgtgataccgttgagcagaacatttgtcaggagaccgaacgcctgcagagtaccaacttcgcactggccgaatag

SEQ ID NO: 22989 - DNA, 1038 bp, synthetic construct
  misc_feature 1..1038: note = Description of Artificial Sequence: Synthetic coding sequence
  source 1..1038: mol_type = other DNA
ctggcccagcggggcggcgcccggcggccccggggcgaccgggagcggctggggtcccgattgagggctctgaggcctggtcgcgagccccgacaatcggagcccccagctcagcgcggacctccaccttctgggaggccccccgctcgatccactgcatccggacatgataggcccacacgcggggcagctgctggggcccgacggccgagaatgaagaagaagactaggcggcggagcactaggagcgaagagttgacccgttcagaagagctcaccctgtccgaagaggcaacatggagcgaagaggcaacccagtcagaggaggccactcagggggaggaaatgaaccggtctcaggaggtgacacgcgacgaagaaagcactaggagcgaggaagtgacccgggaagagatggctgctgcaggcctaaccgtgaccgttacgcatagtaacgagaaacacgacttacacgtgacatcccagcagggttccagcgagcctgtcgtgcaggatcttgctcaagtggttgaagaagttattggcgtgcctcagtctttccaaaagctgatttttaaggggaagagtctgaaggagatggagaccccgctgtctgccttgggcatccaggacggttgccgcgtgatgctgatcggaaaaaagaacagtccacaagaggaggtggaactgaaaaaactcaaacacctcgagaaaagcgtggagaaaatagccgatcagttggaggagctgaataaagagctgaccggtatccagcagggattcctgcctaaggatcttcaggcagaggctctgtgtaagctcgaccgacgggtgaaggctactatcgaacagttcatgaagatcctggaggagatagacacactgattttgcctgagaatttcaaagactcacgcctgaaaaggaagggactggtcaagaaagtgcaggcgttccttgctgaatgcgataccgtagaacagaacatttgtcaagagactgagcgcttacaatcgaccaattttgccctggccgagtag

SEQ ID NO: 22990 - DNA, 1728 bp, synthetic construct
  misc_feature 1..1728: note = Description of Artificial Sequence: Synthetic coding sequence
  source 1..1728: mol_type = other DNA
atgagcgccgccacccacagccccatgatgcaggtggccagcggcaacggagatagggatcctctccctccagggtgggaaatcaagatcgatcctcagaccggttggccctttttcgttgatcacaactcccggacgactacctggaacgaccccagagtaccgagtgaagggcccaaagagaccccctcttccgctaatggtccctcccgcgaaggaagtagactcccccctgcaagggagggtcaccctgtgtatcctcagctgcggcctggctatatccccatcccagtcctacacgagggagctgagaacagacaggttcatccctttcacgtgtatccgcagcctggaatgcaacgattccgtacagaggcagcagccgcagcaccacaacgcagccaaagccctttacgcggcatgcctgagacaacacagccagacaagcagtgcggccaggtcgctgctgccgctgcagcccagccccctgcaagtcacggcccagagcgctcccagagccccgcggcatccgactgtagctcatccagcagctccgcttctctgcccagcagcggccgcagttccctaggctcacaccagctaccccggggatacattagcatccccgtgattcatgaacaaaacgttacccggccggctgcacagccaagcttccatcaagctcagaaaactcattatccggcacagcaaggagaataccagacccatcagcctgtttaccacaagatccagggggatgattgggagccccgtccgctgagagccgcctcaccctttcgcagtagtgtccagggggcttcttcacgagaggggtcaccagcccgtagttccacccctctgcacagtccaagccctatacgcgttcacaccgtggtcgaccgcccccagcagccgatgacacacagggagacagcccccgtatcccaacctgagaacaaaccggagtctaagcctggccctgttgggcccgagcttcctcccggacacattccaatccaggttatcagaaaagaagtggactcaaaaccagtctctcagaaacccccacccccctccgaaaaggtggaagtgaaggtcccacctgctcccgtaccttgccctccaccttctcccggaccatcagctgtcccttccagcccaaagtcagttgcgacagaggagagagcggcaccgagcaccgctccggcagaagccacccccccgaaacctggcgaggccgaggctccgcccaaacatcccggagtactaaaggtggaggccatcctggagaaggtgcagggcttggagcaggccgtggacaacttcgaggggaagaagactgacaagaaatacctaatgatcgaggaatatctgactaaagagctcttggcccttgatagcgtggaccccgagggacgcgcggacgtaagacaggctaggagggacggtgtcaggaaggtccagacgatccttgaaaagctggagcagaaggctatcgacgtgcccgggcaggttcaggtttacgagcttcagccgtctaatcttgaagcagatcagccattgcaagcaataatggaaatgggcgctgtagcagcagataagggcaaaaaaaatgccggtaatgcagaggacccccacacagagacgcaacagcccgaggcaacagccgctgcaacaagcaatccatctagtatgacagacacccctggtaaccctgctgccccgtag

SEQ ID NO: 22991 - DNA, 978 bp, synthetic construct
  misc_feature 1..978: note = Description of Artificial Sequence: Synthetic coding sequence
  source 1..978: mol_type = other DNA
atgcaggagacccccagcagcgccaacggccccagccgggagggctctcgcctacccccagcaagagaaggtcatccagtatacccccaactgagacccggctatatcccaattcccgtgttgcatgagggcgccgaaaacagacaagtgcatcctttccacgtttatccacaaccaggaatgcagcggtttcggactgaggcagcagccgcagccccgcagagaagccagtcacccttgcgtggtatgcccgagactacacaacccgacaaacaatgtggccaggtggctgccgccgctgctgcccagccacccgctagccacggtccagagagaagtcagagccccgccgcatctgactgttcctcatcctcttcctctgcctccttaccaagcagtgggcggtcaagcctcggatctcaccagctgcccagagggtacatttcaatccctgtaatccatgagcaaaacgtcacaaggcctgctgcgcagccttcgtttcatcaggcacagaaaacacactaccccgcacaacagggcgagtatcagacccaccagcccgtgtaccacaagattcagggagacgactgggagccacggcctctgcgcgcagccagccccttccggtcttccgtgcagggtgcatctagtcgcgaagggagcccggcccggtcaagcacccctctgcattcaccaagccccatcagagtgcatacggttgtggaccgcccccagccgatgacgcacagggaaactgccccagtgtctcagcccgaaaataaacccgagagcaaaccggggccggtaggaccagagctgcctcccggccatatacccatccaggtgatcagaaaagaggtcgatagcaagcccgtgagccaaaaacccccaccgccttcagaaaaggtcgaagtgaaggttccccccgcccccgtgccatgccctcccccaagccccggccctagcgctgtcccgtag

SEQ ID NO: 22992 - DNA, 657 bp, synthetic construct
  misc_feature 1..657: note = Description of Artificial Sequence: Synthetic coding sequence
  source 1..657: mol_type = other DNA
atggacggcagcggcgagcagccccggggcggcggccccaccagcagcgagcagatcatgaagacgggcgccttgctgcttcaaggtttcattcaggaccgcgccggaagaatgggaggtgaggccccagagctggcactcgatcccgtgccacaggacgcatctacgaaaaaactcagtgaatgtctgaagagaattggcgacgagctggattcaaacatggagttacagcgcatgatcgccgccgtcgacaccgactctcctcgggaggtgttcttccgcgtggcagcggatatgtttagcgatggaaattttaactggggcagggtggtcgcacttttctacttcgccagcaaacttgtcttgaaagcattgtgcaccaaggtgccagagttgatccgtacaataatgggctggaccttggactttctgagagaacgtctcctcggctggattcaggatcagggcggttgggtacggctcctgaagcctccacatcctcatcaccgggcacttactacagccccggcaccccccagcctgcctccagcaacaccattggggccttgggccttctggtcacgtagccagtggtgccccctgcctatcttcaggtcctcagacgtggtctacaatgccttttctctgcgcgtatag

SEQ ID NO: 22993 - DNA, 579 bp, synthetic construct
  misc_feature 1..579: note = Description of Artificial Sequence: Synthetic coding sequence
  source 1..579: mol_type = other DNA
atggacggcagcggcgagcagccccggggcggcggccccaccagctccgagcaaatcatgaagactggggctctcctgcttcagggattcatccaggacagagcaggccgaatgggaggtgaagctcctgaactggccttggacccggtgcctcaggacgcaagtacaaaaaaactttcagagtgtctgaagaggatcggtgatgagctagactctaacatggagctgcaaagaatgatcgctgccgtggacacagactcccctagagaagtcttcttccgggtagcagccgacatgttctcagatggtaacttcaattggggcagagttgtggccctcttctattttgcctcgaaactggtattaaaagcgctgtgcacgaaagtgccggaactaattagaaccattatgggatggaccctggattttctgagagaaagattactgggctggatccaggaccagggcggctgggacgggctcctgagctacttcgggacacctacctggcagacagtgaccatctttgtggccggcgtgctaacagctagcttgaccatatggaaaaagatgggctag

SEQ ID NO: 22994 - DNA, 432 bp, synthetic construct
  misc_feature 1..432: note = Description of Artificial Sequence: Synthetic coding sequence
  source 1..432: mol_type = other DNA
atggacggcagcggcgagcagccccggggcggcggccccaccagctccgaacagattatgaagacaggcgctttgctgttgcaaggaatgatcgcagccgttgacaccgactccccaagggaggtattctttcgggtggccgcggatatgttctcagatggcaatttcaactggggcagggtcgtcgccctgttttattttgcttcaaagctggttttgaaagccctgtgtacaaaggtaccagaactgatccggactattatgggatggaccctggactttctgagggagcggctgctgggttggatccaagaccagggcggctgggatggtctgctgagttattttggtacccccacgtggcagacggttaccatattcgtggccggtgttttgactgccagtctgaccatctggaagaaaatgggatag

SEQ ID NO: 22995 - DNA, 126 bp, synthetic construct
  misc_feature 1..126: note = Description of Artificial Sequence: Synthetic coding sequence
  source 1..126: mol_type = other DNA
atggacggcagcggcgagcagccccggggcggcgtgagcagccggatcgaacagggcgagtggggaggccgccacccaagctggccctggacccgctgcctgagaatgcgcccacccagaagttag

SEQ ID NO: 22996 - DNA, 540 bp, synthetic construct
  misc_feature 1..540: note = Description of Artificial Sequence: Synthetic coding sequence
  source 1..540: mol_type = other DNA
atggacggcagcggcgagcagccccggggcggcggccccaccagcagcgagcagatcatgaagactggtgctcttttgctacaggggttcatccaagatagggcaggcagaatggggggtgaggcgcctgagctcgcactggatccggtgccccaagatgcatcaacgaagaaattgtctgagtgtctgaaaagaatcggggatgaactagactcaaatatggaactacagcgaatgatcgcagctgttgacacagattctccacgcgaggtcttttttcgagtcgcagcggatatgttctccgacggcaacttcaattggggccgggtagtggctctattttacttcgcaagcaagttggtgctaaaggctttgtgtaccaaggtgcccgagttgattaggacaattatgggatggacgctagatttcctgagagagaggttgctgggctggatccaggaccagggtgggtggaccgtgaccatttttgtcgctggagtccttaccgcctccctgactatttggaaaaagatggggtag

SEQ ID NO: 22997 - DNA, 495 bp, synthetic construct
  misc_feature 1..495: note = Description of Artificial Sequence: Synthetic coding sequence
  source 1..495: mol_type = other DNA
atggacggcagcggcgagcagccccggggcggcggccccaccagctcggagcagataatgaagacaggtgcattgctgctgcagggatttattcaggatagggcaggcagaatgggaggtgaagcccctgagctggctctggatccagtcccccaagacgcatctacaaagaagctgagtgaatgcctgaaaaggattggtgacgaactagatagcaatatggagttgcagcggatgatagcagctgtggatactgatagccccagggaagtgtttttccgggtggcggctgatatgtttagcgacggcaactttaactggggtagagttgtcgctctcttctattttgccagtaagctggtgctgaaagcgggtgttaagtggcgagatttaggaagtttgcagcctctgccaccgggctttaaacgcttcacatgcctgagcatcccgagatcttgggactacaggccttgcgcaccccgttgtaggaactag

SEQ ID NO: 22998 - DNA, 1806 bp, synthetic construct
  misc_feature 1..1806: note = Description of Artificial Sequence: Synthetic coding sequence
  source 1..1806: mol_type = other DNA
atggcctacgacgacagcgtgaagaaggaggactgcttcgacggcgatcacaccttcgaggacatcggccttgcagcaggaagatcgcaaagggagaaaaagaggtcttacaaggacttcttgagggaggaggaggagattgccgcccaggtgagaaattcatccaaaaagaagttgaaggatagcgagctgtatttcctgggtaccgatacccataaaaagaagagaaagcattcctccgacgactattattatggtgacatttcgagcctagaatcgtcacagaaaaaaaaaaagaaatcaagtcctcagtccacagacacagccatggacctcctcaaagctatcacctctccacttgcggccggtagcaagccatctaagaaaacgggagagaaatccagcggcagcagttctcatagcgaatcgaagaaggagcatcaccgtaagaaggtgtcaggaagttctggagagctgccccttgaggacggtggatctcacaaatccaaaaaaatgaaacccctgtacgtgaataccgaaacgctgactctaagggagccagacggccttaaaatgaagctcattctatcccctaaggaaaaagggtcgtcttccgtagatgaggaaagtttccaatatcccagccaacaggccacagttaagaaaagttctaagaagagcgcccgcgatgaacagggggcgctgttgcttggacatgagctccagtccttcctcaagacggccagaaagaagcacaaatcctcctctgatgcccattctagtccaggaccagagggctgcggttccgacgcgtcacagttcgccgagtcgcatagcgctaacctggacttgtccggactggaacctatccttgtcgagtccgactcaagctccggaggtgaactggaggcaggcgagctagtgatcgacgatagttatagggagataaaaaaaaagaaaaagtctaaaaaatcgaagaagaagaaggacaaggagaaacataaagagaagcgacacagcaagagtaaaaggagtctcgggttgtctgccgtgcccgtgggtgaagttactgtgacgtcaggccctcctccctccataccatacgcgggagccgcagcccctccattaccattacccggtctccacacagacggccattccgagaaaaagaaaaagaaagaggagaaggataaagagcgcgaacgtggcgagaagcccaaaaaaaagaacatgtctgcttaccaggtattttgtaaagagtacagggtgaccatcgtcgcagaccatccgggcatcgatttcggtgagttaagcaagaaactggcggaggtgtggaaacagctcccagaaaaagacaagttgatctggaaacagaaagcacaatatttgcagcacaaacagaacaaggccgaagcaactactgttaaacggaaagcgtcttcttccgaagggtctatgaaggtgaaagcaagcagtgtcggagtgctgtcacctcaaaaaaaatcgcctcctacaacgatgctgctcccagcctcgcccgccaaagcccccgagactgaacccatcgatgtggcagctcatttgcagctcttgggagagtcactgagtcttataggccatcgattgcaggagacagaaggcatggtggccgtctccggctccctgtccgtactcctcgattctataatttgtgcactcgggcccctggcctgtctgactacccagttaccagaattaaatggctgcccgaagcaggtgctcagtaataccttggataatatcgcctatattatgccaggcctttag

SEQ ID NO: 22999 - DNA, 702 bp, synthetic construct
  misc_feature 1..702: note = Description of Artificial Sequence: Synthetic coding sequence
  source 1..702: mol_type = other DNA
atgagccagagcaaccgggagctggtggtggacttcctgagctacaaactgagccagaaagggtattcttggagtcaatttagcgacgtagaagaaaatagaaccgaggcgcctgaaggcacagagtccgaaatggaaacccctagcgctatcaacgggaacccgtcctggcacttggctgattctcccgccgtgaatggcgcaacaggacactcttcatctctcgatgcccgcgaagtgatacccatggcggcggttaagcaggctctgcgggaagcaggggatgaatttgaactgagatacagacgggcgttcagtgatttaacatcgcagctgcatataaccccagggaccgcttatcagtcttttgagcaagtagttaacgagctgtttcgcgacggcgtaaactggggccgcatagtagccttcttctcatttggaggcgctctctgtgtggagtctgttgacaaagaaatgcaggtcctggtgtcaagaattgccgcatggatggcgacgtacctgaatgaccacctggagccttggatacaagagaacggcggatgggacacatttgttgagctttacggtaacaacgctgcagctgagagtagaaaaggtcaggaacgattcaatcggtggtttctgaccgggatgaccgtagcaggggtggtgttactgggatccctgttctcccggaaatag

SEQ ID NO: 23000 - DNA, 513 bp, synthetic construct
  misc_feature 1..513: note = Description of Artificial Sequence: Synthetic coding sequence
  source 1..513: mol_type = other DNA
atgagccagagcaaccgggagctggtggtggacttcctgagctacaagcttagccagaagggctacagctggtcccagttttctgatgtggaagaaaaccgcactgaggcacctgagggcaccgaatctgagatggaaacgcctagcgccattaacgggaacccttcatggcatttggccgattcgccggccgtgaatggggccacggggcattcaagctctttggacgccagagaagtgattcctatggccgcagtaaagcaggccctgcgggaggcaggcgacgagttcgagctacgttatcgaagagctttctctgacctgactagtcaactgcacattactccaggcaccgcctatcagagcttcgagcaagacacgttcgtcgaactctacggcaacaacgcagcagcagagtcccgtaaaggccaagaacgctttaatcggtggtttttgaccggtatgacggttgccggggtggtcttgctcggctccctgttttcgcgaaagtag

SEQ ID NO: 23001 - DNA, 702 bp, synthetic construct
  misc_feature 1..702: note = Description of Artificial Sequence: Synthetic coding sequence
  source 1..702: mol_type = other DNA
atgagccagagcaaccgggagctggtggtggacttcctgagctacaaactttcacagaagggatactcatggagccagttctcagacgtcgaagaaaatcgcactgaggcgcccgagggaaccgagagcgagatggaaaccccaagcgcaatcaatggtaacccctcatggcatctcgccgactcacctgccgtgaacggggcaaccggccattcctcatcattagacgcacgggaagtgattcccatggctgcagtgaaacaggccctcagagaggcaggcgacgagtttgaactacggtaccgtagggccttctccgatctcacatcacaactacatattactcctggcaccgcttaccaaagctttgagcaggtagtaaatgagctgtttcgggatggtgtgaactggggacgcattgtggcctttttttcctttgggggcgcactctgcgtagaatctgtggataaggagatgcaggtgctggtgagcagaatcgctgcctggatggcaacctatctgaatgaccaccttgagccttggatccaggaaaatgggggctgggataccttcgttgaactctatggcaataatgcggctgccgaatcccgtaagggtcaggagcggtttaatcgctggtttctgacagggatgaccgtggccggggtcgtgctcctgggatccctgttttctcgaaagtag

SEQ ID NO: 23002 - DNA, 567 bp, synthetic construct
  misc_feature 1..567: note = Description of Artificial Sequence: Synthetic coding sequence
  source 1..567: mol_type = other DNA
atgagccagagcaaccgggagctggtggtggacttcctgagctacaaattaagccagaagggctacagctggtcacagtttagtgacgtcgaggaaaacaggactgaggcgccagaaggcacagaatctgaaatggagaccccgagcgccataaacggcaacccttcctggcacctcgccgactcccccgccgtgaacggcgcaacggggcattcctctagcttagatgcgcgagaagtaattccaatggcagccgtcaagcaagcactgagagaggcaggtgatgagttcgaactgaggtacaggcgtgcattttccgaccttacatcacaactgcatatcacccctggtaccgcttatcaaagctttgagcaggttgtgaatgagctttttcgtgacggtgtgaactggggaagaatagtggctttcttctcattcgggggagcgctgtgtgtagaaagcgtggacaaggaaatgcaggtcctggtgtctcgcatagccgcttggatggcgacatatttgaatgaccacctcgaaccttggattcaagaaaacggaggctggtag

SEQ ID NO: 23003 - DNA, 702 bp, synthetic construct
  misc_feature 1..702: note = Description of Artificial Sequence: Synthetic coding sequence
  source 1..702: mol_type = other DNA
atgagccagagcaaccgggagctggtggtggacttcctgagctacaagctgtcacagaaagggtattcttggtcgcagttctccgatgtggaagagaatcgcaccgaagctccagaagggacagaatcagagatggaaacaccatcagcaattaacggcaatccctcttggcacttggctgattcccccgcagtgaatggagccaccggacacagtagttctctcgatgcacgggaagttatcccaatggccgctgtgaagcaggcactcagagaggcgggggacgagtttgagcttcgttacagacgagctttctctgacctaactagccagttacacatcacgcctggcacagcataccagagtttcgaacaagtcgtgaacgagctatttcgagacggcgtgaactggggacgaatcgtagcctttttttctttcgggggcgcactctgtgtcgagagtgtggacaaggagatgcaggtgctcgtgtcccggattgcggcctggatggctacttacctgaatgatcatctggaaccatggatccaagagaatggaggatgggacacattcgtcgagttgtacgggaacaacgccgcagcagagagtcgaaagggccaggagcgctttaaccggtggtttctgacgggaatgacggtggctggcgtggtcctgttggggagcctgttttcacgaaaatag

SEQ ID NO: 23004 - DNA, 567 bp, synthetic construct
  misc_feature 1..567: note = Description of Artificial Sequence: Synthetic coding sequence
  source 1..567: mol_type = other DNA
atgagccagagcaaccgggagctggtggtggacttcctgagctacaagctaagtcagaaagggtacagctggtcccagttttccgatgtcgaggagaatagaactgaggcaccagagggtacagaatccgaaatggaaactcctagcgcgattaacggaaaccctagttggcacttggccgactcaccggctgtgaacggagcgactggccattcttcgagcttggatgccagagaggtaatcccaatggccgccgtgaagcaggcactgagagaggcaggtgatgagttcgagctaagataccgtagagccttttcagaccttacctcgcagctgcacatcacacctggtaccgcctaccaaagtttcgaacaggtggttaatgaactctttcgagatggagtcaattggggcagaatcgtggccttctttagcttcggaggtgccttgtgtgttgagtcggttgataaggagatgcaagttctcgtgagtagaatcgcagcctggatggcaacatatctgaatgaccacctggagccttggattcaagaaaacgggggctggtag

SEQ ID NO: 23005 - DNA, 147 bp, synthetic construct
  misc_feature 1..147: note = Description of Artificial Sequence: Synthetic coding sequence
  source 1..147: mol_type = other DNA
atgagccagagcaaccgggagctggtggtggacttcctgagctacaaactgtcacagaagggctattcttggtcccaattcagcgatgtagaggagaacagaaccgaggcgcctgaggggacagagtctgaaatggaaactccctag

SEQ ID NO: 23006 - DNA, 546 bp, synthetic construct
  misc_feature 1..546: note = Description of Artificial Sequence: Synthetic coding sequence
  source 1..546: mol_type = other DNA
atgagccagagcaaccgggagctggtggtggacttcctgagctacaagctttcccaaaagggctatagctggagtcagttcagcgacgtcgaggagaatagaacggaggcccccgaggggaccgagtcggagatggagaccccatctgccattaatggcaacccttcttggcacttggccgactcgcccgcagtgaatggcgccactgggcactcaagctcgctggatgccagagaagtgattccgatggccgcagtcaaacaagcgctgcgcgaagccggtgacgagtttgagctaaggtataggagggcctttagtgatcttacaagtcagcttcatattactccaggcacagcatatcagtcttttgagcaggtggtgaatgagttgtttagggacggcgtcaactgggggcgaatcgttgcgttctttagcttcggcggtgctctctgcgttgagtctgtcgacaaggagatgcaggtgcttgtgtctcggattgccgcttggatggccacatatctaaatgatcatctggaaccctggtag

SEQ ID NO: 23007 - DNA, 618 bp, synthetic construct
  misc_feature 1..618: note = Description of Artificial Sequence: Synthetic coding sequence
  source 1..618: mol_type = other DNA
atgagccagagcaaccgggagctggtggtggacttcctgagctacaaactgtcacagaagggctactcatggtcacaatttagcgacgtggaggaaaacaggacggaggctcctgaaggcactgagtcggagatggagaccccaagtgctattaatgggaatccatcctggcacctggccgacagtccagcagtgaacggagcaacagggcacagcagcagcctcgatgcccgtgaggtgatacctatggctgcggtgaagcaggctttaagggaggccggtgatgaatttgagctgcggtacagaagggcattttctgatctgacttcccagctgcacattacaccgggaactgcgtaccaatccttcgagcaggtggtgaatgagttgtttagggatggggtgaactggggacgaatcgttgcattcttcagcttcgggggtgccctgtgcgtggagagcgtggacaaagagatgcaagtactggtatctaggatcgcagcctggatggcaacctacctgaatgaccacctcgagccatggattcaggagaacgggggctgggatacgttcgtcgagctatacgggaacaatgctgccgcggaatcccgcaagtag

SEQ ID NO: 23008 - DNA, 567 bp, synthetic construct
  misc_feature 1..567: note = Description of Artificial Sequence: Synthetic coding sequence
  source 1..567: mol_type = other DNA
atgagccagagcaaccgggagctggtggtggacttcctgagctacaagctcagccagaaaggatattcttggtctcaattttccgatgttgaggaaaatcggaccgaagccccagagggaacagaaagtgaaatggagactccttcagccattaatggaaatccaagttggcacttagcggatagcccagccgtcaatggggcgaccggccactcctccagtttagacgctcgggaagtcattcccatggccgcggtgaaacaggccttgagagaggctggggacgagttcgaactgagataccggagggccttttccgacctgacgagtcagctgcatatcacacccgggacagcctatcagagtttcgaacaggtggtcaacgagcttttccgggatggtgtcaactggggaagaatagtggccttttttagctttgggggtgctttgtgtgtcgagtccgtagataaagagatgcaagtgctggtgtcccgaatcgcggcatggatggccacctaccttaatgaccacctcgaaccatggatccaggagaatggagggtggtag

SEQ ID NO: 23009 - DNA, 615 bp, synthetic construct
  misc_feature 1..615: note = Description of Artificial Sequence: Synthetic coding sequence
  source 1..615: mol_type = other DNA
atggtggaccagctgcgggagcggaccaccatggccgaccccctgagagagaggactgaactgcttcttgctgattacctaggttactgtgccagggagcccggcacgcccgagcccgccccgtccactcctgaggctgccgtgttacggtccgcagccgcacgtctgaggcaaattcacagatctttctttagtgcctatttgggctatcctggcaacaggtttgagctggtagcactgatggccgactccgttctctctgactctcccggcccaacctggggccgggtggtcacactggtgaccttcgccgggacgttactggaacgcggtcccctggtcactgctagatggaagaagtggggattccagccgaggttaaaggaacaagagggagatgtggcaagggactgtcagagactggtagccctgctgagtagcaggctaatgggacaacacagagcatggctccaggctcagggagggtgggacggtttctgtcatttttttagaacgccatttcctctcgccttctggagaaagcagctcgtgcaggcttttctgtcatgtctcttaacaacagcctttatctacctgtggactcgactgttgtag

SEQ ID NO: 23010 - DNA, 417 bp, synthetic construct
  misc_feature 1..417: note = Description of Artificial Sequence: Synthetic coding sequence
  source 1..417: mol_type = other DNA
atggccaagcagcccagcgacgtgagcagcgagtgcgaccgggaggggcggcagctgcagccagcggaacgacctcctcagctcaggcctggcgccccaactagtctgcagaccgaaccccaggacagatctcccgcccctatgagctgtgacaagagcacccagacaccttcccctccatgtcaggcattcaaccactatctctcagccatggcctccatgaggcaggccgagccagcagatatgagacccgaaatctggatagcccaggaactgcgccgcattggagatgagtttaatgcctattacgctaggagggtatttctgaataactaccaggccgcagaggaccaccccagaatggtgatcttgcgcctgctgcgatatatcgtccggctcgtgtggagaatgcattag

SEQ ID NO: 23011 - DNA, 339 bp, synthetic construct
  misc_feature 1..339: note = Description of Artificial Sequence: Synthetic coding sequence
  source 1..339: mol_type = other DNA
atggccaagcagcccagcgacgtgagcagcgagtgcgaccgggagggaagacagctgcaacctgccgaaagacctccgcagttgcgccccggggccccaacctccctccagacggaaccgcaggatcggtctccagctcctatgagctgcgacaagtccactcagaccccatcaccaccgtgccaggcctttaatcactatctaagcgcaatggtggtgattctcgaagacataggcgacctgagtctttgttttggcttcatcttcactggactagacctgtatggacatcatcatagccaggacaccgaacagctcaaccacaaagatttctcctag

SEQ ID NO: 23012 - DNA, 519 bp, synthetic construct
  misc_feature 1..519: note = Description of Artificial Sequence: Synthetic coding sequence
  source 1..519: mol_type = other DNA
atggccaagcagcccagcgacgtgagcagcgagtgcgaccgggaggggcgccagctgcagccggccgaacgcccccctcagctgcgcccaggtgcgcccacctctcttcaaacggagccccaagggaatcccgagggtaatcatggcggagagggggactcttgcccacacggcagcccgcagggccctctggctccccctgccagtccaggcccttttgccactcgctcccccctgtttatcttcatgcgacgttctagtctgctgtcgaggagcagttcaggttacttcagtttcgatactgaccggtcccccgcccccatgtcatgtgataaatccacacagacgccttcccccccttgccaggctttcaaccattatctcagcgcgatggcgtccatgcgtcaggccgaacctgcagatatgaggccagagatttggatagcacaggagctaaggcgtatcggggatgagtttaacgcctactacgcaaggcgcatgcccctcccgcccgactag

SEQ ID NO: 23013 - DNA, 219 bp, synthetic construct
  misc_feature 1..219: note = Description of Artificial Sequence: Synthetic coding sequence
  source 1..219: mol_type = other DNA
atggccaagcagcccagcgacgtgagcagcgagtgcgaccgggagggccgccaattgcaacctgctgagcgccctccacaactacgcccaggggccccgaccagtttgcagactgagccccagggcaaccctgaaggtaaccatggcggagagggagattcttgcccacatggtagcccccagggacctctggcgccacctgcctcgcccggcccatag

SEQ ID NO: 23014 - DNA, 258 bp, synthetic construct
  misc_feature 1..258: note = Description of Artificial Sequence: Synthetic coding sequence
  source 1..258: mol_type = other DNA
atggccaagcagcccagcgacgtgagcagcgagtgcgaccgggagggaagacaactgcagccagctgaaagaccccctcagttaagaccgggcgcccccacgagtctccagacagaaccacaggccagcatgcgtcaggccgagcccgcagacatgcgccctgaaatctggattgcgcaggaacttcgaagaatcggtgacgagttcaatgcctattatgctcggcggctggccaagctgctcgcatccagtacttag

SEQ ID NO: 23015 - DNA, 597 bp, synthetic construct
  misc_feature 1..597: note = Description of Artificial Sequence: Synthetic coding sequence
  source 1..597: mol_type = other DNA
atggccaagcagcccagcgacgtgagcagcgagtgcgaccgggagggaaggcagctgcagccggccgagcgtcctccccagctacggcccggcgccccaacttcacttcagactgagccgcagggcaatcccgaaggtaaccatggaggggaaggcgatagttgcccacatgggagtccacaaggacctttggcaccacccgccagtcccgggccctttgctactcgctctccattattcatcttcatgaggaggtcttccctcttaagccggtcgtcaagcggctatttttctttcgacacagatagaagcccggcacctatgagctgcgacaaatccactcagaccccgtcacctccctgtcaggcctttaaccactatctctctgcaatggcttctatgagacaggccgagccagcagatatgaggcctgagatctggattgcccaggaactgcggagaatcggcgatgagtttaacgcctactatgcccggagggtgtttctgaataactaccaggccgccgaggaccacccaagaatggtgattctgcggctgttgcgctacatcgtgagactggtgtggcgtatgcactag

SEQ ID NO: 23016 - DNA, 369 bp, synthetic construct
  misc_feature 1..369: note = Description of Artificial Sequence: Synthetic coding sequence
  source 1..369: mol_type = other DNA
atggccaagcagcccagcgacgtgagcagcgagtgcgaccgggaggggaggcagctgcagccggctgaaaggcctccacagctgcgtcccggcgctcctacttctcttcagacagaaccacaaggcaaccccgagggcaaccatgggggcgagggcgacagctgtccacatgggtccccacagggtccactagcgcctcctgccagtcctggcccctttgcaactagatctcccctgttcatcttcatgcgcaggagcagcctgttgtctcggtccagttccggatattttagttttgacacagataggtcacctgcacctatgtcttgtgataaatctactcagaccccatcaccgccttgtcagtag

SEQ ID NO: 23017 - DNA, 222 bp, synthetic construct
  misc_feature 1..222: note = Description of Artificial Sequence: Synthetic coding sequence
  source 1..222: mol_type = other DNA
atgcggcaggccgagcccgccgacatgcggcccgagatctggatcgcccaggaactccggcgaatcggggatgagttcaacgcctactatgcccgaagagtgatgatgtttagcttgcctgctttcctgctgacaccctcaccttccacgttgtatttcttcaagaagactgttacatcatgtaattatatgctgatcctcgagatgattacagtggcttag

SEQ ID NO: 23018 - DNA, 243 bp, synthetic construct
  misc_feature 1..243: note = Description of Artificial Sequence: Synthetic coding sequence
  source 1..243: mol_type = other DNA
atggccaagcagcccagcgacgtgagcagcgagtgcgaccgggagggccggcagcttcagcctgccgagaggccgccccagcttcggccaggggcccctacgagcctccaaaccgagccgcaggataggtcgccagcacccatgtcctgcgacaagtcaacccaaacaccctctcccccgtgtcaggcttttaatcattacctgagcgctatggtgagagaaattgaggaagtggtggtctag

SEQ ID NO: 23019 - DNA, 408 bp, synthetic construct
  misc_feature 1..408: note = Description of Artificial Sequence: Synthetic coding sequence
  source 1..408: mol_type = other DNA
atggccaagcagcccagcgacgtgagcagcgagtgcgaccgggagggcaggcaactgcagcccgccgaaagaccaccgcagctgcgaccaggagcacctacttcccttcaaaccgagcctcagggaaaccctgaaggaaaccatgggggggagggagattcttgcccacacgggtccccacagggacctttagcaccacctgcgtcccccggtccttttgcaactaggagccctttatttatctttatgaggaggagcagtctgctgtcccggagcagcagcgggtatttttcatttgatactgataggagccccgcccccatgtcttgtgacaaatccacccaaacaccatcgccaccttgccaggccttcaaccactatttgagtgcaatggccaattgggactag

SEQ ID NO: 23020 - DNA, 423 bp, synthetic construct
  misc_feature 1..423: note = Description of Artificial Sequence: Synthetic coding sequence
  source 1..423: mol_type = other DNA
atggccaagcagcccagcgacgtgagcagcgagtgcgaccgggaggggcgccagctgcagccagccgagcgcccccctcaacttcgacccggtgcacccacgagcctgcaaactgagccacaaggcaatcctgaagggaaccatggaggcgagggtgactcctgcccccatgggagcccgcaggggcccctggcacccccggccagccccgggccctttgctacaaggtcacctttgttcattttcatgcgcaggagctcgctattaagtaggagcagtagtggttatttctcctttgacaccgatcgctcacctgctcccatgagttgtgataagtctactcaaactcccagcccaccttgtcaggcctttaaccactacttatccgcaatggtgcgcgagattgaggaagtagttgtctag

SEQ ID NO: 23021 - DNA, 291 bp, synthetic construct
  misc_feature 1..291: note = Description of Artificial Sequence: Synthetic coding sequence
  source 1..291: mol_type = other DNA
aagcagcccagcgacgtgagcagcgagtgcgaccgggagggccggcagctgcagccagctgagcgaccacctcaactgagaccaggggccccaacgtctctgcagactgagccccaggacagaagccccgcacccatgtcatgtgataagtcaacccagactcccagtccaccttgccaagcctttaaccattatctctccgcaatggatgacagcgcaggcagctctctaaggattgcgcttcatcgcgaggtacagtggcctttgaagtggttggcaaagtcatcctag

SEQ ID NO: 23022 - DNA, 249 bp, synthetic construct
  misc_feature 1..249: note = Description of Artificial Sequence: Synthetic coding sequence
  source 1..249: mol_type = other DNA
atggccaagcagcccagcgacgtgagcagcgagtgcgaccgggaggggcggcagctgcagccagcagagaggcctccacagttgaggcctggcgccccaacctccctgcaaactgagcctcaggcctcaatgagacaggccgaacctgctgacatgaggcccgaaatctggattgctcaggaacttcggagaatcggtgacgaatttaatgcatactacgccagaaggatgcctctacccccagactag

SEQ ID NO: 23023 - DNA, 582 bp, synthetic construct
  misc_feature 1..582: note = Description of Artificial Sequence: Synthetic coding sequence
  source 1..582: mol_type = other DNA
atggccacccccgccagcgcccccgacacccgggccctggtggccgattttgtggggtataagctgcggcagaaggggtacgtgtgcggtgctggtcccggagagggtcccgctgctgaccccctgcaccaggcaatgcgagccgcaggtgatgaattcgagactcgattccgccgcactttctctgacttagccgcacaacttcacgtgacgccaggcagcgcccagcaacgctttacccaggtgagcgacgagctgttccaagggggacctaactggggaagactagttgccttttttgtgttcggtgccgctttgtgtgctgagtccgtaaataaagagatggagccattggtgggacaagtccaggaatggatggtggcttatcttgagacccagctggccgattggatccactcgagtggcggctgggctgaatttacagcgctttatggtgacggtgccctggaggaagcccgacggctcagggaggggaattgggcctctgttagaacagtactcaccggggccgtcgccctgggcgcacttgttactgtgggagccttcttcgcttcgaagtag

SEQ ID NO: 23024 - DNA, 156 bp, synthetic construct
  misc_feature 1..156: note = Description of Artificial Sequence: Synthetic coding sequence
  source 1..156: mol_type = other DNA
atggccacccccgccagcgcccccgacacccgggccctggtggccgatttcgtcggctacaagctcaggcagaagggatacgtgtgtggggcagggccaggagaagggcctgccgctgatccattgcaccaggctatgcgagccgccggagactag

SEQ ID NO: 23025 - DNA, 219 bp, synthetic construct
  misc_feature 1..219: note = Description of Artificial Sequence: Synthetic coding sequence
  source 1..219: mol_type = other DNA
atggccacccccgccagcgcccccgacacccgggccctggtggccgactttgttggatacaagttgagacagaagggttacgtgtgtggtgccggccctggagaaggcccggcggccgatcccctgcatcaggctatgcgggcggccggagatgagttcgagacccgcttccgtcggacatttagcgatcttgcggcccagctgcacgttaccccctag

SEQ ID NO: 23026 - DNA, 450 bp, synthetic construct
  misc_feature 1..450: note = Description of Artificial Sequence: Synthetic coding sequence
  source 1..450: mol_type = other DNA
atggccacccccgccagcgcccccgacacccgggccctggtggccgactttgtggggtataaacttcggcagaaagggtacgtatgcggggccggccccggcgaaggtccagccgcggaccctctccaccaggccatgagagccgccggcgacgaattcgagacccgattcagacggaccttttcagacttagctgcgcagcttcacgttaccccaggctcagcacagcaacgatttacgcaagtcagtgacgagctttttcagggcggccctaactggggtagactggttgcatttttcgtgttcggcgcagccctgtgcgctgaaagcgtgaacaaggagatggaaccccttgtaggccaggtgcaggagtggatggtcgcatatctcgagactcagctggccgactggatccacagctctggggggtgggctgagtttacagcatag

SEQ ID NO: 23027 - DNA, 435 bp, synthetic construct
  misc_feature 1..435: note = Description of Artificial Sequence: Synthetic coding sequence
  source 1..435: mol_type = other DNA
atggccacccccgccagcgcccccgacacccgggccctggtggccgatttcgtaggatacaagctgcggcagaagggttatgtctgtggcgcgggacccggagagggccccgctgccgatcccctgcatcaggcaatgcgcgccgccggagatgagtttgagacccgcttccggcgcactttttctgatctggctgcccaactgcacgtcacccccgggagtgctcaacagaggtttactcaggtttctgacgagttattccagggcggacccaactggggacgcctagtggcgttcttcgtgtttggcgccgcattatgtgccgagtccgtgaacaaggaaatggaaccactcgtgggtcaagtccaggagtggatggtggcctaccttgagactcagcttgccgactggattcactctagtggcggctggtag

SEQ ID NO: 23028 - DNA, 528 bp, synthetic construct
  misc_feature 1..528: note = Description of Artificial Sequence: Synthetic coding sequence
  source 1..528: mol_type = other DNA
atgaccgactgcgagttcggctacatctaccggctggcccaggactacttgcagtgtgtgctacagatcccacaacctgggtctgggccttccaagaccagtcgcgttctccaaaatgtggctttctctgtgcaaaaggaggtcgaaaagaacctaaagtcatgcttggacaatgtaaatgttgtgtctgtggataccgcccgtacgctgtttaaccaagtgatggagaaagagttcgaagacggaattattaattggggtaggattgttacaatcttcgcctttgagggtattctcatcaagaaattgctgaggcagcaaatcgcacctgatgttgacacgtataaagagatctcctattttgtggccgaatttatcatgaataatactggagaatggatccgccagaatggaggatgggaaaatggctttgtaaagaagtttgaaccaaagagcggctggatgaccttccttgaagtcacagggaagatctgtgaaatgctctctctcctgaagcagtactgctag

SEQ ID NO: 23029 - DNA, 492 bp, synthetic construct
  misc_feature 1..492: note = Description of Artificial Sequence: Synthetic coding sequence
  source 1..492: mol_type = other DNA
atgaccgactgcgagttcggctacatctaccggctggcccaggactatctgcagtgtgttctgcaaatccctcagcccggttctggtccatctaaaacgagtagggtcctgcagaatgttgcgttctctgtccagaaggaggtcgaaaagaatctcaagagctgtttggacaatgtgaatgtagtctccgttgatacagctaggacactctttaaccaggtgatggagaaggagttcgaagacggtattattaactggggccggatcgttacaattttcgccttcgagggaattctcattaagaagctcctccgacagcagatagcccctgacgttgacacgtacaaagagatatcatacttcgtggcggagtttataatgaataatacaggagaatggatcagacagaacggtggctgggggaaatggcacaatcacacacccatgttagtggaatctgtcgctcataagaaacggaagatggccttatag

SEQ ID NO: 23030 - DNA, 726 bp, synthetic construct
  misc_feature 1..726: note = Description of Artificial Sequence: Synthetic coding sequence
  source 1..726: mol_type = other DNA
atgtgcagcggcgccggcgtgatgatggcccggtgggccgcccgggggcgcgccggttggagatcaactgttagaatcctgagtcccctgggccattgcgagcccggtgtgagccgttcctgccgtgccgcccaggctatggactgcgaggtcaataacggatccagcttaagagatgagtgtattacaaacctcctggtctttggcttcctccagtcgtgttcagacaattcatttcgacgcgaacttgatgcgttaggccacgagcttcccgtccttgcgccacaatgggagggatatgatgagctgcagacagatggaaatagatcttctcattcccggcttggaaggatcgaggcagactctgagtcgcaggaagatatcataagaaacattgccagacatctggctcaagtaggtgattctatggatagatcaattcctcccggtctggtcaatggcctggccctgcagcttcgtaacacctccagaagcgaggaggataggaatcgtgatctcgccacagcattagaacagctcctccaggcctacccacgggacatggaaaaggagaagaccatgcttgtccttgctctgctgctggccaagaaggtcgccagccacaccccgtcattgttaagagatgtgtttcataccacagtgaactttatcaaccaaaatcttagaacttatgtcaggtctctggccagaaacgggatggattag

SEQ ID NO: 23031 - DNA, 414 bp, synthetic construct
  misc_feature 1..414: note = Description of Artificial Sequence: Synthetic coding sequence
  source 1..414: mol_type = other DNA
atggactgcgaggtgaacaacggcagcagcctgcgggacgagtgcataaccaacttattggtgttcggttttctgcagagttgtagcgataacagcttccgcagagagctagacgcccttgggcatgagctgcccgtgctggccccccagtgggagggctacgatgagctccagaccgatggcaacaggtcatctcattctcgcctgggcagaatagaggctggagcctcagacaacaacacagcctccgccgaggaggaaacagaagcagcaggcagcgtcgcggtcgagcgtggactgcacggggccgctactgttattttgaaggtcaagaagacctctagcggaattctgcctggaacttccccaaggagtgggacagcttggacagttgccagcctgagggcctggtag

SEQ ID NO: 23032 - DNA, 300 bp, synthetic construct
  misc_feature 1..300: note = Description of Artificial Sequence: Synthetic coding sequence
  source 1..300: mol_type = other DNA
atggaccggagcatcccccccggcctggtgaacggcctggccctgcaactgcggaatacttcaaggtcagaagaggacagaaaccgcgacctcgctacagccctcgagcaactgctccaggcgtacccccgcgatatggagaaagaaaagaccatgcttgttctggccttgttgttggccaagaaggtggcatcccatactccttctttgctgcgcgatgtgttccacaccacggtcaattttattaatcagaacctacgcacttatgtgaggtcgctggcaagaaatggcatggattag

SEQ ID NO: 23033 - DNA, 300 bp, synthetic construct
  misc_feature 1..300: note = Description of Artificial Sequence: Synthetic coding sequence
  source 1..300: mol_type = other DNA
atggaccggagcatcccccccggcctggtgaacggcctggccctgcaactgcgaaatacctccagaagcgaagaagacaggaatagagacttagccacagccctcgaacagctgctccaggcctaccctcgggacatggaaaaagagaaaaccatgctggtgctcgccttactgctggcaaaaaaagtcgcgtcccacaccccttccctcttaagggatgtcttccatactactgtgaactttatcaaccaaaacttaaggacgtacgtgaggtcccttgccagaaacggaatggattag

SEQ ID NO: 23034 - DNA, 588 bp, synthetic construct
  misc_feature 1..588: note = Description of Artificial Sequence: Synthetic coding sequence
  source 1..588: mol_type = other DNA
atggactgcgaggtgaacaacggcagcagcctgcgggacgagtgcatcacaaacctgctagttttcggcttcctccagagctgctccgacaactcattcaggagagagctggatgccctggggcacgagctccccgtgttagccccgcaatgggagggatatgacgagctccagactgacggcaatcgcagctctcattctcgactgggtagaattgaagctgactcagaaagtcaggaggatattataagaaatatagcccgccatttggcccaggtgggggattcaatggatcgcagtatcccacccggtctggtgaatggactcgccctccagttgagaaacacttctagaagtgaggaggatcgaaatcgtgacctggccacggccctggagcagctcctccaggcttaccctagggacatggagaaagagaaaacgatgttagtgctcgccctgctactagccaagaaggtcgcctctcacacccctagtctgctgagagacgtgtttcataccacggtgaatttcataaaccagaatttgcgcacttatgtacgttcccttgcaaggaacggtatggactag

SEQ ID NO: 23035 - DNA, 588 bp, synthetic construct
  misc_feature 1..588: note = Description of Artificial Sequence: Synthetic coding sequence
  source 1..588: mol_type = other DNA
atggactgcgaggtgaacaacggcagcagcctgcgggacgagtgcatcacaaacctgctggtcttcggatttcttcaaagttgcagtgataattcctttagaagagagcttgacgcactagggcatgagctccccgtcctggcaccccagtgggaaggctatgacgagctgcagacggacggaaaccgtagctcacatagcagactcggtaggattgaggcggatagcgagagtcaggaggacattattcgcaacatcgccaggcacctggcccaagtcggagacagcatggataggtctatcccacctggattggtcaacgggctcgcccttcagctgcgaaatacttccaggtccgaagaagaccgaaatcgcgacctcgcgaccgctcttgaacagttgctccaagcatacccgcgcgatatggagaaggaaaaaacaatgctggtgcttgctttacttctggccaaaaaagtggcgtcacacactccctctttattaagggatgtgttccatacgacggtgaactttattaatcagaatctcaggacatacgtccggtccttagcaagaaatggcatggattag

SEQ ID NO: 23036 - DNA, 1353 bp, synthetic construct
  misc_feature 1..1353: note = Description of Artificial Sequence: Synthetic coding sequence
  source 1..1353: mol_type = other DNA
atggaggagccccagaagagctacgtgaacaccatggacctggagcgcgacgagcccttaaaatcaacaggcccgcagatttccgtctcagagtttagctgccactgctgttacgacatcctggtcaatcctaccaccctgaactgcggtcatagcttttgcagacactgcctcgccctgtggtgggcatctagtaaaaagaccgagtgccccgagtgtagggaaaagtgggaagggtttcccaaggtttctatactcctgcgtgatgcaattgaaaaattgttccctgacgccatcagactgagatttgaggacattcagcagaataatgacatcgttcaatctctggccgctttccaaaagtacggtaatgatcaaatcccacttgctcccaacacagggagagctaatcagcagatgggcggaggcttcttttcgggcgttcttaccgccctcactggagtggccgtggtgttgctggtgtaccactggtcaagtcgcgagtcagagcacgatctcttggttcataaggccgtggctaagtggacggccgaggaggtggtcttgtggctcgagcagctaggtccatgggcctccctgtaccgggagagatttttgtcagaacgagtgaatggtcggctgctgcttacgctgaccgaagaagagttctccaagacgccgtacacaatcgaaaatagttcccaccgcagggctattctaatggagctggaacgcgttaaagccttaggggttaaacctcctcagaacctgtgggagtacaaagcagtcaaccctggcaggagcctatttctgttgtatgccctcaagtcatcacccaggctaagtctgttatatttgtacttattcgattatacagatacatttttaccatttattcacactatatgtcctctgcaagaggacagctccggggaggatattgttaccaagcttctcgaccttaaagaaccgacctggaaacagtggcgtgagtttttggtcaagtattcattcttgccatatcagctgatcgctgagttcgcgtgggattggctggaagtgcactactggaccagccgtttccttatcatcaatgccatgcttctgtcagtgctcgagctgttcagcttctggcggatttggtcaagaagtgagctaaagacagtgcctcagcgcatgtggtcgcacttctggaaagtgtccacccagggtctgtttgttgcaatgttttggcccctcattccacagttcgtttgtaactgcctgttctattgggctttgtactttaaccctatcattaacattgacttagtcgttaaggagctccgtcgactggagactcaagtcctctag

SEQ ID NO: 23037 - DNA, 969 bp, synthetic construct
  misc_feature 1..969: note = Description of Artificial Sequence: Synthetic coding sequence
  source 1..969: mol_type = other DNA
atggtgggcatcttcaaggagaaccggatgagccggatgcagcggaaaatgggacggtttccgcagtcgcagtactccccacaagttgttttgctagtgtatcactggtcgagccgggagtccgaacacgacctccttgtgcacaaagccgtcgcaaaatggactgcagaagaagtggtgctgtggttagagcagctcggaccgtgggcctcactgtaccgtgagaggtttctctccgagcgagtgaatgggaggcttcttctcacactgaccgaggaggaattctctaagactccctacacgatcgagaactcctcccacagacgggccatcctgatggagcttgaacgcgtgaaggctttgggggtgaagccaccccagaacctttgggagtacaaggccgtcaaccctggtagaagcctgtttctgctttacgcactgaaatcttccccgcgtcttagtcttctctatctttatctatttgactataccgatacatttctgccattcattcacacgatctgcccccttcaggaagattcaagtggtgaggatatcgtcaccaaattgttggacctaaaggagcccacctggaaacaatggcgcgaatttctcgtgaagtattcctttctgccgtaccaactaattgctgagttcgcttgggactggcttgaggttcactattggacctcacgttttttgatcattaatgccatgctcctgtctgtcctggagctcttttccttttggcgaatctggtcccgatccgagcttaaaacagtccctcagaggatgtggagccacttttggaaagtcagcactcaggggctttttgtggcgatgttctggcctttgatccctcaatttgtgtgtaactgcttgttttattgggctctgtacttcaatccaatcatcaacattgacctcgtggtcaaagagctgagaaggctcgaaacccaggtgctgtag

SEQ ID NO: 23038 - DNA, 4254 bp, synthetic construct
  misc_feature 1..4254: note = Description of Artificial Sequence: Synthetic coding sequence
  source 1..4254: mol_type = other DNA
atggccgccgtgccccagaacaacctgcaggagcagctggagcggcacagcgcacgcacactgaataacaaactctccctcagcaagccaaaattttctgggttcacattcaagaagaagacctcatccgacaataacgttagcgttaccaatgtctctgtggccaaaacacccgtgctaaggaacaaagatgtgaatgtcaccgaagacttttccttttcggagcctctccctaacacaactaatcagcagagggtgaaggacttctttaagaatgcgcccgccgggcaggagacgcagcgaggcggctctaaaagcctgctccctgattttctgcagactcctaaggaggtcgtatgtacaacacagaatacccccactgtgaagaaatctcgcgacaccgccttgaagaagctcgagttttctagctctccagactccctgtcaaccatcaatgattgggatgacatggatgacttcgatacctccgagacatcaaagtcgttcgtgacccccccccagtctcattttgtgcgggtgagcactgctcagaaaagcaaaaagggtaaacgcaattttttcaaggctcagctgtacactacaaatacagtaaaaaccgacctacccccccccagtagcgaaagcgagcagatcgatttaaccgaagaacagaaggatgattctgagtggctaagctctgatgtcatatgcatcgacgatggtccgatagccgaggttcacatcaacgaggacgcccaggagagtgatagcctgaagacgcatctggaggacgaacgagataattcagagaagaagaagaacctcgaggaggccgaactccacagcaccgaaaaggtgccgtgcatagagttcgacgatgatgactacgatacagattttgtgccaccatctccagaagaaataattagcgctagtagctcatcctctaaatgtctttctaccctaaaggatttagacacctctgatagaaaggaggatgtgctctccaccagcaaagatctactgtccaagccagagaaaatgagcatgcaggaactgaacccagaaacttcaactgactgtgacgcaagacaaatctctctccagcagcaacttattcacgtgatggagcacatctgtaaactgatcgacacaattccagacgataaactgaaattgcttgactgtggaaatgagcttttgcagcagcgaaacatcagaagaaagctgctaacagaggtcgattttaacaagagtgacgcttcactgcttggttcattatggcgttaccgaccagattcccttgacggcccgatggaaggcgacagttgccccactggcaattctatgaaagaattgaacttcagccacctcccatccaacagcgtttctcctggagactgtctcctcaccaccacccttggtaagactggatttagcgctacgaggaagaacctatttgagagacctcttttcaacactcaccttcaaaagtcctttgtctctagcaattgggccgagactccacgtctgggaaagaagaatgagagctcatatttccctggcaatgtcctgactagtacagctgtgaaggaccagaacaagcacactgcatctatcaatgatctggagcgggagacccagcccagttatgatatcgataactttgacatcgacgactttgacgatgatgacgattgggaggatataatgcataatctggcggcctccaagtcttcgacagccgcttaccagcctataaaggagggccgcccaatcaaaagtgtctcagagagactgtcatcagcaaagacagactgtctgccagtgtcaagtacggcccagaacatcaatttttccgagtctattcagaactatactgacaagtcggcgcagaacctcgcctctcgaaacctgaagcacgaaaggtttcagagcctgagttttccgcatacaaaggaaatgatgaagatttttcacaagaagtttggattacacaatttcaggaccaaccagttggaagccatcaacgccgcactcctgggcgaggattgcttcatcctcatgccaaccggcggggggaagtcactttgctaccaacttcccgcatgcgtgtctccaggagtgaccgtagtgatctccccccttcgctcccttatcgtggaccaggttcagaagctaacctctcttgacattccggccacgtacttgactggcgacaagactgattccgaggctaccaatatctatctgcagttatccaaaaaagatcccatcatcaaactactttatgtcactcccgaaaagatatgtgccagtaataggttgatctcaaccctggagaacctctatgaacggaaactattggcaaggttcgttattgatgaggctcactgtgtgtcgcagtgggggcacgacttccgtcaggactataaacgcatgaatatgctgagacaaaagtttccgtctgtccccgtgatggctttgactgccaccgccaatccacgagtccagaaagatatcttgacccagcttaagatactgagacctcaagtatttagtatgagtttcaatcgtcataatctaaagtattacgtcttgcctaaaaaaccaaagaaagttgctttcgactgtctcgaatggattagaaagcaccacccatatgactctggaatcatctactgtctgagcaggcgggaatgcgacacaatggccgacaccttacagcgtgacggcttggccgccttggcctatcacgccggtttgagcgattctgcacgggatgaggtccagcaaaagtggattaatcaggacggctgccaggtcatctgcgccacaatcgcattcgggatggggatcgataaacctgacgtaaggtttgtgatacacgccagtctcccgaagagcgtggagggatactaccaggagagcgggcgagccggccgggacggcgagatcagtcactgcttgttgttctacacctaccacgatgttacaaggcttaagcgcttaattatgatggaaaaggatgggaaccaccacactcgagagacccactttaacaacctgtattcgatggtacactactgcgagaatataaccgagtgtaggagaattcaactgctggcctacttcggcgaaaacgggtttaacccagacttctgtaagaagcaccctgatgtgtcatgtgataactgctgtaagacaaaagactacaagacccgcgatgttaccgacgacgtgaagagtattgtgcggtttgtgcaggagcattcatcttcccagggaatgagaaacattaaacacgtcggaccaagtggaagattcaccatgaacatgttggttgacatattcttaggctctaaaagtgctaagatccaaagtggaatcttcggcaagggatcagcttactcgcgacacaatgcagagcgcctgtttaagaagctaatactagacaaaattctggatgaggacctttatattaacgccaatgatcaggcaattgcgtatgtgatgctagggaataaagctcaaaccgttctgaacgggaatcttaaagtcgatttcatggagactgagaactcaagttcagtcaagaagcagaaagctttggttgcaaaggtgtcccagagggaagagatggtgaaaaagtgtttgggcgagctgactgaggtctgcaagagtcttggaaaagtgttcggggtgcactatttcaacattttcaacaccgtcactctaaagaagctggcagaatctctcagctccgacccagaggtgcttcttcagattgacggggtcacagaggataaactcgagaaatacggagctgaagtgattagcgtactgcaaaagtactctgagtggaccagcccggccgaggattcttctcccggaataagcttgtcctcatctcgcggtcccggccgttccgcagctgaagagcttgacgaggagatccctgtgagcagtcattacttcgcttccaaaactcggaacgagcgaaaaagaaaaaagatgcccgcctcgcagcgaagcaagcggaggaaaaccgccagttccggcagtaaggcaaaggggggttccgctacgtgccggaagatctcctcaaagaccaagtcttcgtcgataatcgggtcttcgtctgcaagtcacacatcccaggccacctccggagccaactcaaaactgggaatcatggctcctccgaaacctattaataggccctttctgaagccaagttacgcattctcctag

SEQ ID NO: 23039 - DNA, 3144 bp, synthetic construct
  misc_feature 1..3144: note = Description of Artificial Sequence: Synthetic coding sequence
  source 1..3144: mol_type = other DNA
atgagcatgcaggagctgaaccccgagaccagcaccgactgcgacgcccggcaaataagtctccagcaacagttgatacacgtgatggaacacatctgtaaacttatagacacgatccctgatgacaagttgaaactgctggactgtggaaatgagctactacagcagagaaacatcaggaggaagctccttacagaagtcgactttaataagagcgacgcctctcttctggggagcctgtggagataccggccagacagccttgacggtcctatggaaggcgacagttgtcctacggggaattccatgaaagaattaaattttagccacctcccctctaacagtgtatctcctggcgactgtctgctgacgactacgctaggcaagacaggcttctccgccacgcgcaagaatctgtttgagagacccctgtttaatacacatctgcagaagtctttcgtttcaagtaactgggctgagaccccaagactgggaaaaaaaaatgaaagcagctactttccagggaatgttctgacctcgacagcggtaaaagaccagaataaacatactgcctcaataaatgacctggaaagagagacccagccatcctacgacatagacaactttgacatagatgatttcgacgatgacgacgactgggaagatatcatgcataatctcgcggcctcaaagtcaagtaccgccgcataccagcccattaaggaagggaggcctatcaagagtgtctccgaacgcctgtcgtcagcaaagacagactgcttgcccgtgagcagtactgcccagaacataaacttctctgagtctatccagaactataccgacaagagcgctcaaaatctcgccagcaggaacctgaaacacgagaggtttcaaagcctgtcatttccccacaccaaagagatgatgaagatctttcataaaaagtttggtctgcacaatttcaggaccaaccagctcgaagcgatcaacgcagccttactcggggaagattgttttatcctgatgccaactggcggcgggaagagtctgtgctatcagcttcccgcatgtgtgtcccccggggtaactgtggttatcagcccgctgcgaagtcttatcgttgatcaggtacaaaaactgacctccctggatatccctgccacctatctcacaggggacaaaacggattccgaagctaccaatatctacctgcaactgtctaagaaggacccaatcatcaagctactatacgtcacccccgaaaaaatctgcgcatccaaccgcctgatcagcactttagaaaatctgtatgagcggaagctgctcgccagattcgttattgatgaagcacactgcgtgtcacaatggggccacgacttccggcaagattataaaagaatgaatatgctcagacagaagttcccttccgtacctgtcatggccctgaccgccacggccaatcccagggtgcaaaaggacattttgacccagctgaaaattctgagaccccaggtgttttccatgtcctttaatagacacaacttgaagtactacgtcctacccaaaaaacctaaaaaggtggcattcgactgtctagagtggatcaggaagcatcatccttacgattccgggattatctattgtttgagtaggcgcgaatgcgacacaatggcagacacattgcagaaatggattaaccaggacgggtgtcaagttatatgcgctaccatcgccttcggcatgggcattgacaagcccgatgtgaggttcgtgatccacgccagtctccccaaaagcgtcgagggatattaccaagagagcggcagagcaggacgcgacggcgaaattagccactgtctcctgttctatacttaccatgacgtgacgcggctgaagcggctgattatgatggagaaagacggcaaccatcatacccgggaaacccacttcaataatctgtactccatggtgcactactgcgaaaacatcacggaatgccgtcgtatccagctgctcgcatacttcggagagaacggcttcaaccccgatttctgcaagaaacaccctgatgtgagttgcgacaactgttgtaagaccaaggattacaaaacccgtgatgtcaccgacgatgttaaaagcatagtcagatttgtccaagagcactcatcatcacagggtatgcggaacataaaacacgtgggcccttcagggaggtttacaatgaacatgctggtggatattttcttaggctcaaagagtgccaagattcaatcagggatattcggcaaaggttctgcctactcaagacataatgcggagagacttttcaagaagttaatcctggacaagattcttgacgaagacctctatatcaatgccaatgatcaggcaatcgcctatgttatgctgggcaataaagcccagacagtcctcaacgggaatcttaaggtggacttcatggagacagagaattcctcctccgtgaagaagcagaaagccttagtggctaaagtgtctcagcgcgaggagatggtcaaaaaatgtctgggtgagttgacggaggtatgtaagagcctggggaaagtcttcggtgttcattattttaatatctttaacaccgtcactcttaagaagttagctgagtcactgtcctcagatccagaggtgctgctgcagattgacggcgtgacagaagataaacttgaaaagtacggggccgaggtcatctccgttcttcaaaaatacagcgaatggacgagccctgcagaggacagttcccccggaattagcctatcctcctctagaggtccaggccgctctgctgctgaagagcttgatgaggaaatacctgtgagcagccattatttcgcgtccaagaccagaaacgaacggaaacggaaaaagatgcctgcttcacaaaggagcaaacgaagaaagaccgcctcttccggatctaaggccaaaggtggcagcgcaacctgccggaagatctcttctaaaactaaatcaagtagcattattgggagttcatcagcatctcatacgtcacaggccactagtggcgctaactccaaacttggcattatggctccaccaaagcccattaatcggccgttcttaaaacccagctatgccttctcttag

SEQ ID NO: 23040 - DNA, 1560 bp, synthetic construct
  misc_feature 1..1560: note = Description of Artificial Sequence: Synthetic coding sequence
  source 1..1560: mol_type = other DNA
atgaacatgctgcggcagaagttccccagcgtgcccgtgatggccctcaccgctacagctaacccccgcgttcagaaggacattctcacgcagttgaagatcctccgacctcaggtgttcagcatgtcttttaataggcataatctgaaatattacgtgttgccaaaaaaacctaagaaggtcgcctttgattgtctggaatggataaggaagcatcacccttacgacagtgggattatatactgtctgagcaggagagagtgcgacacaatggctgatactttgcagagggatggcttggcagccctagcttatcatgccgggctgtcagactccgcaagggacgaggtgcagcagaagtggatcaatcaggatggttgccaggtaatttgcgctactattgcctttggtatgggtattgacaagccagatgtcagattcgtcatacacgccagtcttcctaagagcgtggaagggtactatcaagagtcagggagggcaggtagagacggggagatttctcattgcctgctgttctacacatatcacgacgtcacccgactgaagaggctgatcatgatggaaaaagatggcaatcatcatactagagagacgcacttcaacaatctgtattctatggtgcactactgtgagaatatcacagaatgcaggaggatccagttactggcctacttcggggagaacggattcaatcccgatttttgtaagaaacatcccgatgtgtcatgtgacaactgttgtaagaccaaggattacaaaacacgggacgtgaccgacgatgtgaagtccatcgttagattcgtgcaagagcattcttcctcacaaggcatgcggaatataaaacatgtgggaccctccggccgcttcacaatgaatatgcttgtggacatcttcttggggagcaaatctgctaagatccaatccggtatcttcggtaagggctccgcttactcccggcacaacgctgagcggttatttaagaagttgattttggataaaatcctggacgaggatctctatatcaatgctaatgatcaggccattgcttatgtcatgcttggaaacaaagcccagactgtgcttaatggcaacctgaaagtggacttcatggagaccgagaacagctcctctgtcaagaagcagaaggccctcgtggccaaggtctcgcaacgggaagaaatggtgaagaaatgtctcggcgagctcaccgaggtgtgtaaaagtctagggaaggttttcggtgttcattactttaacatctttaatacagtgacgctgaaaaaattggctgagagcttgtcgtcggatcccgaggtcctgctgcagattgacggagtcaccgaagataaactcgagaaatacggcgccgaggttatcagtgttttgcagaaatattctgaatggacttcacctgcagaggattcctcaccaggcatatcactctcttcctcacgaggccctgggcggagcgctgccgaagaactggacgaagaaatcccagtttccagccactacttcgccagcaaaactcgaaactag

SEQ ID NO: 23041 - DNA, 981 bp, synthetic construct
  misc_feature 1..981: note = Description of Artificial Sequence: Synthetic coding sequence
  source 1..981: mol_type = other DNA
atgcaccggaccacccggatcaagatcaccgagctgaacccccacctcatgtgcgtgctctgcggggggtactttatagacgccactaccatcatcgaatgcctacactcattctgtaagacatgcatcgtgcggtacttggaaacaagcaaatattgccccatatgcgatgtccaggtccataagacaagaccattgctgaatatacgcagtgacaaaacactccaggatatagtgtacaagctggtgcctgggcttttcaaaaatgagatgaagagacggcgtgatttttacgcagcacatccttcagccgatgcagctaatgggtctaatgaggatagaggcgaagtggccgacgaagacaagagaatcataaccgacgacgagatcatcagcctcagcattgaattcttcgatcagaatcggctggatcggaaggtgaacaaagacaaagagaaatccaaggaagaagtaaatgacaagcgatacctgcggtgccctgctgctatgaccgtcatgcatctgcggaaatttcttcgatccaaaatggacattccgaataccttccagatcgatgtgatgtacgaggaggaacctctcaaagactactatacgctcatggacattgcctacatatacacctggagacgtaacgggccccttcccctcaagtatagagtgcgacccacatgtaagcggatgaaaatcagccaccagagggatggtctgactaacgccggagaattggaatctgattctgggagtgacaaggccaattcccctgcgggcgggatcccaagcacctctagctgtctcccttcacctagcacccccgttcagtctccacacccacagttcccgcatatttcatcgacgatgaacggcacctcaaatagcccttcggggaatcaccaatcttcctttgcaaatcggccccgtaagagcagtgtaaatggttcttctgctacttcctctgggtag

SEQ ID NO: 23042 - DNA, 717 bp, synthetic construct
  misc_feature 1..717: note = Description of Artificial Sequence: Synthetic coding sequence
  source 1..717: mol_type = other DNA
atgtgcgtgctgtgcggcggctacttcatcgacgccaccaccatcatcgaatgccttcactccttctgcaaaacttgtattgttagatatcttgaaaccagcaaatattgccctatttgtgatgtgcaggtgcacaagactagacctttgctcaatatccgcctggaccggaaggttaacaaggacaaggagaaaagcaaggaagaagtaaacgataagaggtacctgcggtgtcctgctgctatgacggtgatgcacctcaggaagtttctccgttccaagatggatattcccaatacgttccaaattgatgtcatgtacgaggaggaaccacttaaggactactatacgctgatggatatagcatacatctacacttggaggagaaatggtcccctcccactgaaataccgagtgaggcctacatgcaagagaatgaaaatcagtcatcagcgcgacggactgacaaacgctggtgaactggagtctgacagcggaagcgacaaggcaaacagtcctgcaggggggatacctagcacaagttcctgtcttccctccccctccacccccgtgcagtccccacatccacagtttccgcacatatcctcaactatgaacggaaccagtaactccccctcaggtaaccaccagagcagtttcgctaatagacctaggaaaagtagtgtcaatggctcttccgcgactagcagcggttag

SEQ ID NO: 23043 - DNA, 318 bp, synthetic construct
  misc_feature 1..318: note = Description of Artificial Sequence: Synthetic coding sequence
  source 1..318: mol_type = other DNA
atgcaccggaccacccggatcaagatcaccgagctgaacccccacctaatgtgtgtgctttgcggcggatacttcattgatgctacaacaatcattgaatgcttgcattcattctgtaagacttgtatcgttcggtatctggaaacctcaaagtactgccccatttgtgatgtacaggtgcacaaaactaggcccctgctcaatattcgtagcgacaaaaccttgcaggacatcgtttacaaactggtccccggtctgttcaagaatgagatgaaaaggcgccgcgacttctacgcagcacacccttctgctgactag

SEQ ID NO: 23044 - DNA, 624 bp, synthetic construct
  misc_feature 1..624: note = Description of Artificial Sequence: Synthetic coding sequence
  source 1..624: mol_type = other DNA
atgcaccggaccacccggatcaagatcaccgagctgaacccccacctgatgtgtgtgctgtgcggcggatacttcattgatgccactacaataattgagtgcctgcattctttctgcaagacatgtatagtgaggtacctggagacttcaaaatattgccccatctgtgatgttcaggtacacaaaacacggccactgctcaatattaggtccgacaaaaccctgcaagacattgtctacaaattagtcccgggcctatttaagaatgagatgaagcgtcggcgggatttttacgctgcgcacccttcagctgacgccgcaaacgggagcaatgaagaccgcggggaagtggcagatgaagataagagaatcattacagacgacgagattatcagcctgtctatagaattcttcgaccagaatcggttggacaggaaggtgaacaaggacaaggaaaaatccaaagaggaagtcaacgataagcgatatctgcgctgtcccgctgccatgactgtgatgcacctgaggaagttcctacggtccaagatggacattccaaatacgtttcagatagatgtcatgtacgaagaggagccccttaaggactactacaccctgatgtag

SEQ ID NO: 23045 - DNA, 453 bp, synthetic construct
  misc_feature 1..453: note = Description of Artificial Sequence: Synthetic coding sequence
  source 1..453: mol_type = other DNA
atgcaccggaccacccggatcaagatcaccgagctgaacccccacctcatgtgtgtattatgtggaggctactttattgacgccaccaccattatcgagtgtctgcactctttttgtaagacgtgtattgtgcgctacctcgaaacttcaaaatactgccccatctgtgacgtgcaagtgcataaaacacgtcctttgctgaacattcggtcagacaagactctccaggacatcgtgtataaactggtccccggtctgtttaaaaacgaaatgaaaagaagaagagacttctatgccgcccatccaagcgccgatgcagccaatgggtctaatgaagatcggggggaggttgctgacgaagacaaacgcattatcacagacgatgaaatcattagcttgtcaattgagtttttcgaccagaataggcttgatcgcaaggtgaataaagactag

SEQ ID NO: 23046 - DNA, 555 bp, synthetic construct
  misc_feature 1..555: note = Description of Artificial Sequence: Synthetic coding sequence
  source 1..555: mol_type = other DNA
tacttcatcgacgccaccaccatcatcgagtgcctgcacagcttctgtaaaacttgcattgtaagatatctggagacctctaagtattgtccgatttgcgacgtacaggttcataaaactcggcccctgctcaacattcggctggacagaaaagtgaacaaggataaggagaaaagtaaagaagaggtgaacgacaagaggtatctgcggtgtccagcagccatgactgtgatgcaccttaggaaatttctgcgctcaaaaatggatatacccaacacatttcagatcgacgtcatgtacgaagaggagcctttgaaggactactacacactgatggacattgcatacatctacacctggcgcaggaatggacccctgcccttgaagtaccgggtgcggcccacctgtaaaaggatgaaaatttcgcatcagcgggatggcttgacaaacgcgggtgaacttgagagcgactctggctccgacaaggccaatagtcctgccggaggtatccccagcacaagcagttgcctgccgtcccccagtacccccgtgtag

SEQ ID NO: 23047 - DNA, 279 bp, synthetic construct
  misc_feature 1..279: note = Description of Artificial Sequence: Synthetic coding sequence
  source 1..279: mol_type = other DNA
atgcaccggaccacccggatcaagatcaccgagctgaacccccacctgatgtgtgttctctgtggtgggtattttattgatgcaaccacaattatcgagtgccttcatagcttttgtaaaacttgtattgttcggtatctcgagacctcaaaatattgccccatctgtgacgtgcaggtccacaaaacccgccctttgctgaatattaggagcgataagacactccaggacatcgtgtacaagctcgtccctggactgttcaccgcaaatggctcttag

SEQ ID NO: 23048 - DNA, 2193 bp, synthetic construct
  misc_feature 1..2193: note = Description of Artificial Sequence: Synthetic coding sequence
  source 1..2193: mol_type = other DNA
atgcccggcgtggcccggctgcccctgctgctgggcctgctgctgctgccgcggccgggacggcccctggacctggctgattatacttacgacctggctgaggaggatgattctgaaccactgaactacaaggacccctgtaaagcagccgcttttttgggcgatatagcactcgatgaggaggacctaagggctttccaggtccaacaggccgtggatcttcgtcgccacaccgccagaaaatcttctatcaaggcagccgttccggggaataccagtactcccagctgccagagtaccaacgggcaaccccagcgaggcgcctgtggccgatggagaggtcgcagccgatctaggagggccgcgacatcacggccagagagagtttggcctgacggagttataccatttgtcatcggcggcaacttcacgggcagccaaagggctgtctttcgacaggccatgcgacactgggagaagcacacctgtgtcacatttctggagcggaccgatgaggacagctacattgtattcacttaccgcccctgtggttgctgtagctacgtggggagacgcgggggcggaccccaggctatctccataggaaagaactgtgacaagtttgggatcgttgtccacgaactaggccacgttgtcggattctggcatgaacatacgcgcccggatcgcgacagacatgtcagtattgtgcgtgagaacattcagcctgggcaggaatacaacttcctaaagatggagccacaggaagtggagtcgctgggggagacctatgatttcgactctatcatgcactatgctcgtaatacttttagccgaggcatctttctggataccatagtgcctaagtatgaagtcaacggcgtgaagcccccaatcggacagaggacacgtctcagtaaaggagacatcgcacaagctaggaaactgtacaagtgcccagcttgcggggagactctccaggacagcaccggtaatttcagctcgcccgaatatcccaatgggtactctgcccatatgcactgcgtttggcgcatttccgtgacacccggcgagaagatcattcttaactttactagccttgacctgtacaggtcccgcctgtgctggtacgactatgtcgaggtgagggacggtttctggagaaaagcccccctcaggggaaggttctgtggctccaaattgcccgagcctatcgtgtccaccgactctcggctgtgggtggagttcagatcatctagcaattgggttggaaaaggtttcttcgccgtttatgaggcaatctgtggaggagacgttaagaaagactacgggcacatccagagcccaaattaccctgatgactacagaccctccaaggtttgcatttggaggatccaggtgagcgaggggttccacgtcgggttaacattccaaagttttgagatagaacgacacgactcatgcgcttatgattacctggaggtacgagatggccactctgagtcttccactctgatcggaaggtattgtgggtacgagaagccggacgacatcaaatctacaagttcgcggttgtggttgaagttcgtttccgacggctccattaataaggcagggtttgcggtgaactttttcaaagaggtcgatgaatgctctcgcccaaatcggggcggatgcgagcaacgctgtttaaatactttaggatcctataagtgcagctgtgatccaggatacgagttggctccggataaacgccggtgtgaggcagcatgcggtggctttctaaccaagctcaacgggtctatcacctctccagggtggccaaaggagtaccccccaaataagaattgcatctggcaactggttgccccgacccagtatagaataagcctgcaattcgattttttcgagaccgagggcaacgacgtgtgcaagtacgattttgttgaagtgagaagtggccttactgcggacagcaagctgcacggcaagttttgtgggtcagagaagccggaagtgatcacctcccagtataataatatgcgggtggagtttaaatcagacaatacggtctccaaaaaaggcttcaaggcacatttctttagcgaaaagcgccccgctttgcagcccccccgcggtcgaccacatcagctgaagttccgcgtgcaaaagcgaaaccgcacaccccagtag

SEQ ID NO: 23049 - DNA, 2961 bp, synthetic construct
  misc_feature 1..2961: note = Description of Artificial Sequence: Synthetic coding sequence
  source 1..2961: mol_type = other DNA
atgcccggcgtggcccggctgcccctgctgctgggcctgctgctgttgcccaggccaggccgacctctggacctcgccgattatacctatgacctggccgaagaagacgactccgagccacttaattacaaggatccttgtaaggcagcggcattcttgggtgatatcgctctggacgaggaagacctgcgggcattccaggtgcaacaggctgtggacctccgacggcacactgcccgaaagagcagcattaaagccgctgtgccgggaaacacgtccacaccttcctgccagagcacgaacggccagcctcagagaggtgcctgcggcagatggaggggacggtcccgaagccggcgggccgctacatctcggccagagcgagtgtggccagatggagtgatcccgttcgtcattggagggaatttcacaggctctcagcgcgctgtgttcagacaagctatgagacattgggagaagcacacgtgtgtgactttcctcgagagaacggacgaagacagttatatcgtcttcacttacagaccgtgcggctgctgtagctacgtcggacgccggggaggtggaccacaggcaatttctattgggaagaactgcgataaattcggcatagtcgtgcacgagctgggacacgtagtgggcttctggcatgagcatacccggccggatagagaccggcacgtgtcaattgtgcgggaaaacatccagcccggtcaggaatacaactttctgaagatggaaccacaggaggtcgagtcactgggcgaaacctacgactttgacagtatcatgcattacgcccgcaataccttcagtcgaggcatatttctggataccattgtgcccaagtatgaggtcaatggtgtaaagcctcccatcgggcagcgaacgcggctgtccaagggagatattgcccaagcaaggaagctctacaaatgtcctgcatgcggcgaaaccctccaggactctactggtaacttctctagccctgagtacccaaatgggtactctgctcatatgcactgtgtttggcggatctccgtgacccccggtgagaaaatcatattgaacttcacctcgctggacctttaccgttcccgcctgtgctggtatgattacgttgaggtgcgcgatggcttctggcgaaaagctccgctaaggggacgcttctgcggtagcaagttgcctgaaccaattgtgtcaaccgattcccgactatgggtggagttcagatctagctcgaactgggtgggcaagggattcttcgccgtatacgaggctatttgcgggggggacgtgaaaaaagattacggccacattcagagtccaaactaccctgatgactaccgaccatctaaggtttgcatttggcggatacaggtgagcgagggcttccacgtcggactgaccttccagtccttcgagattgagcgtcacgattcatgcgcatacgactacctcgaggttcgagatggtcactccgagtcctccacactgattgggcgctattgtgggtacgaaaaacccgacgacatcaaaagtacatccagccgcctgtggctcaagtttgtgagcgacggttcaatcaataaagccggatttgctgtaaacttcttcaaggaggtggatgagtgttctcgcccaaatagaggtgggtgtgaacagagatgtctgaacaccctcggttcgtataagtgtagttgtgaccctgggtacgaattagcaccagacaaacgacgctgcgaggccgcctgtggcgggtttttgaccaaactgaacggctcaattactagcccaggctggcctaaagaataccctccaaataagaactgtatctggcagctggttgcaccaacccagtacagaatatcactacagttcgatttctttgaaacagagggcaatgatgtgtgcaaatacgacttcgtggaggtacgtagcgggctcaccgctgattctaaactgcacggcaaattctgcggctctgaaaagcccgaagtgatcactagtcaatataataacatgcgggttgagtttaagagtgataacaccgtgagcaaaaaaggctttaaagctcattttttctctgacaaggacgaatgcagtaaggacaatggtgggtgccagcaggactgtgttaatacgtttggctcatacgagtgccagtgtcgttccggattcgttcttcatgataataagcatgattgtaaggaagcgggttgtgatcacaaagtaaccagcacctccggcaccattacctctccaaattggcccgataagtatcccagtaaaaaagaatgtacctgggctattagttcgacacctgggcacagagtcaagctgactttcatggagatggacatagagagtcagcccgagtgtgcctacgatcatctagaggtttttgacggccgcgacgccaaggcgccagtgcttgggagattttgcgggtccaaaaagccggagcctgtcctagcaactggtagccgaatgttcctgagattctactctgataactctgtccagagaaaggggttccaggctagccacgctacagagtgtggcgggcaagtgagggccgatgtgaagaccaaggatctatacagtcatgcccagttcggcgacaacaattaccctggtggggtggattgcgaatgggtaatcgtagccgaggaaggctatggcgtggagctggtctttcagaccttcgaagttgaggaggagactgactgcggctatgattacatggaactgttcgacggatatgatagcaccgcaccgagattggggcggtactgtggtagtggtcctcctgaggaggtgtatagtgcaggggattcagtgctggtaaaattccattccgatgataccattactaaaaaagggtttcaccttcgctatacatccacaaaatttcaagataccctccacagtcgcaaatag

SEQ ID NO: 23050 - DNA, 909 bp, synthetic construct
  misc_feature 1..909: note = Description of Artificial Sequence: Synthetic coding sequence
  source 1..909: mol_type = other DNA
atgcccggcgtggcccggctgcccctgctgctgggcctgctgctgttgcccaggccaggaaggccgttggatcttgccgattacacgtacgaccttgctgaagaggatgactccgaaccgctaaactataaagacccttgtaaagccgctgcttttctgggagatattgcacttgacgaggaggacctgagggcttttcaggttcagcaagctgttgacctgcggcggcatacagcgcgcaagagtagcatcaaggcagccgtcccagggaacacgtccactccatcctgtcagagtacaaatggccagccacaacggggggcctgcggaaggtggcgaggtcgctcacggtctcgccgggctgccacctctcgtccagagcgtgtatggcccgatggtgtcatcccatttgttattggcggcaactttactgggagtcagcgcgcggtctttaggcaggcgatgcggcactgggagaagcacacatgtgtcacttttctggagcgcacggatgaagactcgtacatcgtatttacctatagaccttgcggctgctgctcgtacgttggacggcgcggcggagggccccaagccatttccatcggaaagaactgcgacaaattcggcatcgtagttcacgagcttggccacgtagtcggattttggcatgaacacacacgcccagatagagacagacacgtatcaattgtgagggagaacattcagcccggggtgttgcactcgtcattgcttctgctgtcctgcggatcccggaacggagctagttttccgtgctcgctcgagagcagcattcaccaggctctctgctggacagggctgttccttcgtccctctccctttccccggctgcctctggccgcaccaaggaccctcagagccggggtttag

SEQ ID NO: 23051 - DNA, 1869 bp, synthetic construct
  misc_feature 1..1869: note = Description of Artificial Sequence: Synthetic coding sequence
  source 1..1869: mol_type = other DNA
atgcccggcgtggcccggctgcccctgctgctgggcctgctgctgcttcctcgcccaggtcgccccctcgacttagcggactatacttatgacctcgccgaagaggatgacagcgagcccctcaattacaaagatccctgcaaggccgccgcgttccttggcgacatcgctcttgacgaagaagatctgagggcctttcaggttcagcaggccgtcgatctgcggaggcataccgcccgaaaatcgagcatcaaggccgcagtgccaggcaacacatccaccccatcttgtcagtccacaaatgggcaaccccagcgcggcgcgtgtgggcgctggcgcggaaggtcgcgctccagacgtgctgctaccagtcgaccagagcgggtgtggcccgacggagtgatcccttttgtgatcggcgggaattttactggatcacagcgtgccgtcttcagacaagctatgaggcactgggagaaacacacctgcgtcacttttctcgaacggactgatgaagatagctacattgtgtttacttatcggccttgcgggtgctgcagctacgtgggcagaagaggaggcgggcctcaggccatttccattggcaagaactgtgacaagttcggcattgtcgtccacgagcttggccatgtggttggcttttggcacgaacacactaggccagatagagatcggcacgttagcattgtccgcgaaaatattcaacccggacaggaatacaacttcctgaagatggaaccacaagaggttgaaagtcttggtgagacttacgattttgattcaattatgcattatgccaggaacactttctccaggggaatcttcctagacaccattgtgcctaaatatgaagtgaacggtgtcaagcctcctatcgggcagagaaccaggctgagtaagggtgatatcgcgcaggctcgaaaactatataagtgtcccgcgtgcggtgaaaccctgcaggactctaccgggaatttttcttcgccagagtacccgaatggttacagcgcacatatgcactgcgtctggcggatctcggttacccctggcgagaagatcatcctgaattttactagcctggacttataccgatcccggctttgttggtatgattacgtggaagtgagggacggattctggaggaaagcacctctgcggggcagattctgcggttctaagctgcctgaaccaatcgtcagtacggacagtcggctgtgggtagagtttcgctccagttccaactgggttggaaaaggatttttcgcagtctatgaagccatctgtggcggagacgtgaaaaaggactacggtcacatccaaagcccaaattatcccgacgattatcgaccatccaaagtgtgcatttggcggatccaggtgtctgaagggttccatgtgggactcactttccagagttttgagattgagaggcacgacagctgtgcttatgactacctggaggtgagggacgggcatagcgagagcagtaccctgatcggcagatattgcggctacgagaaacctgacgatatcaaatccacctcatccagactgtggctgaaatttgtcagcgacggaagtattaacaaagccgggtttgcagttaacttcttcaaggaggtggatgagtgttcccggcccaatagggggggctgtgagcagcggtgcctcaacactctcggctcatacaaatgcagctgtgacccgggatacgaactagccccagacaagaggcgatgtgaaggatgctacgatctgcaggtgggcaaaccactgctttgggatcgccattgcttcagactatctacccatggacctgaaatgctgggcacagccttaagagggtag

SEQ ID NO: 23052 - DNA, 2472 bp, synthetic construct
  misc_feature 1..2472: note = Description of Artificial Sequence: Synthetic coding sequence
  source 1..2472: mol_type = other DNA
atgcccggcgtggcccggctgcccctgctgctgggcctgctgctgttaccgaggccaggacggccgctggaccttgccgactacacttacgatcttgcggaggaagacgattccgagcctctgaactataaggatccatgcaaagcagctgctttccttggggacattgccctggatgaggaggacttacgggcattccaggtgcagcaggctgtcgatctacgcaggcatactgccaggaagtcctctatcaaagccgccgtgccaggcaacacgagcactccttcatgtcaaagcactaacgggcagcctcagagaggtgcttgcggtagatggcgtggcagatctagaagtcggagggccgccacatcgcgccctgagcgcgtgtggcctgacggtgtgataccttttgtaattggcggtaattttactggctcacagagagcggtttttagacaagccatgaggcactgggaaaagcatacctgcgtgaccttcctggagcggactgatgaagacagttatatagtgttcacatatcgcccgtgtgggtgttgcagctatgttggtcgaagaggtggtggccctcaggctatctcaatcggcaagaactgtgataagttcggaatagtggtgcatgagcttgggcacgtggtaggcttttggcacgagcatactagaccagatcgcgacagacatgtgtcaatagtcagagaaaatattcagcccgggcaagagtacaattttctgaagatggaaccccaggaggtggagtctctgggagagacctacgacttcgatagcattatgcactacgcccgtaacaccttttcccggggcatctttttggataccatcgtgccgaagtatgaggttaacggagtcaagcccccaatcgggcaaagaactagactctctaaaggggatatcgcccaggcgagaaagttgtataagtgtccagcatgcggagagacactgcaggacagcacggggaatttttcatctccagaatatcctaatgggtattcggctcatatgcactgcgtttggcgcattagcgtaactcccggagagaagatcatcctgaattttacctctctggatctgtaccgctcacgcttatgctggtatgactacgttgaagtgagagacggtttttggagaaaggctcctctcagggggagattttgtgggtccaagctcccggagcccattgtgagtacggactccaggctctgggtagagttcaggagttccagcaactgggtaggaaaagggttttttgccgtgtacgaggctatatgcggcggagacgtcaagaaagactacggacacatccagtctcccaactatcccgacgattaccgcccttccaaggtgtgtatctggcggatacaggtttctgaaggcttccacgtgggcctgactttccagtctttcgaaatcgagcgtcatgacagctgtgcctacgattatctggaagttagggacggacacagtgaatcctcaacactgattggtaggtactgcgggtacgaaaagcctgatgacattaaatccactagttcaaggctttggctgaagttcgtttctgacggaagcatcaacaaggccggcttcgccgttaactttttcaaagaagtggacgagtgctcaagacctaaccggggggggtgcgaacagcgctgtcttaacacccttggaagttataagtgctcctgcgacccaggctatgagcttgcacctgacaagagacggtgtgaggcggcctgtggcggctttctgacaaagcttaatggcagcatcacatccccggggtggcccaaggagtaccctcccaacaaaaattgcatctggcagctggtggcgcccacccaatatcgcatatcattgcaattcgattttttcgagacagagggcaacgacgtatgtaaatatgacttcgtcgaagtaaggagtgggcttacagccgatagcaagcttcacgggaagttctgcgggtcggagaaacctgaagtgattacctcacagtacaataatatgagagtcgagttcaagagcgacaataccgtgagcaagaaaggttttaaagctcactttttctctgtcctggaaggagccggcgatagacacagtcatctgtcaggacttgagttgttgctgtgtccccatgccctcgttgacacagtcccagcacccccaagtgctctgcacggggacactcatgcacacacacacacccacgtgcatacacactgtcccattgctcaggaaacatgccgcggcccccccctcggagccagccgactctccccccaaggcccaggccacttgactctggcccctcaggaggggagttaccttgatttttgggatactcacaggggggatcctaagccacggagaagacggaagtccctaaagacattttccttgacaccggccacatttagaggaatatgggctctctag

SEQ ID NO: 23053 - DNA, 2193 bp, synthetic construct
  misc_feature 1..2193: note = Description of Artificial Sequence: Synthetic coding sequence
  source 1..2193: mol_type = other DNA
atgcccggcgtggcccggctgcccctgctgctgggcctgctgctgctcccaaggcccggccgtcccctggatctggcagactatacgtatgatctcgccgaagaggatgacagcgagcccctgaactataaagatccttgtaaagccgcagccttccttggagatattgccctagatgaggaagatttgcgtgcgtttcaggtgcaacaggccgtggatctgaggaggcacaccgcccgcaagagctccatcaaagcagcagtgcccgggaatacttcgaccccttcttgccaatccaccaatgggcagcctcagcgtggtgcttgcgggaggtggaggggccgctccaggagccgccgggcggcaacgagccggcccgagcgggtgtggccagacggcgttattccgttcgtgatcggaggcaatttcactggtagtcaacgagccgtctttaggcaggccatgagacattgggaaaagcatacatgcgtgacatttctcgaacgtacagatgaagactcctacatcgtgttcacatatcggccatgcggttgctgctcttatgttggtagacgggggggcggcccacaggctatctctattggcaagaattgtgacaagttcggaatcgtggtgcacgagctagggcacgtggttggattctggcatgagcatacccggcccgacagggatcgtcatgtgtcgatcgttagggaaaacattcagccaggccaagaatacaattttctcaagatggagccccaggaagtggagtctttgggagagacctatgacttcgattcaataatgcactacgcaagaaacacctttagtcggggcatcttcttagacactatagtgccaaaatatgaggttaatggagtaaagccacccatcggccagcgcacacggctctcaaaaggcgacatcgctcaagcccggaagttatataaatgtcccgcttgcggcgaaacactccaggattcaaccggtaacttcagctcacccgaatatcccaacggttactctgctcatatgcattgcgtgtggaggatttctgtgacccccggcgagaaaattattctgaacttcaccagtctcgatctataccgctctagactgtgctggtacgattacgtcgaggtgcgggatggcttttggcgaaaggcccccctcagaggacgcttctgtggatccaaattgccagagcccatcgtgagtactgattcaaggctttgggtggagttccggagtagtagtaactgggtcgggaaaggttttttcgcagtctacgaagccatctgtgggggtgacgtgaaaaaagactacggacacatccagtcccctaactaccctgacgactatagaccgagcaaagtgtgcatttggcgcatccaagttagtgagggatttcacgtcggcctcaccttccagtccttcgagattgagaggcacgattcatgtgcgtatgattacctagaagtccgcgacgggcactcagaatccagtacacttattgggcgttactgtgggtatgaaaaacctgatgacatcaagtccacaagtagccggctgtggctgaaattcgtttctgacggcagtatcaataaagccggttttgccgtgaactttttcaaggaagtggacgagtgcagtagaccaaaccgcgggggatgcgaacagcggtgcctcaataccctgggttcctacaagtgctcctgcgaccctggttatgagctggcccccgacaagcggaggtgcgaggccgcctgtgggggctttcttactaaactgaacggctcgatcacatccccaggctggccgaaggagtatccccctaacaaaaattgcatttggcagctggttgccccgactcagtacaggattagtcttcagtttgatttctttgagactgaggggaatgacgtttgcaagtatgactttgtcgaggtccgctctggcctgacagcagactccaagttgcacggaaagttttgtggcagtgagaaacccgaagtcataacttcacaatataacaatatgagggttgagtttaaatcagataacactgtatccaagaaagggttcaaggcacactttttcagcgagaaaagacccgcactccaacccccaaggggcaggcctcaccagctcaagtttagagtgcagaaacgtaaccgtaccccacagtag

SEQ ID NO: 23054 - DNA, 1509 bp, synthetic construct
  misc_feature 1..1509: note = Description of Artificial Sequence: Synthetic coding sequence
  source 1..1509: mol_type = other DNA
atgctgctgcggagcgccggcaagctgaacgtgggcaccaagaaggaagacggcgaaagcacagctccgacacccagaccaaaggttcttaggtgtaagtgccaccatcattgccccgaagactcagtgaataatatctgctctactgacggatattgttttacaatgatcgaagaggacgattcagggctcccagtggtcactagcggttgtctcggtctcgagggttccgattttcagtgcagagacacccccattccacatcaaaggagaagcattgagtgctgcactgagcggaatgagtgtaacaaagacctgcaccctacgcttccacctctcaagaatcgcgacttcgttgacggtccaattcaccaccgagcactcttaattagcgttacagtttgtagcctgcttctggtgctcatcattttattctgttacttccgatataagcgccaggaaacacggccgagatactccatcggcttagaacaagatgagacctatattccacccggggaaagtctacgtgacctcatcgagcagagccagtcttcgggctctggaagcggtttacccttgctggtgcagaggacaatcgccaagcagatccagatggttaaacagatagggaagggccgctacggtgaggtgtggatgggaaagtggaggggcgaaaaagtggctgtcaaagtgttctttactacagaggaggcctcctggtttcgcgaaaccgaaatttaccagacagtccttatgaggcacgaaaatatattgggattcatcgccgcagacattaagggaaccggcagctggactcaattgtacctgattactgattatcatgagaacggttcgctttatgactacttaaagtccactacattggacgcgaaatcaatgttgaagcttgcttacagcagtgtatctggcctgtgtcacttgcatactgaaatcttcagcacacaaggaaagcctgcgatcgcgcaccgggatctgaagtctaagaacatcttggtgaagaagaacgggacgtgctgcattgccgatttagggctggcggttaagtttatcagtgatactaacgaggtcgatataccacccaacacccgggttggcacaaaaagatatatgccccccgaagtcctggatgaatcactaaatagaaatcatttccagagttacataatggcagacatgtattccttcggactaattctttgggaagttgcaagacgatgcgtgagcggaggcatcgtggaggagtatcagctgccgtatcacgacctagttccatctgacccatcttatgaggacatgagggagatagtgtgcatcaaaaagctccggccaagcttccccaatcgatggtcatctgatgagtgtcttagacagatggggaaactgatgaccgagtgttgggctcacaatcctgccagtcggcttacggcgctgagggtcaaaaaaacgctggccaagatgagtgaaagccaggacataaagttgtag

SEQ ID NO: 23055 - DNA, 1509 bp, synthetic construct
  misc_feature 1..1509: note = Description of Artificial Sequence: Synthetic coding sequence
  source 1..1509: mol_type = other DNA
atgctgctgcggagcgccggcaagctgaacgtgggcaccaagaaggaggatggagaaagtacagctccgacacccaggcctaaggtgttgagatgtaaatgtcatcatcattgccccgaggacagcgtaaataatatctgtagcacggacgggtactgctttactatgatagaggaggatgacagtggcctcccagtggtaacaagcggctgtctgggcttggagggatccgacttccagtgccgggataccccaatacctcaccagaggcggtcaatagagtgctgtaccgagaggaatgagtgcaataaggacctgcaccctacgctcccccctcttaaaaaccgggactttgttgacggcccaattcaccacagggcccttctgatctcagtgactgtctgctcgctgcttctggttctcataatactgttctgctatttccgatacaaaaggcaagaaacccgacctcggtactcgattggccttgagcaggatgagacatatattcccccgggagagagtctgagagacctgattgagcagtcccaatcgtccggcagcggaagcggcctgcccctgttggtgcaacgaaccatcgctaagcaaattcagatggttaagcaaatcgggaaaggccgatatggagaggtctggatgggaaagtggagaggagaaaaagtggcggtaaaggtcttttttaccacagaagaggcatcctggttcagagagactgaaatctaccagaccgtgcttatgcgccacgaaaatatcctgggcttcattgcagctgatattaagggtacaggatcgtggacacagctttacttaatcacggattaccatgagaacggatccctctacgattatctgaaatcaacgacactcgatgcaaaatcaatgttgaagctagcctatagcagcgtaagcggactgtgccatctgcatacagagatattttccacccaggggaaacccgcaattgcccatcgtgatctcaagagcaagaacattttggtgaagaagaatgggacttgctgtatcgcggacctgggacttgcagttaaattcatctctgataccaacgaggtggatattccacccaatactcgggtaggcacgaaacgctacatgcccccagaggtactcgatgagtcattgaaccgcaaccactttcaaagctacatcatggccgacatgtacagcttcgggctgatcctgtgggaagtggctcggcggtgtgtatccggtggaattgtggaggagtatcagctgccataccacgatctggtcccttccgatccaagctacgaagatatgagggagattgtttgcattaaaaagcttcggccatcttttccgaaccgttggtcttctgacgagtgtttacgccagatggggaagctgatgaccgagtgttgggctcataaccctgcgtcccgacttacggcgctccgcgtgaagaagacgctggccaagatgagtgaaagccaggacattaagctgtag

SEQ ID NO: 23056 - DNA, 1599 bp, synthetic construct
  misc_feature 1..1599: note = Description of Artificial Sequence: Synthetic coding sequence
  source 1..1599: mol_type = other DNA
atgggctggctggaggagctgaactggcagctgcacatcttcctgttaatcctgttgagcatgcatacgcgggccaactttctggacaatatgctattgcggtctgcaggaaaacttaacgtgggaactaagaaagaggatggtgagtccacagcccctacaccgcggcccaaggttctcaggtgcaaatgtcatcaccattgtcctgaggattctgttaacaatatctgtagcacggacggctattgctttacaatgatcgaagaggatgatagtggactgcctgtggtgacatccggctgcctgggcctcgaaggatccgacttccaatgccgcgataccccgatcccccaccaacggcggagcattgaatgttgtaccgagaggaatgagtgtaacaaggatttgcatcctactttaccacccctaaaaaatagggatttcgtggatggccccattcaccatagggccctgttgatcagtgtcaccgtctgcagtctcctgctcgtactcattatcctgttctgctactttcgctacaaaagacaggagaccagaccccgctactctataggacttgagcaggatgagacatatatcccaccaggggagtctcttcgcgacttgattgagcagagccaaagcagtgggtccggaagcggtttacctctgctggtgcagcgaactatcgccaaacaaattcaaatggttaaacagatcgggaaggggcgctatggcgaggtttggatgggtaaatggcggggggagaaagtggctgtaaaggtgttttttacaaccgaagaggcatcttggttcagagagaccgagatttaccagaccgtattgatgaggcatgagaacattcttggtttcatagcagctgatatcaaaggaaccggaagttggactcagctttacctcataacggactaccacgagaacggatcattatacgattacctgaagtctaccacactcgatgctaagtccatgttaaagctggcctactcatctgtgagtggattatgccacctgcacactgaaatctttagtactcagggcaaacccgctatcgcgcacagagatctgaaatctaagaacatcctggttaagaaaaacggaacttgttgcattgcagatctgggcctggccgtaaaatttatttctgacacaaatgaggtggatataccccccaacaccagggttggtaccaagaggtacatgccaccggaggttctggacgagtctctgaatagaaaccactttcagtcttatatcatggctgacatgtatagctttggcctcattctatgggaggtggctcgtcgctgtgtgtcaggcggcattgtggaagaataccaactgccctatcacgacctggttccttccgatccctcttatgaggacatgcgggagatagtttgtatcaagaaactgagaccctcattccccaatcgatggtcaagtgacgagtgtctcaggcagatgggcaaactcatgaccgagtgctgggcccacaaccctgcttcacgactgacagctcttagggttaagaagactctggctaaaatgtctgagagtcaggatatcaaactatag

SEQ ID NO: 23057 - DNA, 345 bp, synthetic construct
  misc_feature 1..345: note = Description of Artificial Sequence: Synthetic coding sequence
  source 1..345: mol_type = other DNA
atgctgctgcggagcgccggcaagctgaacgtgggcaccaagaaggaagatggtgaatccacagcccccacgcccaggccgaaggttttgagatgtaagtgccaccaccactgtcccgaggactccgtgaacaacatctgctccactgacggatattgtttcaccatgatcgaggaggatgactccgggcttccagtggtaactagtggctgtctagggctggagggcagtgactttcagtgtagggtccgaaccctgccttttctgattaaggaagaccagctgaatgccgcacagaagggcactaatgtcatcaaaacctacaccctgcattgtttgcattag

SEQ ID NO: 23058 - DNA, 378 bp, synthetic construct
  misc_feature 1..378: note = Description of Artificial Sequence: Synthetic coding sequence
  source 1..378: mol_type = other DNA
atgctgctgcggagcgccggcaagctgaacgtgggcaccaagaaggaggacggggaatcaacagctcctactcccagacccaaagttctgcggtgtaaatgtcaccatcactgtcccgaggatagtgtaaataatatctgttctactgatgggtactgtttcacaatgatcgaagaagatgatagtggtttgccagtcgtcacctcaggatgtctgggcctcgaaggaagcgatttccaatgcagagatacaccaatcccacatcagcgtcggtcgatcgagtgttgtacagagagaaatgagtgcaacaaggacctgcaccctacattgccacccctcaaaaatagggatttcgtagacgggccgatacatcactag

SEQ ID NO: 23059 - DNA, 1509 bp, synthetic construct
  misc_feature 1..1509: note = Description of Artificial Sequence: Synthetic coding sequence
  source 1..1509: mol_type = other DNA
atgctgctgcggagcgccggcaagctgaacgtgggcaccaagaaggaggacggggagagcacggcccccacaccacggccaaaggtgctgcggtgtaagtgccatcatcattgcccagaagattctgttaacaatatttgttccactgacgggtactgcttcaccatgatcgaggaagacgatagcgggctgcccgtggtcactagcggatgtcttggacttgagggctcagatttccagtgtcgggatacgccaattcctcatcagcggaggagcattgagtgttgtaccgaacgcaatgaatgcaacaaagatctgcatcctaccttacctcctctcaagaaccgggacttcgttgatggccctatccatcatcgcgctctgttgattagtgtcacagtctgttcccttctcctggtgctgattattctgttctgctacttccggtataaacgccaggaaaccagacccaggtatagcattgggctcgaacaagacgaaacatatatcccccctggggagtcgctgcgggacctaatcgaacagtcacagtcatccggtagtggaagtggtctgcctttactggtccaaagaactatcgctaaacaaattcagatggtgaaacagatcggtaagggccgctacggcgaagtgtggatgggcaaatggcggggcgaaaaggtggctgtaaaggtttttttcacaactgaagaggcatcatggttcagagagacagaaatttatcagacagtgctcatgcgccatgagaacattttgggtttcatagccgcggatataaaaggcacaggctcctggactcagctgtacctgataactgattaccatgaaaatggctctctgtacgattacctcaaatcaactaccctggatgccaaatccatgttgaagctcgcatactccagcgtgagcggattgtgtcacctgcatactgagattttcagcacccagggtaaacccgccatcgcacaccgtgatttgaagagtaagaatatcttagtgaagaaaaacggtacgtgctgtatcgccgatctgggtttggccgtcaagttcatatcagacacgaacgaggtagatatcccccccaacacccgagtgggaacaaaaagatatatgccaccagaagtgctggacgaatcactaaatcggaaccattttcagtcctacatcatggctgatatgtacagtttcggcctcatactgtgggaagttgccagacgctgtgtctcgggcggcattgtcgaggagtaccagctgccctaccacgacctggttccctccgatcccagttacgaggacatgcgggaaatcgtgtgtatcaagaagttgagaccgtctttccccaacaggtggtcaagtgatgagtgcctgcggcaaatgggcaagctgatgacggagtgttgggcacacaacccagctagtcggcttactgccctgcgcgtcaagaagacattggcaaaaatgagcgaatctcaagatattaaactatag

SEQ ID NO: 23060 - DNA, 1509 bp, synthetic construct
  misc_feature 1..1509: note = Description of Artificial Sequence: Synthetic coding sequence
  source 1..1509: mol_type = other DNA
atgctgctgcggagcgccggcaagctgaacgtgggcaccaagaaggaggacggagagagcacggctcctaccccaagacctaaggtccttcggtgtaaatgtcaccaccattgtcccgaggactccgtgaacaatatttgctcaacagacggctactgcttcacaatgatcgaagaggatgacagcgggctgcccgttgtaacgagcggctgtctgggattggagggatcagatttccagtgcagagatactccaataccccatcagcgcaggtcaatcgagtgctgcactgagcggaacgagtgcaacaaagacctgcatcccactttgcccccgctgaagaatcgggacttcgtggatggtcccatccaccaccgtgccctgcttatttccgtcacagtgtgctctcttcttctggtcctgataatactgttttgttactttcgatacaagcgtcaggagacacgccccagatactccatcggtctggagcaggacgaaacgtacattcccccgggggaatcgctgagggatctgattgagcaatctcagtccagcggctctggctccgggttgcccctattggtgcagaggaccattgccaagcaaatccagatggttaagcagattgggaagggaaggtacggcgaagtctggatgggcaagtggcgaggggaaaaggttgcggtgaaggttttcttcactaccgaggaagcaagctggttccgggagaccgaaatctaccagacagtgttaatgagacatgaaaacattcttggctttatcgccgcagatattaagggaactggatcttggacacagctctacctgatcacagactatcatgaaaatgggtctctctacgattacttgaagtccactaccctcgatgccaagagcatgttgaagttagcttacagcagcgtgagcggcctttgccacctgcataccgaaatcttttccactcaggggaagcccgccattgcccacagggacttgaaatctaaaaatattctcgtgaaaaagaacggaacctgttgtattgccgatttagggctggcagtgaagtttatctccgatactaacgaggtcgacatcccacctaatacaagggttggtaccaaacgctatatgcctcccgaagtgcttgacgaaagtctaaaccggaaccattttcaaagctacattatggctgacatgtattcatttggactaatactctgggaggtcgcccggcgctgtgtctctggaggtattgtggaagagtatcagcttccttaccatgatttggtcccatccgatcccagttatgaggacatgcgagagattgtgtgtataaaaaaactccgtcccagctttccaaaccggtggtcttccgatgagtgccttaggcagatggggaagctcatgactgagtgttgggctcacaaccccgcttcgaggctgacagccctgagggtgaaaaagaccctggccaagatgtcagagagccaggacatcaaactgtag

SEQ ID NO: 23061 - DNA, 1509 bp, synthetic construct
  misc_feature 1..1509: note = Description of Artificial Sequence: Synthetic coding sequence
  source 1..1509: mol_type = other DNA
atgctgctgcggagcgccggcaagctgaacgtgggcaccaagaaggaggacggcgagagcacagctcccaccccgcgtccgaaagtcctgaggtgcaagtgtcaccaccactgcccagaggattcagtgaacaatatctgttcaactgacggatactgtttcacaatgattgaggaggacgacagtggactacctgttgttacttctggttgtctgggactggaaggcagtgactttcaatgtagggacacaccaatccctcatcagcgacggtccattgagtgttgcactgagcgaaatgagtgcaacaaagacctccatccgaccctacctccgctcaagaacagagattttgtcgacgggccaattcatcaccgggcgctgttgatcagtgttactgtctgctccctactgctggtgctcattatcttattctgctactttcgctataaacgccaggagactcgccccaggtatagtataggccttgaacaggacgaaacgtacatccctccaggtgagagtttgcgggacttaattgaacagtcgcagtctagcggtagcgggtctggcctgcccttgttagttcagagaactatcgccaaacagatccagatggtgaaacagattggcaaaggacgctacggagaggtgtggatgggcaagtggcgcggcgagaaagtggccgtgaaagtattctttacgaccgaggaggcatcctggttcagggaaactgagatttaccagactgttctgatgagacacgaaaacatcctaggtttcatagcagccgacatcaaaggtacagggtcatggacccaactgtacctgattaccgattatcatgagaatggctccctgtacgactacctgaaatctactacactggacgccaagtctatgttgaagctggcctattcgagcgtgagtgggctctgtcacctccatacagaaatcttcagcactcagggaaagcccgctatagcccatagggatctcaagtccaagaatattctcgtgaagaaaaacggaacctgctgtattgccgaccttggactagccgtcaagttcatttctgataccaatgaggttgatattccaccgaacacccgggtcgggacaaagagatacatgccacctgaagtgttggatgagtccctgaacagaaatcatttccagtcatacataatggcggatatgtacagtttcggcctcatactctgggaagtggcccgacgctgtgtcagcggaggtattgtggaagagtaccaactgccttaccatgacctcgtaccttccgacccgagctatgaggacatgagagagatcgtgtgtatcaaaaaactccgcccgtcctttcccaaccggtggtccagcgatgagtgcctgcggcagatgggaaagctgatgacagagtgctgggcacataatccagccagtcggttaactgccctcagggtgaaaaagaccctcgccaagatgtctgagtcccaggatatcaaattatag

SEQ ID NO: 23062 - DNA, 4755 bp, synthetic construct
  misc_feature 1..4755: note = Description of Artificial Sequence: Synthetic coding sequence
  source 1..4755: mol_type = other DNA
atgcggggccaggccgccgcccccggccccgtgtggatcctggccccgctgcttcttttgctgttgttgttggggcgaagggcaagagcagccgccggagcggatgccgggcctggtcccgagccttgcgccaccctggtccaaggaaaattcttcggttatttttctgctgctgccgtctttcccgcaaacgccagcaggtgttcctggaccttgagaaaccccgaccctagaagatacactctgtacatgaaagtcgccaaggcacccgtcccctgtagtggccccggccgtgtccgaacatatcagtttgacagcttcctcgagagtactcgaacctacctgggagtggaaagcttcgatgaggtgctgagactgtgcgaccccagtgctcctcttgcttttctccaggcttccaagcagttcttacagatgcggcgccagcaacccccgcagcatgacgggctgagaccaagagcaggtccaccaggccccacagacgacttcagcgtcgagtacctagtcgtcggcaatagaaatccctctagggccgcctgccagatgctgtgccgctggctggacgcctgtttagctggcagcagatcttcccacccatgcgggattatgcaaacaccttgcgcctgtctcgggggagaggcgggaggaccggctgctggccctctagcacctcggggcgatgtgtgcttaagagacgccgttgctggcgggccagaaaactgtctcacctcgctgacgcaagatcgtggaggccacggagccactggagggtggaagctgtggtcactctggggagagtgcactcgggattgtggcggtggactgcaaacccggactcgcacatgcctccccgcacctggagtggagggcggtggatgtgaaggggtgcttgaagaggggaggcagtgtaatagagaagcctgcggccccgcggggaggacctcctctagaagtcagtccctcagatctaccgacgcccggagaagggaggaactgggcgatgagctgcagcagtttggatttcctgccccgcagaccggggaccccgctgccgaggaatggagtccatggtctgtctgttcttctacatgtggagaagggtggcagactaggactaggttttgtgttagtagcagctactcaacccagtgctctggcccactgcgggagcagagactctgtaataatagtgccgtttgccccgtgcacggtgcctgggacgaatggagcccctggtctctgtgcagtagcacatgcggccgaggtttccgcgaccgtacacgaacctgtcggcccccacaatttggaggcaatccatgcgagggccctgagaaacaaaccaagttttgcaatatcgccttatgtcccggccgcgccgtggatggaaactggaacgagtggtcctcatggtccgcctgctcagcgtcatgtagtcaagggcggcaacagagaacgcgagaatgcaatggaccctcatacggaggcgctgaatgccaggggcattgggtggagacccgagactgcttcttgcagcagtgccccgtggacgggaagtggcaggcctgggccagctggggctcttgctccgtgacctgcggcgccgggtcccagcgaagagagcgtgtttgctctggaccgttcttcggtggagcagcgtgtcaagggccacaagacgaatataggcagtgcggcacacagcgttgcccagagccccacgagatatgcgatgaagataactttggcgccgtgatttggaaagaaacacccgctggcgaggtggctgctgtaagatgccctaggaacgccactggccttatcctccgccgatgcgagctagacgaagagggaattgcatactgggaaccaccaacatatatcaggtgcgtgagcatcgactatcgcaacattcagatgatgacgcgcgaacacttggccaaagcccagagaggacttcctggcgaaggcgtctcagaagtcattcagacgttggtcgagatctctcaggatggaaccagctactcgggggatctgctgtcaacaattgacgtgctgcggaacatgaccgagattttccgaagagcgtattactcccccacccccggagacgtgcaaaactttgtgcagatactgagtaatttgctggccgaggaaaatagggacaaatgggaagaggcacaacttgctgggcccaatgccaaggaactgtttcgcctggtcgaagatttcgtggacgtcatcggtttcaggatgaaggacctgcgagatgcataccaagtcactgacaacctggtgctatccatccacaaactccccgccagtggagccaccgacatatcctttccaatgaaaggttggcgggccacaggcgactgggcgaaggtgccagaagatagagtgaccgtaagcaaaagcgtgtttagcacaggtctgactgaggccgacgaagcttccgttttcgtggtgggaactgtcctgtatcggaacttgggcagtttcttggctctgcagcgcaatactactgtactaaacagcaaggtgatcagcgtcacagttaaacctcccccccgatctctgcggacgccactggagatcgaattcgcccacatgtacaacggaaccacaaaccagacgtgtatcctctgggacgagaccgatgtgccgagctctagcgctccgcctcagttaggcccctggtcctggagaggttgtcggacagttccactcgacgccttacgcactaggtgcctctgcgatcgactgtctactttcgccatccttgcccagctcagtgcagacgccaatatggaaaaggcgacgctgccttccgtcacactgatcgtaggctgtggcgtgagttctcttacattgctgatgctggtcattatctacgtttccgtgtggcgttacatccgctctgagcgatccgttatcttaatcaatttttgcctgtctattatctcatccaacgctttgatacttatcggccagacgcagacccgtaacaaggtggtctgtacactggttgctgctttccttcactttttctttctgtcctctttttgctgggtgctgaccgaggcctggcagtcctatatggcagtcacaggccatctgcggaacaggttgatcaggaaacgatttctttgtctcggatggggattaccagccctggtggtggcaattagcgtggggttcactaaggctaaggggtacagcactatgaactactgttggttgtccctcgagggcggattattgtacgcgtttgttgggccagccgctgccgtcgttttggtgaacatggtgatcggcatactggtctttaataaactggtgtctaaggacgggattaccgataaaaagttgaaggagagggccggtgcctcactgtggagctcctgtgtcgtccttcccctgttagctcttacctggatgagcgcagtgttagccgttaccgaccgaaggagcgcactgtttcaaatactgtttgccgtttttgactctttggaggggttcgttatcgtgatggtgcactgtatccttcggcgagaggttcaggatgctgtaaaatgcagggtagtggataggcaggaggaggggaatggcgactccgggggctcatttcaaaatggacacgctcagctgatgactgactttgagaaagacgtcgacctcgcgtgccgaagcgttttgaacaaagacattgcagcgtgccggaccgctacaatcaccggaaccctaaagcgcccatccttgcctgaggaggaaaagttgaaactggcccatgcaaagggcccaccaaccaattttaactcgctacccgcgaacgtttcaaaactgcacctgcacggatctcccagatacccgggagggccactgcccgactttcctaaccatagtctgacgctgaagcgcgataaggcgccaaaaagcagcttcgtgggcgatggagatattttcaaaaaactggactctgagctctccagagctcaggagaaagccttggacaccagctacgtgattctccccaccgccactgccacactcaggccaaagcccaaagaggaacccaaatattctatccatatcgaccagatgccccagacccggctgatacacctgagcaccgcacctgaggcctcccttccagctcggtcgcctccctctcggcagcccccaagcggcggcccccctgaggcgccgcccgcgcagccccctccacctcctccccctccgcccccgcccccacagcagcctctaccccctccccccaatctggagcccgctccccctagcctgggcgaccctggagagccagccgcccaccccggtccaagcacgggaccaagcaccaagaatgagaatgtcgccactctctctgtcagctccctggagagacgcaagagccgttatgccgagcttgatttcgagaaaattatgcacaccaggaaacgccaccaggacatgttccaagatctgaatcggaagcttcagcatgcagcagaaaaagataaggaagttctaggaccagactctaagccagaaaagcagcagacacctaataagcgcccttgggagagcttgagaaaggctcatgggactcccacctgggtcaagaaggagctggaaccactgcaacccagtcccctggagctgaggagtgtggaatgggagcgctctggagccacgatacctttggtgggccaggatatcatagacctgcagactgaagtctag

SEQ ID NO: 23063 - DNA, 4755 bp, synthetic construct
  misc_feature 1..4755: note = Description of Artificial Sequence: Synthetic coding sequence
  source 1..4755: mol_type = other DNA
atgcggggccaggccgccgcccccggccccgtgtggatcctggccccactccttctcctgctactgctcctcggacgcagagcgcgagctgccgcgggtgccgatgcaggacccggtcctgaaccctgcgctactcttgtccagggcaaattctttggctacttctccgcggctgctgtttttccagccaacgcttctcgctgttcttggaccttgaggaacccggatcctcgccgttacacattgtatatgaaggtagctaaggctcccgtgccttgtagcggaccagggcgagtccggacatatcaatttgattctttcctggagtccactcgtacctatctgggtgtggaaagtttcgatgaggtgctccgcctctgtgacccttccgctcctctggccttccttcaggccagcaagcagtttctgcaaatgcgaagacaacaacctccgcagcacgacgggctacgcccccgcgccggtccacctggaccaacagatgatttcagcgtggagtacctggtcgtgggtaacaggaacccttctagagctgcctgtcaaatgctatgtcggtggctcgatgcctgcctggccggctcccggtcatctcacccatgtggtataatgcaaactccttgtgcatgtcttggtggagaggcgggtggccctgcagcaggcccgctcgcaccccggggggacgtgtgcctgcgagacgcagtggccggcggtccagagaattgcctgacaagccttactcaggaccgaggaggtcacggcgccactggcgggtggaagttgtggtccctctggggtgagtgcacacgtgactgtggcggcggcctccagacccggacccggacctgtctgcctgcaccaggtgtggagggcggcgggtgcgaaggcgttctggaggaaggtagacagtgcaatagggaggcttgtgggccggcggggaggacatcgtcacgatctcaaagcctgaggtcaacagatgcacgaaggagggaggaactcggtgatgaactgcaacagttcggctttcctgctccgcaaaccggcgaccctgctgctgaagaatggtctccgtggtctgtctgttcctcaacctgtggtgaggggtggcagacacgcaccagattctgtgtgtcaagcagttactctacacagtgctccggcccgttgcgggagcagcgactctgtaataactctgcggtgtgcccggtccacggcgcgtgggatgagtggtctccctggagcctttgcagctctacatgtgggagggggtttagagatcgcaccagaacatgtcgtccacctcagtttgggggcaatccctgcgaaggtcctgagaaacagactaagttctgcaacatcgccctatgtccgggtcgtgccgtggatggcaattggaacgagtggtccagttggagcgcctgttcagctagctgtagtcagggacggcagcaacgcacccgcgagtgtaatggaccttcttacggcggggccgaatgccaaggccactgggtggagacccgagactgtttccttcaacagtgtcccgtggacggcaagtggcaggcttgggcgtcgtgggggagttgctcagtgacgtgcggcgcgggaagccaaagaagggagagagtttgctccggccccttcttcggaggagctgcctgccagggtcctcaggacgagtaccgacagtgcggtacccaaagatgtccagaaccacatgagatttgcgatgaggacaacttcggcgctgtgatctggaaggagaccccagccggcgaagtcgccgccgtcagatgtccccgcaacgccactggattaatcctgagaaggtgcgaactggacgaagagggaatcgcttactgggaaccgcccacctacatccggtgcgtgtccatcgactaccggaacatccagatgatgacaagggagcatctcgccaaagcccagcgtggcctcccgggagagggcgttagtgaagtgattcagactctggtggagatctcccaggatggtacctcttactccggcgatctactctctacgattgacgtgctgagaaatatgacggagatctttaggagagcatactactcgcccaccccgggcgacgtccagaactttgtccaaatcttgagcaaccttctggcggaggaaaatcgggacaaatgggaggaggctcaactcgctggaccgaatgcaaaggaactcttcaggctggtggaggattttgtcgacgtgataggattccggatgaaagatcttcgggacgcttatcaggtgaccgataatctcgtgctgagcatccacaagctgcccgcctctggagccaccgacatctcctttcctatgaaggggtggagagcaacaggggactgggccaaagtgcccgaggatcgcgtgaccgtaagcaagtccgtgtttagcaccggacttaccgaggctgacgaagcttccgtgtttgttgtcggaacagtgttatatcggaacctgggaagtttcctggccctacagagaaacaccacggttctgaatagcaaagtcatttcggtgacagtgaaacctcctccacgttctcttcgtacgcctctggagatcgaatttgcacacatgtataacggaaccaccaatcagacctgtattctctgggacgagacagatgttccttcatcatccgctccgccccagctgggcccatggagctggagaggttgccgaaccgtgcctctagacgctctaagaacgcgatgcctctgtgatcggctcagtacttttgcgatcttggcacagctgtcagccgacgcgaatatggagaaggctaccctccccagtgttaccctgattgtggggtgcggggttagcagtttgacactgctaatgttggtgataatttacgtgtccgtgtggcgttacatccgctcagagaggagtgtcattctgataaatttctgtctgtccatcatcagttccaatgctttgattcttatcggccaaactcagactcgcaacaaagtggtctgcacccttgtggctgcctttctccatttcttctttctgtcgtcattctgttgggtcctgaccgaggcctggcagtcctacatggctgtcaccggacatctgaggaatcgactgatacggaagagattcctctgcctcgggtggggcctgccagccctggtcgttgctatatctgtaggcttcaccaaagcgaaagggtactccactatgaactactgctggctctcactggaaggcggtctgctgtatgcttttgtggggcctgctgcagcggtggtcctcgtaaacatggtcatcggcatcttggtctttaataagctggtgtctaaagacgggattaccgacaaaaagctgaaggagcgggccggtgcttctctgtggtcctcctgtgtcgtcctgcctctcttagctcttacttggatgtctgccgtgctggctgtgacagatagacgaagcgctttgttccagattttgtttgcggtctttgacagtttagaaggatttgtcattgtgatggtgcattgtatcctcagaagagaagtccaggacgccgtcaaatgtagagtcgtggatcgacaagaagagggaaacggtgattctggtgggagtttccagaatggccatgcgcagcttatgacagacttcgagaaggatgtggatctggcctgcaggtcagtcttaaataaagacattgccgcctgtcgcactgcaacaatcaccgggacattgaagaggccaagcttgccagaggaggagaagctgaaactcgctcacgcaaaagggccgcccaccaattttaactcactgcccgccaacgtgagtaagctgcacttgcacgggtcccctcgctaccctggaggacccctgccagacttcccaaatcattccttgaccctcaaacgggataaggcacctaagtcaagttttgtgggagacggagatatctttaaaaagcttgacagcgaacttagtcgcgcccaagagaaagctctcgacacttcatacgtgattttaccaacggccacagcgacacttcgccctaaaccaaaggaggagccaaagtactcgatacatattgatcaaatgccccagacgcgacttatccatcttagcacggctcccgaggcaagtttgcctgccaggtccccacccagccgccagccacctagcggaggccctccggaggctccccctgctcagcctcccccccccccccccccacctcctccacctcctcagcaacctctacctcctccccccaacctcgagcccgcccccccatcactgggagaccctggagagcctgccgctcacccaggcccttctaccggcccttctacgaagaatgagaatgtagcgacactgtccgtgtcctcgctggaaaggagaaaaagccgctacgcggagctggacttcgagaagatcatgcatacccgcaagcggcaccaagatatgtttcaagatctgaaccgcaaactccagcacgccgccgaaaaagacaaagaggtcttgggaccagactccaaaccagagaagcaacagacccctaataaaaggccatgggagagcctacggaaggctcacggtacgcccacttgggtgaaaaaagaactggaacctctgcagccatctcctctagaattgcgctcggtcgaatgggagcgtagcggggcaaccatccccctcgtcggtcaagacattattgatttgcagactgaggtttag

SEQ ID NO: 23064 - DNA, 2334 bp, synthetic construct
  misc_feature 1..2334: note = Description of Artificial Sequence: Synthetic coding sequence
  source 1..2334: mol_type = other DNA
atgcccgacaaccggcagccccggaaccggcagccccggatccggtccggtaatgaacctcgatccgcccctgcgatggagcctgacgggcgcggagcttgggcacatagcagagctgcattggacagattagagaagctgcttaggtgttctcgctgtacgaatattctaagagaacctgtctgcctcggcggatgcgaacacattttctgcagcaattgtgtgtcagactgcatcggaacaggatgcccagtatgctatactcctgcgtggattcaggatctcaaaattaaccggcagctggacagtatgattcagttatgttccaagttaagaaatctgctacacgacaacgagttaagtgatttaaaagaggacaagccacgtaagagtctgtttaatgatgctggtaataagaagaactcaatcaagatgtggttttcaccacgctctaagaaggtcaggtacgtggtgtccaaagcttctgtgcaaactcagcccgctataaagaaagatgcctcagcgcagcaagacagctatgagttcgtgtctccatctcctcccgctgacgtttcggagcgagccaaaaaagcatctgcacggagcggaaagaagcagaagaagaagacccttgccgaaatcaatcagaaatggaacttagaggccgagaaggaagatggcgaatttgatagcaaggaggagtccaagcagaaactggtcagtttctgttcccaaccaagtgtcatcagctcgccccagatcaacggagagatcgatctcttagctagcggcagcttgacggagagcgagtgttttggctcacttaccgaagtgagccttccactggccgagcagatcgagagccctgatactaagtctagaaatgaagtcgtaacccccgagaaggtttgtaagaattatctgaccagcaagaaatctctcccgctggaaaataacggaaaacgcggacaccacaatcgcctctctagccctatatctaagagatgccgcacatcaatcctcagcacatccggagacttcgttaagcaaaccgtgccctctgagaatatccctctcccggagtgctcatcccccccatcatgtaagcgcaaggtgggaggaacttctgggcgtaaaaactcgaacatgtccgatgagttcatttctctgtcccctgggacccccccatctacgctgtcatcaagtagctaccgccgggttatgtccagtcccagcgctatgaagctgcttccaaacatggctgtaaaaagaaatcatagaggcgaaacacttctgcacattgcctctattaagggagacattccttccgtagagtaccttctgcagaatggcagcgatccaaacgtgaaagatcacgctggatggacgcctcttcatgaggcttgcaatcacggtcacttgaaggtagttgagctgctcctccagcataaagccctggtgaatacaacgggctatcagaacgatagcccactccatgatgccgcaaaaaacgggcacgtagacattgtcaagctcttgctcagctacggcgccagcagaaacgctgttaacattttcggactccgcccagtggactataccgatgacgagagtatgaaaagccttttactgctgcccgagaagaacgaaagttccagcgcatcacactgcagcgtgatgaacaccggacagcgaagggatggacccctcgtgctgattggtagtggactgtctagcgaacaacagaagatgctgtctgaactcgctgtcattctcaaggccaagaagtataccgagtttgactccaccgtcacccacgtcgtggtccccggtgacgctgtccaaagcacattaaagtgtatgcttggcattctcaatggctgttggatcctgaaatttgaatgggtcaaagcctgcctcaggaggaaagtctgtgagcaagaggaaaagtatgagatcccagagggtccaagacgttccagactaaaccgggaacagctcttgcccaaactgttcgatggttgttacttctacctgtggggtacattcaaacaccaccccaaggacaatctcattaaactcgtcaccgcgggaggcggccaaattctttcgcgaaagcccaaacccgatagtgacgttacgcagacgataaatacggtcgcctatcacgcaaggcctgattcagaccagcgcttttgcacacaatatatcatttatgaagacctgtgtaactaccaccccgagcgtgtgcggcagggcaaagtgtggaaggcaccttcctcttggtttatagactgtgtcatgtccttcgaactactgcccctggacagctag

SEQ ID NO: 23065 - DNA, 1704 bp, synthetic construct
  misc_feature 1..1704: note = Description of Artificial Sequence: Synthetic coding sequence
  source 1..1704: mol_type = other DNA
atgtggttcagcccccggagcaagaaggtgcggtacgtggtgagcaaagcatcagtgcaaacacagcccgccattaaaaaagacgcctctgcccaacaggattcctatgaatttgtctccccatctcctccagccgatgtgtccgagcgagccaagaaggccagcgcaaggtccggcaagaaacaaaaaaagaagaccctggcggagattaaccagaaatggaatctcgaggctgaaaaagaagatggggagtttgactcaaaagaggaaagcaagcagaagctcgttagcttttgcagtcagcctagcgtcattagcagtccacagattaatggtgagatcgatctgctcgcaagtggctccttgaccgaatccgaatgctttggatccctgaccgaggtgagtctgcccctggcagagcagatagagtctcccgatactaaatctcggaacgaggttgttactcccgaaaaggtctgcaagaactatcttaccagtaaaaagtccctccctttggaaaataatggaaaaagaggccaccacaatcggctgtcgtctccaattagtaagaggtgtcgtacttctatactctctacatccggagacttcgtcaagcagactgtaccttcagagaacatccccctcccggaatgctcctcaccaccctcttgcaaacggaaagtgggcggaacgagcgggaggaagaattccaatatgtccgatgagttcatatccctctctccaggaaccccaccttctacgttaagtagtagctcttatcgccgtgttatgtccagccccagtgcaatgaaactcctacctaacatggccgttaaacgaaatcacaggggagagaccctcctccatattgcatctataaaaggtgatattccctccgtggagtacttgctacagaacggatccgaccctaacgttaaggaccacgcgggctggaccccactgcatgaagcttgtaatcacggacacttaaaagtcgtggaactgttgctccaacataaagccctggtgaacacgacagggtatcagaatgattctccactacatgacgccgcaaagaatggccacgtggatatcgtgaagctgctgctttcttatggagcttcccgcaacgctgttaatatttttggtctcagacctgtggactacaccgacgacgagtccatgaaaagtttattactgctgccagaaaagaacgaaagctcctccgcgagccattgcagcgtgatgaacaccggccaacggcgcgatggacctttagtgctcatcgggtcggggctgagcagtgaacaacaaaagatgttatccgagctcgccgttatcttgaaggcgaaaaaatacactgagtttgatagcacagtgacgcacgttgtagtgccaggggacgccgtgcaaagcacccttaaatgcatgctaggtattctgaacggatgttggatcctgaaattcgagtgggtgaaagcttgcctacgcaggaaagtgtgtgagcaagaggaaaagtacgagatccccgaagggccgcgcaggagtagactgaatcgggagcattgccaatcttgcctgatggatgcaacatcaatctgcggcgagccctccaataccatccagcgtactaccttgttatcttcctcgctacaggtcggagctcgctcatcagtggaaagcccatctcaaacagtcacatag

SEQ ID NO: 23066 - DNA, 3750 bp, synthetic construct
  misc_feature 1..3750: note = Description of Artificial Sequence: Synthetic coding sequence
  source 1..3750: mol_type = other DNA
atgagcagcatgtggagcgagtacaccatcggcggcgtgaagatctatttcccttataaagcctatcccagtcagcttgccatgatgaattcgattctgcgaggcttgaattcgaagcagcattgccttcttgagagcccaaccggctcaggcaagagtttagccctgctgtgctctgctcttgcctggcagcaatccctgagcggtaagcctgccgatgaaggtgtatcagaaaaggccgaagtgcagctctcctgttgctgcgcctgccactctaaggacttcaccaacaatgatatgaatcaaggcacatccaggcatttcaactacccctctaccccaccgagtgagaggaatggcacaagcagtacgtgccaggattcccccgagaaaaccacattagcagccaaactgtccgcaaagaaacaggctagtatttatcgggacgagaacgatgactttcaggttgaaaagaaacgtatccggccattggagacaacccagcagatacgcaagaggcactgcttcggaaccgaggtgcataatctagacgccaaagtggactctgggaaaaccgtgaagctgaactccccactggaaaagattaattcgttctcacctcagaaaccgcctggccattgcagccgctgttgctgctccacgaaacaggggaattcccaagagagctcaaatacaattaaaaaggaccacactggaaagtcaaagataccaaagatttattttggaactcgaacacacaagcagattgcacagatcactcgggagctccgcagaactgcgtactccggagtgcctatgacaattttgagctcacgtgatcacacctgcgtgcatcctgaagttgtgggaaattttaaccggaatgagaagtgcatggagctgttggacgggaagaatggcaagtcctgttatttttaccacggagtgcacaaaatctctgaccagcatacactgcagacatttcaaggaatgtgcaaagcttgggacatcgaagagttggtgagtcttggcaagaagttgaaagcctgcccttattataccgcgcgagaactcattcaagatgccgacattatcttttgcccgtataattacctgttggatgctcaaatccgggaatccatggacctgaacctgaaagagcaggtggtcatcctggatgaggcccataacattgaggattgtgccagagaaagcgccagctacagcgtgacagaggtgcagctccgcttcgccagagacgaattggactccatggtcaataataatattcgcaaaaaagaccatgaacctctgcgagccgtgtgctgttcactcataaactggcttgaagccaatgcagagtacttggtagagcgtgactacgagagcgcctgcaagatttggtcaggaaacgaaatgctactgaccttgcacaagatggggatcacaacagcaactttccccattctccaaggccatttcagcgctgtgttgcagaaggaggagaaaatttctcccatatacggaaaggaggaggcgagagaggttcccgttatctcagcctctacacaaattatgcttaaggggctgtttatggttctcgattatttgtttagacaaaactctcggttcgcagatgactacaagatcgcaattcagcagacatactcttggactaaccaaatcgatatcagcgacaaaaacgggctcctggtgcttccgaagaacaagaaaagaagccgacaaaagacagccgtacatgtcctcaatttttggtgtctcaatcctgcggtggctttctctgacatcaacggaaaggtgcagactatcgtgcttaccagtggcactctgagccccatgaagtcctttagttctgagctgggcgtcacgttcactatccagctggaggccaaccatattattaagaattcccaggtgtgggtaggcacaattggatccggtcctaaaggccgtaatctgtgcgctacgtttcaaaacaccgaaacctttgaatttcaggacgaggttggcgcactactgttgtccgtgtgtcaaacagtgagccaggggattctgtgttttcttccaagctacaagctgttggaaaaattgaaggagagatggctttccaccggtctgtggcataatctggagcttgtgaaaaccgtcatcgtagaaccccagggcggggagaagacaaactttgacgagctcctgcaggtgtactacgatgcaattaagtacaagggtgagaaggatggggcgctgttagtggcggtgtgtagaggaaaggtgtccgaggggctggacttttcagatgataacgcccgagcagtcatcacgataggtattcctttccccaacgtgaaagatctgcaggtggagctgaagcgccagtataatgaccatcacagcaaacttcgaggtttactccccgggcggcagtggtacgaaatccaggcctacagagcgctcaatcaggccttaggaaggtgtatcagacaccgaaatgactggggggctctgatcttagttgacgatcgatttagaaacaaccctagtcggtatatctcagggcttagcaagtgggtccgacaacagattcagcaccacagtaccttcgagagcgctttagaatctctagccgagttcagtaaaaagcatcaaaaagtgcttaatgtatctatcaaggatcggaccaacattcaagataacgagagcacccttgaggtgaccagtctcaaatattcgaccagcccgtatctgctggaggccgcatcccatttgagccctgagaacttcgtagaggatgaggctaaaatatgtgtgcaagagctccagtgccctaagattattacaaaaaactcacccctaccaagctctatcatcagcaggaaggaaaaaaacgatcccgtgtttctagaagaggccgggaaagccgagaagatagtcatttctaggagtacttcacctacctttaataagcagactaagcgggtgagctggagttccttcaactcactgggacagtacttcacaggaaagatcccgaaagccacacccgagcttggcagctcagaaaactcagcttccagcccgccaaggtttaagacagagaagatggaaagcaagacggtgctgccatttacggataaatgtgagtcatcgaatctaacagtgaacacttcctttggctcctgccctcaatccgagacaatcatctccagcctgaagattgatgcaacccttaccagaaaaaaccacagtgaacaccccctgtgctcggaagaggcacttgatccagatattgagttaagcctggtaagtgaagaggataaacagagcactagcaatcgcgacttcgagacggaggccgaggacgagtccatttactttacaccagaattgtatgatccggaagacaccgacgaagaaaagaatgatctcgcagagaccgataggggcaacaggctagctaacaacagtgactgcattctcgctaaagacctgtttgagattagaactattaaggaggttgacagcgcacgagaagtgaaagcagaggattgtatcgacacaaaactaaacggcatcctgcacatagaagagagcaaaatcgacgatattgacgggaatgtgaaaaccacctggattaatgaactcgagctgggcaagacccatgaaatcgaaattaagaatttcaaaccgtcgccttctaaaaacaagggcatgttcccaggcttcaagtag

SEQ ID NO: 23067 - DNA, 945 bp, synthetic construct
  misc_feature 1..945: note = Description of Artificial Sequence: Synthetic coding sequence
  source 1..945: mol_type = other DNA
atggccagccggagcaagcggcgggccgtggagagcggcgtgccccaacctccagatcccccagtgcagagggacgaggaggaagaaaaagaagtggagaatgaagatgaagacgacgatgatagtgacaaggaaaaggacgaggaagatgaggtaatcgatgaagaagtgaatattgagttcgaagcctactccctcagtgataatgactacgatggtatcaaaaaactcctgcaacagcttttcctcaaggcacccgtcaacaccgctgaactcacagatctcctcatccaacaaaaccacattggatccgtgatcaagcaaacagacgtctccgaagatagcaacgatgacatggacgaagacgaggtctttggcttcatcagcttgctcaacctcactgaaaggaaggggacccagtgtgtagaacagatccaggagcttgtgctgaggttctgtgagaagaactgtgagaagtctatggtggagcagctggataagtttctgaacgacacaaccaaaccggtcgggctgctgctgtccgaacgattcattaacgtccccccccagattgccctccccatgtatcagcagcttcagaaggaattggcgggagcccaccggaccaacaaaccctgtgggaaatgttacttctacctgctcatctccaagacatttgttgaggcaggcaagaacaacagcaaaaaaaagccttccaacaagaagaaggccgccttgatgttcgctaacgctgaggaggaattcttctatgaaaaggccattcttaaatttaattactccgtgcaggaggagagcgatacctgcctcggcggaaaatggtctttcgatgatgtgcctatgacccccctcaggacggtgatgttgatcccgggcgacaagatgaatgaaattatggacaaacttaaggaatacctatctgtttag

SEQ ID NO: 23068 - DNA, 879 bp, synthetic construct
  misc_feature 1..879: note = Description of Artificial Sequence: Synthetic coding sequence
  source 1..879: mol_type = other DNA
atggccagccggagcaagcggcgggccgtggagagcggcgtgccccaacccccagaccccccagtccagcgagatgaggaagaagagaaggaggtggaaaacgaagacgaggatgatgacgattcggacaaggaaaaggacgaagaggatgaggtgatcgacgaggaagtaaacatagaatttgaagcgtactctctgtcagacaatgattacgacggcataaaaaagttgctgcagcagctctttctgaaagcccctgtgaacaccgcagaactgaccgacctactaatccagcagaaccacatcgggagcgtcattaaacagaccgatgtgtctgaagatagcaacgatgatatggacgaagatgaagtgttcggctttatcagcctgttaaacctgactgaaaggaagggcacgcagtgcgttgagcaaatacaggaactagtgcttcgcttctgtgaaaagaattgtgagaaatcgatggtggagcagttggacaaattcctgaatgacacaacaaagcctgtaggccttcttctaagcgagaggttcataaatgttccaccacagatcgccctccccatgtatcagcaactgcaaaaggaactcgcgggggcccacaggaccaataaaccctgtgggaaatgttacttctacctgctgattagcaaaacttttgtggaggcaggaaagaacaatagtaaaaagaaaccatcaaataagaaaaaagctgcccttatgttcgcaaacgccgaagaagagttcttttatgaggaacaaggaaaaccggaagtgcttggaggacctgatacgcgtagggggctcgagcctgtcccaatacagcataatggctggagcgtgccccctgtcctggagtag

SEQ ID NO: 23069 - DNA, 969 bp, synthetic construct
  misc_feature 1..969: note = Description of Artificial Sequence: Synthetic coding sequence
  source 1..969: mol_type = other DNA
atggccagccggagcaagcggcgggccgtggagagcggcgtgccccagcctccagaccctcccgttcagagggacgaggaggaagagaaagaggtggagaacgaagatgaggacgacgacgatagcgataaagagaaggacgaggaggacgaggtcatcgatgaagaggtcaacatcgagttcgaggcctactctctgagcgacaatgactacgacggtataaagaaactgctgcagcagctctttctcaaggccccagttaatactgcagaacttaccgacctgttgatacagcagaaccacatcggtagcgttatcaaacagactgatgtttcagaagattctaatgacgacatggatgaggacgaggtttttgggtttatcagtttgctgaacctcacagaacgaaagggtactcagtgtgtggagcagatccaggagctggtcttgagattctgcgaaaagaattgcgagaaaagtatggtggagcaactcgacaaattcttaaacgataccaccaagcctgtcggactcttattaagtgaacgatttattaatgtcccacctcagattgccctccctatgtatcaacagcttcaaaaggagttagccggagcccatagaaccaataaaccatgtgggaaatgctatttctatctgctcataagcaaaacattcgtcgaagccggcaagaataactcgaagaagaaaccttctaacaagaaaaaggcggccctgatgtttgctaacgccgaggaggagttcttttacgaagagcagggaaagcccgaggtgctgggcggcccggacacgagacgaggcctagagcctgttcctatccagcataatggtggcagccgcggacaggtcaccgccttggtatccctaaaggcgggcctgatccagagtagatcgactttaagcgattttcaggggaccttcatgactgtgggtattgcactcagctag

SEQ ID NO: 23070 - DNA, 879 bp, synthetic construct
  misc_feature 1..879: note = Description of Artificial Sequence: Synthetic coding sequence
  source 1..879: mol_type = other DNA
atggccagccggagcaagcggcgggccgtggagagcggcgtgccccagcctccagaccctccagttcagagggatgaggaggaggagaaggaggtcgagaacgaagatgaagacgacgatgattccgacaaggagaaagacgaagaggatgaggtgattgatgaagaggtaaacattgagtttgaagcctattccttaagcgataacgactacgatgggatcaaaaaactgctgcagcagctgtttctgaaggcccccgtgaatacagccgagttgactgatctgcttatccaacaaaatcatatcgggagcgtaatcaagcagaccgatgtgagcgaggattccaacgatgacatggacgaggacgaggtgttcggcttcatctccctgctaaacctaacggaacggaagggaactcaatgtgtggaacaaattcaggagctcgtactgaggttctgtgagaagaactgcgaaaagtctatggtcgagcagctggataaatttctgaatgatacgactaaaccagtcggtcttttgttgtcagagcggtttattaatgtcccacctcagatcgctctgcctatgtatcagcagctccaaaaggaattagcaggagcccaccgtaccaacaaaccctgcggaaaatgttacttctacttgctgatatccaaaacatttgtggaagcagggaaaaacaacagcaagaagaagccctcaaacaagaaaaaggcggcactcatgttcgcaaatgccgaagaagagtttttctacgagaaggctatcctaaagtttaactattctgtgcaggaggaaagtgatacttgcctgggtggaaagtggtctttcgatgactggtccgtgccgcctgtcctggagtag

SEQ ID NO: 23071 - DNA, 789 bp, synthetic construct
  misc_feature 1..789: note = Description of Artificial Sequence: Synthetic coding sequence
  source 1..789: mol_type = other DNA
atggccagccggagcaagcggcgggccgtggagagcggcgtgccccagccgccagatccaccggtgcagagggatgaagaggaggaaaaagaagttgagaatgaggatgaggacgatgatgactcggacaaggagaaggacgaagaagatgaagtaatcgatgaagaagtcaacatcgaatttgaagcatactccctcagcgacaacgactatgatggtatcaagaagttgcttcagcagctttttttaaaggcaccagttaacaccgccgaactgacagatctcctgatccagcagaaccatatagggtccgtcatcaagggcacgcagtgcgttgagcaaatccaggaattggtcctccgattctgcgagaagaactgtgaaaagtccatggtggaacaattggacaaattcctgaatgatacaacaaagccagtaggcttgctactgtccgagagatttataaacgtcccaccacagatagccttacccatgtaccagcaactgcagaaggaactggctggtgcccatcggacaaataagccgtgtgggaagtgttatttctaccttcttatctctaagaccttcgttgaagccggaaaaaacaactctaagaagaaaccttctaataagaaaaaagctgccctcatgtttgcgaatgctgaagaggaatttttttatgaggaacagggaaagccggaggttcttggaggcccagatacacgtcggggccttgagccggtcccaattcaacataatggttggtccgtgcctcctgtgttggagtag

SEQ ID NO: 23072 - DNA, 1398 bp, synthetic construct
  misc_feature 1..1398: note = Description of Artificial Sequence: Synthetic coding sequence
  source 1..1398: mol_type = other DNA
atggtggaccccgtgggcttcgccgaggcctggaaggcccagttccctgattctgaacctccaagaatggagctgcgaagcgtcggtgatatcgaacaggaactggagcgttgtaaagccagcattcgacggcttgaacaagaagtcaatcaagaacgatttcgaatgatttacctccagactctgttggcaaaagaaaagaagagctacgataggcagaggtggggattcaggagggctgcacaggctcccgacggagcctctgagccccgcgccagcgcctctcgcccacaacctgccccggccgacggggccgatcctccccccgccgaagaacccgaggcacgcccagacggagaggggtctcccggaaaggcacggccgggaactgcgcggagacccggggccgccgcaagtggcgagcgggacgacagaggaccccccgcctccgtggccgccctgcgctctaactttgaacgcatacgaaaggggcacggtcagcctggcgcagacgcagagaagcccttctatgtgaatgtggaattccaccatgagcgtgggcttgtaaaggtgaatgacaaagaggtgagcgatagaatttcgagtctgggtagccaggcaatgcagatggaaagaaaaaaaagccagcatggtgcagggtcttcagtgggagacgcaagtaggcccccatatcggggaaggtctagcgaatcttcatgtggagtggacggtgactatgaggacgctgaactcaatccccgctttctcaaggataatctaatagacgccaacggcggatctcgtccgccgtggccacccctggagtatcagccttaccaatctatctacgtcggtggaatgatggagggggagggaaaaggtcctctcttgaggagtcagtctacctccgagcaagagaaacggctgacatggccccgtcgtagctactcccccaggtcatttgaggactgtgggggcggttacacacctgactgttcatccaatgagaacctgacttcttctgaggaagatttctcctccggtcagtcctcgagggtgtcaccaagtcctaccacgtacaggatgtttcgggataaaagccgaagccccagccagaactcccagcagagctttgacagttcttctcctccaactccccaatgccacaagcggcatcgccactgccccgtcgttgtctctgaagctacgattgttggcgtgcggaagacaggacagatctggcccaacgacggggaaggcgcattccatggagagcatcctggggcagcagaagaggtttttcagaagctcctgccagacatcaggggcgccgccgacgccgaccaacttgtctgcgaaacacccgactgccctcagcacagtgcagaccatcaatag

SEQ ID NO: 23073 - DNA, 1377 bp, synthetic construct
  misc_feature 1..1377: note = Description of Artificial Sequence: Synthetic coding sequence
  source 1..1377: mol_type = other DNA
atggtggaccccgtgggcttcgccgaggcctggaaggcccagttcccagacagcgagccacccaggatggagcttagatctgtgggtgatatcgaacaggagttggaacgctgcaaagctagtatccggaggcttgaacaagaggtgaaccaggaaaggttcaggatgatttacctgcagaccttgctggcgaaggagaaaaaaagctacgaccgtcagaggtggggctttagacgggcagcccaggcccccgacggcgcttctgaaccaagagcctctgcctcaaggccacagcctgcccccgccgacggcgcagacccaccccccgccgaggaacccgaggctcgcccagacggagaggggtctcctggaaaagctaggcccggcacagccagacgcccaggcgcagctgcatctggcgagagggacgatcggggcccacccgcctcagtggccgccctccgatccaacttcgaaaggattcgcaaagggcacggccagcctggggcagacgcggagaagcccttctatgtcaacgttgagttccatcatgagcgcggactggtaaaggtcaacgacaaagaggtttctgaccgaatctctagcctcggatctcaggctatgcaaatggagaggaaaaagagccaacatggtgctggcagctctgtaggggatgcctcccgccccccataccggggcagaagcagtgagagcagttgtggtgtcgatggcgattacgaagatgctgaacttaacccccgattcttgaaggacaatctgatcgatgccaacggtggaagccgccccccatggcctcctctcgagtatcagccttaccagagtatctacgttgggggcatgatggaaggagagggaaaagggcccctgctgaggagtcaaagtacaagtgagcaagagaagcgcttgacctggccaaggaggagctattctccaagaagtttcgaggactgcgggggaggatatacacctgactgcagttctaacgaaaacctcacatcttcagaagaggacttttcttccgggcagtcctcaagagttagcccttcccctaccacatatcgcatgttcagagacaaatcccggtcccccagtcagaattctcagcagagttttgactcctcttcaccgcccactccgcagtgccacaaacggcatcggcactgtcccgtggtggttagtgaggcaactatcgtgggcgtacggaaaaccggtcagatatggcctaacgatggggagggcgcctttcacggagacgcagacggatcatttggtacccctcctggctacggttgtctctgtcttcctgcctggccatctggctgtaccgctgctactgccagggtcaccaggtcttag

SEQ ID NO: 23074 - DNA, 3816 bp, synthetic construct
  misc_feature 1..3816: note = Description of Artificial Sequence: Synthetic coding sequence
  source 1..3816: mol_type = other DNA
atggtggaccccgtgggcttcgccgaggcctggaaggcccagttcccagatagcgaacccccacgcatggagcttagatctgtaggcgacattgagcaggaactagagcggtgtaaagcctccattaggcggctcgaacaagaagtgaaccaggagcgctttcgcatgatttacctgcaaacgcttctggccaaggaaaagaaatcttatgaccggcagcgctggggattcaggcgagctgcccaggcccccgacggtgcttccgaaccacgagcatctgccagccgtcctcagccggcaccagcagatggcgctgatccaccccccgccgaggaacctgaagctcggcctgacggcgaaggatccccaggaaaggccaggccgggaactgcacgaaggccaggcgctgccgcgtctggtgagcgggatgatcgcggtccacccgcaagtgtggcagcgcttagaagtaattttgagcgaatcaggaaaggccacgggcagcccggcgcggatgcagaaaagccattctacgtaaatgtcgagtttcaccacgagagaggacttgtaaaggtgaacgacaaagaagtgagcgacagaatcagctcccttggaagccaggccatgcagatggagcgaaaaaaatcacaacatggggcgggttcatcagtgggggacgctagtaggccaccctataggggccggtcttctgaatcatcatgtggcgtggatggcgactatgaagacgctgagctaaaccctcgatttcttaaagacaatctgattgacgctaatggcgggtcaaggccgccatggccacccctggagtaccaaccttatcaaagcatttacgttgggggaatgatggagggtgaagggaaggggcctttgctacggtcccagtcaacctcagagcaggagaaaaggctgacgtggcctaggcgctcgtacagccccagatccttcgaagactgcggtggaggttatactccagactgctcgagtaatgagaatctgactagttctgaggaggactttagctccgggcagtcgagtagagtatcaccaagtcccaccacttaccgaatgttcagggacaaaagccggtcgcctagccagaacagtcagcaaagtttcgattcttcttcacccccaacgccacagtgtcacaagagacatcgccactgtccagtagtcgtatcagaagccacaattgtgggcgtcaggaagacaggccagatctggcccaatgatggagaaggagccttccacggggatgcggacggctcatttggcacccctccagggtacggctgtgccgcagacagagcggaagaacaacgtagacaccaggatggcttgccctatattgatgactcccccagttcatcccctcatctgtcttctaaaggtagaggttcacgtgacgccctagtgtcgggagccctagagtcaacgaaggcatccgaattggatctagaaaagggactcgaaatgaggaaatgggttttatccggaatcctcgctagtgaagagacctatctctcccacctggaggccctgttacttcctatgaaaccactgaaagctgccgcaaccacttcccagccagtgctcacttcacagcaaattgagacaatctttttcaaggtaccagagctgtatgaaattcacaaagagttttacgatggcctgttcccaagagttcagcagtggtcacatcagcagagagtcggcgatcttttccagaagttggccagtcagttaggcgtatatcgcgcgtttgtggacaattacggagtcgcaatggaaatggccgagaagtgttgccaggccaacgctcagtttgcagaaatatcagagaatttacgagcacggtctaataaagatgctaaggacccaacgacaaaaaattcactcgagacattgctttataaaccggtggatagagtaactcgctccactcttgtcttgcatgacctcttaaagcatacaccagcttctcacccagatcaccccctgttgcaagacgctctgcgtattagtcagaattttttgtcctcaatcaacgaagagattacgcctaggcgtcagtctatgaccgtcaaaaaaggtgaacaccgtcaactgctgaaagacagcttcatggtggagctcgtggaaggcgcgaggaaactccgacacgtgtttttgtttactgacctcttgctgtgcaccaagcttaagaaacaatcaggcggaaagacccaacagtacgactgtaagtggtacataccactgacggatttatcttttcaaatggtggatgaactggaagcggtgcctaacatccctttagtacctgacgaggaactggatgctctgaagatcaaaatctcacaaatcaaaaatgatattcagcgcgagaaacgggctaataagggatccaaagctaccgagagattaaaaaaaaagttatctgagcaggagtccctcctcctgctgatgtccccatccatggcatttcgagtccattcacggaacggtaagtcgtatacattccttatttcaagtgactatgaacgcgctgagtggcgagagaatattcgtgaacaacagaaaaagtgctttcgtagcttttcactcacctctgtcgagttacagatgttaaccaatagttgcgtgaaactgcaaacggtgcatagcatacccctgaccatcaacaaagaagacgacgagagcccgggcctgtatggatttttgaacgttattgtccacagcgccactgggtttaaacagtccagcaatctttactgtaccctggaagttgatagttttgggtatttcgtaaataaagctaagaccagagtgtacagggataccgccgagcccaactggaacgaagagttcgaaatcgagctcgagggctcccaaacgctgagaatcctttgttatgaaaaatgctataacaagactaaaatcccgaaagaagatggggaatcgaccgatagactgatgggaaaggggcaggtccaacttgatcctcaggccctgcaggaccgagattggcagcgcactgttattgctatgaatgggatagaggtgaagctgtctgtgaaatttaattcgagggagttcagtttaaagagaatgcccagcagaaagcaaacaggagtcttcggtgtgaagatcgcggttgtgactaagcgcgaacgcagtaaagtgccctacatcgtacgtcaatgtgtcgaagaaatcgagagacgcggtatggaggaagtcggaatctatagagtgtcaggggtggcgaccgatatacaggcactcaaagccgcatttgacgttaacaataaggacgtgtctgtgatgatgtccgagatggacgtgaacgctatagcaggtactctcaaactctactttcgagagttgccagaacctctgttcaccgatgagttttacccaaactttgcagaaggtattgctctgagcgaccccgtcgcaaaagaatcctgtatgctgaatttgctgctcagtctgccggaggcaaatctcctcaccttcctctttctgctggaccatctgaagagggtggctgaaaaggaggccgtcaacaagatgtctttgcacaatctggccacagtctttggccccacattgctgaggccttccgagaaggagagcaagcttcccgccaatccgtcgcagccgatcactatgacagactcttggagtctcgaggtcatgagtcaagtccaggtcctgctgtatttcctccagttggaggccattccggctcccgactccaagcgccagtcaattctgtttagcactgaagtttag

SEQ ID NO: 23075 - DNA, 2811 bp, synthetic construct
  misc_feature 1..2811: note = Description of Artificial Sequence: Synthetic coding sequence
  source 1..2811: mol_type = other DNA
cccagcgccccccgggtgagcaccgtgggcctgctgtgcagcggcgcggggccgcatctctgcccgtgcgcagaagagggaacagggggactggagtctcagggcgagatcatcccctctcgcggcagcaggaaacccgatggcgtctctggttccagaaggctgttctccagcctgtgcaaatcccaggaaggtagtaggaaggaatgcctgcggaaacatcggcgccttggccccgctatgcccgtttccagtccagggttccccggaccgttggcccgcagcgagcaccatctagacaccgccgccttgcagaccggtcagcgctcctctgctggcaccaagatgggctgtcctaccctcatgacccggccgcctcatcgccctacctccgcagctcgtgccggtgctgcgggaatgaggtggagcagggaaccctggagccccctgaaacggtccgaactggacctggaaaaaggcctcgagatgcggaaatgggtgttgtctggcattttagcctcggaggagacttacttgtctcatctggaagccctattattgccgatgaaaccactcaaggccgctgctacaaccagccagcccgttctgacttcccagcagatcgagacaatcttttttaaagtgcccgaactgtacgagatccacaaggagttttatgacggcttgtttccacgggttcagcagtggtcacaccaacagagagtgggggacctgtttcaaaagctggcgagtcagctgggggtttatcgagcttttgttgacaattacggcgtagccatggaaatggctgaaaaatgttgccaggccaacgcgcagttcgcagaaatctctgagaatctcagagcacgcagcaataaagacgcaaaagacccaacaaccaaaaacagtctggagacgttgctctataaacccgtagatcgtgtgacccgttccaccctggtgcttcacgatctcctgaagcacacacccgcttcccaccctgatcaccccttactgcaggacgctctgcggatatcccagaacttcctttcttcgattaacgaggagataactccacgccggcagtccatgaccgtaaagaagggtgagcaccgacagttactgaaagactccttcatggtggagctcgtcgagggcgcacgcaaactgaggcacgtcttcctgttcactgacctgctcttatgcaccaaactaaagaaacagagtggtggaaaaactcagcagtatgactgtaaatggtatattccactgacagacttgagttttcaaatggtggacgaactcgaggccgtccccaacattcctctagtcccagacgaggagctcgacgcgctcaagattaaaatctctcagatcaagaatgacattcagcgcgagaaacgggcaaacaagggcagtaaggccactgagagacttaaaaagaagctgagtgaacaggaaagcttgctacttttgatgtccccctctatggctttcagggtgcactctagaaatgggaaaagttataccttcttgatcagcagtgactatgaacgtgcagagtggcgggaaaacatccgcgaacaacagaaaaagtgtttccgatccttcagcctcacctctgtggagctccagatgttgacaaatagctgtgtcaagttacaaacggtgcatagcataccgctgaccatcaataaagaagacgatgagtctcccgggctgtacggcttcctgaacgtaatcgtgcacagtgctactggcttcaaacagagtagcaatctttactgtaccctggaagtggacagctttggctactttgtaaacaaggccaagactagggtgtacagagacactgccgaaccaaattggaatgaggagttcgagatcgaacttgaaggcagccagaccctacggatcctctgctatgagaaatgttacaataaaaccaagatcccaaaggaagacggtgagagcacagataggctcatggggaagggacaggttcagttggatcctcaagccctccaagaccgcgattggcaaaggaccgtcatcgcgatgaatgggattgaggtcaaactgagcgtaaaattcaactcccgggaattctcattgaagcgcatgccgtcgcggaagcagacaggagtctttggagtgaaaatcgccgtggtcactaagcgagagaggagcaaggtgccctacatcgtgcgccagtgcgtcgaggaaattgagcgccggggaatggaggaggtgggtatatacagagtgtcaggggtggctaccgatatacaagctcttaaggccgcgtttgacgtgaataataaggacgtttctgtgatgatgtccgaaatggacgttaacgctatcgcaggcacactaaaattgtatttcagggaattgccagaacccctgttcaccgacgagttctaccccaatttcgccgagggcattgcactgtctgaccccgtcgccaaggaatcctgtatgctgaacctgctcctcagtttgcctgaggctaatctgctaacattcctgtttctgctggaccatctgaagcgagtggccgagaaagaggccgtaaacaaaatgtcactgcacaacctggcaactgtcttcggtcccacgctactacgtccgtcagagaaggagtctaaactgcccgcaaatccttcacagccgatcaccatgacagacagttggagtcttgaagtgatgtcacaagtgcaagtcctgctctacttcctacagctcgaggccatccctgctcccgatagcaaacgacagtccatacttttctccactgaagtgtag

SEQ ID NO: 23076 - DNA, 3684 bp, synthetic construct
  misc_feature 1..3684: note = Description of Artificial Sequence: Synthetic coding sequence
  source 1..3684: mol_type = other DNA
atggtggaccccgtgggcttcgccgaggcctggaaggcccagttcccagattccgagccacctaggatggagctgaggtccgtgggtgacatcgaacaggagctggaacggtgcaaggcgtccattcggcgcctggaacaggaggtgaaccaggaaagattccgaatgatatatttacagacactgctggccaaagagaagaagagctacgaccgccaacggtggggcttcagaagagcggcgcaagcccctgacggcgccagcgaaccgagggccagtgcgagcagaccccaacccgccccggccgacggagccgatccaccccctgcggaggagcctgaggctcgcccagacggggaaggctcccccggaaaggctaggcctgggaccgcccgacggcccggcgccgccgcctctggggaacgggatgataggggacctccagctagcgtggctgcgctgaggagcaatttcgagaggattcggaagggtcacgggcagcctggggctgacgcagaaaagccgttttatgttaacgttgagttccaccacgagagagggttggttaaggtaaatgacaaggaggtgagcgacaggatatctagcctcggcagtcaagctatgcagatggagcgcaagaaaagtcagcacggcgccggctcttctgtgggcgatgcctcgaggcccccatacagggggcggagttcggagtcatcgtgcggggtagacggagactatgaggatgccgaacttaatcctagattccttaaagacaatcttatcgacgctaacggaggttctagacccccctggccccccttagagtatcagccttatcagtccatatatgtcggtggtatgatggaaggagagggtaaaggtcctctcctgcggagccagtctacatccgaacaggaaaagcgcttgacttggcctcgtcgcagttatagcccacgcagcttcgaggattgtggggggggttatacaccagactgtagctccaacgaaaatctgactagctctgaggaggacttctcgtccgggcagtcttcaagggtgtcaccaagccccaccacctatcgcatgtttcgagacaagagccgcagtccaagccagaacagccagcaaagctttgactcatcctcccctcccacaccacagtgtcacaagcgtcaccggcactgccccgtcgtagtgtcagaggcaacaatcgtgggagtgcgcaaaaccggccagatctggccgaatgacggggagggcgctttccacggagatgctgatggatcctttggcacgccgcctggctacggctgcgctgccgatcgtgccgaggaacagaggagacaccaggatggcctgccttacatcgacgactcccccagcagttcaccacacctgtcatcaaaaggacgggggtccagggacgcactggtcagcggtgccctggagagcacgaaagcaagcgaactggacctcgagaaggggttagaaatgagaaagtgggtgctttccggtattctggcatcggaagagacctatcttagccatttggaggccctattgttgcctatgaagcctttgaaggccgctgccacgacatcgcagcctgtcctaacatcccaacaaatcgagactatctttttcaaggtacctgaattatacgagattcacaaagaattctatgatggcctgttcccacgcgtacagcaatggtctcatcagcagagggttggagacctcttccagaaactggcctctcagctgggcgtatacagagccttcgtcgataactacggagtggcaatggaaatggcggaaaagtgttgccaagcaaatgcccagttcgcggaaatttctgaaaatctgcgggctcgaagtaataaagacgctaaagatccaacaacgaaaaatagcttggagactctactgtataagccagttgacagagtcacgcgaagcacccttgttctccacgacctgctgaaacacacccctgcctctcacccagaccaccctctcctacaggatgctttaagaattagtcaaaattttctgagttctatcaacgaagagattaccccacggagacagtcgatgactgtgaagaagggagagcatagacagctcttaaaggattctttcatggtagaattggtggagggagccaggaagttgaggcatgtctttctctttacggatcttctgctatgcaccaagctgaaaaaacagtctgggggaaagacgcaacaatacgattgcaaatggtacattcccctaaccgacctcagcttccagatggtcgatgagcttgaagcggtcccaaatatccctcttgttccggacgaagagctggatgccctcaagatcaaaatttcccagatcaagaacgacatccagagggagaaacgagccaacaaggggtccaaggctacagaaaggcttaaaaagaagctatcagaacaggaatctctcctgctgctgatgtctccatcaatggctttcagagtccatagcagaaatggcaaatcttacactttcctcatcagctctgattatgaacgggcagagtggcgggaaaatattcgtgaacagcagaaaaagtgtttcaggagcttcagtttgaccagcgttgaactgcaaatgctcacgaactcttgcgtgaaacttcaaactgttcacagcatccctttgaccattaacaaagaagatgacgagtcgcccggtttgtatggtttccttaatgttattgttcacagcgccaccggttttaaacagagctctaatctatactgcaccctggaggtggacagttttggttactttgtcaataaggccaagacccgggtgtaccgggacacggccgaacctaactggaacgagctcgatccccaggccctccaggaccgcgactggcagagaacggtgatcgctatgaacgggattgaggtgaagttgagtgtgaaattcaactcgcgggaatttagtctgaaacgcatgccatcacggaagcaaaccggcgtgttcggagtgaaaattgcagtggtcaccaagcgagagcgctctaaagttccctacatagtgcggcagtgtgtcgaagagatagagagaagagggatggaagaagtgggtatttatagagtgtcgggagtggctaccgacatccaggctttaaaagcagctttcgacgtaaataacaaggacgtgtccgtgatgatgtccgagatggatgtgaatgccatcgctggcactttaaagttgtactttcgggaattgcctgagccgctgttcactgatgagttttacccgaattttgccgagggcatagctttgtccgacccagtagcaaaggaatcgtgcatgctaaatttacttctgagtttgcctgaggccaacttactgacgtttcttttcctcctcgaccatctgaaacgggttgcagagaaagaagccgtaaacaaaatgtccctacacaatctggccaccgtgttcgggcccaccctgctgcgcccttctgagaaagagtctaagctgcctgcgaaccctagccagcccatcacaatgacggattcctggtctctcgaagtaatgagccaggttcaggtgttactgtatttcctgcagcttgaagccattccagctccagacagtaagcgacaatctatacttttttcgaccgaagtttag

SEQ ID NO: 23077 - DNA, 1404 bp, synthetic construct
  misc_feature 1..1404: note = Description of Artificial Sequence: Synthetic coding sequence
  source 1..1404: mol_type = other DNA
atggtggaccccgtgggcttcgccgaggcctggaaggcccagttcccagattcggaaccccccaggatggaacttagaagtgtgggcgatatcgaacaggagctggagcgctgcaaagcaagcatccgtcgccttgagcaggaggtaaatcaggagcggttccgaatgatatacctgcagactctgctcgccaaggaaaagaagtcatacgatcgacaacgctggggcttccgtagggctgcccaagcaccagatggtgcctcagagccccgcgcctccgcaagccggccgcagccggcccctgccgatggagcagacccacctccagccgaggagccagaggctagaccagacggggaagggtcgcccggcaaggcacgtcccggcacggcacgacggcctggcgctgccgcttctggagagcgggacgatcgcggcccacccgcctcggtggccgccctgcgctcaaactttgagcgaattagaaaaggccatggccagcccggcgccgacgccgagaaacctttctacgtcaacgtcgaattccaccacgaacggggcctggttaaagtgaacgacaaggaagtgtctgaccggattagctcactgggttctcaggctatgcaaatggagcggaagaaaagccaacacggcgccggtagttctgtgggggatgcttctcgcccgccgtatagggggcggtctagcgaatcgagttgcggcgtggacggtgattacgaggacgcagagctgaaccctaggtttctaaaagataatcttatcgacgcaaacggcggctcaagacccccctggccccccttagagtaccaaccgtaccagtccatctatgttggtggcatgatggaaggggaaggaaaggggccacttttgaggagtcaatcaacttcggaacaagagaaaaggctcacctggccacggagaagctacagcccacgttcgtttgaggattgcggcggtggatacactcctgactgcagctctaacgagaatttaactagttcagaggaggatttctcaagcggccagagctctcgcgtctcaccctccccaaccacgtatcggatgtttcgggacaaaagccggagcccgagtcagaattctcagcagtcttttgactcatcgagccctcctacccctcaatgccacaagcggcatcggcactgtccagtcgtggtctccgaggcaacaattgtaggtgtgaggaagacgggtcagatttggccaaacgacggcgagggcgcctttcacggggatgcagtgctaaaaacagaggtgccacatcaaggtgtgcggcgtgctagactttccttagaggcattaggagaggatccgtcattcctgttcccagcctctgatggaccaaggcatagctccacctggtag

SEQ ID NO: 23078 - DNA, 1365 bp, synthetic construct
  misc_feature 1..1365: note = Description of Artificial Sequence: Synthetic coding sequence
  source 1..1365: mol_type = other DNA
atggtggaccccgtgggcttcgccgaggcctggaaggcccagttcccggatagcgaacccccacgtatggagctgagaagcgtgggggacatcgagcaggagttagaaaggtgcaaggcctcaatccggcgacttgagcaggaagttaaccaggagcggtttcgcatgatctacctccagaccctcctggccaaagaaaaaaaatcatatgaccgccaacgttggggtttccggagagcagctcaggcacccgatggagccagtgagcctcgcgcgtcagcaagtagacctcagcctgctcctgcagatggcgcagatcctcctccggccgaggaacccgaagcccgccccgatggcgaaggtagtcctggcaaagccagacccgggacagcacgacggcctggcgcagccgcctctggcgagcgagatgatcgcggccctcctgcgagcgtcgccgccttacgctctaattttgaacgaatccggaagggccatgggcagcctggggctgacgccgaaaaacccttttatgttaatgtcgaatttcaccacgagagaggtctcgttaaagtcaacgacaaagaggtgtctgatcgaatttcctctcttgggagtcaggctatgcagatggaaagaaaaaagtcccaacatggcgctggctcttccgtgggggatgctagccgtcccccttacagaggtcggtcatccgagtcctcttgcggagtggacggcgattatgaagatgctgaactgaatcctagatttcttaaggataatttgatagacgcaaatggcggatcaaggccgccctggcctccgctcgaatatcaaccatatcagagcatctatgtgggagggatgatggaaggagaggggaaggggccgctgttgaggagtcagtccacctctgagcaggagaaaaggttaacctggccaaggaggagttatagcccgagatcatttgaagattgcgggggaggctacacaccggactgcagtagcaacgagaatttgacctcatctgaagaagacttctcatccggccagagttcccgcgtgtctccttcgccaaccacctacaggatgttcagagataaaagccgctccccttctcagaacagccagcagagcttcgattctagctcaccaccgactccacagtgtcataagcgccaccggcactgccctgttgtggtgtctgaggctaccattgttggcgtacgtaagaccgggcagatttggccaaacgacggagagggagcattccacggcgatgcagacggttccttcgggactccaccaggctacgggtgtgcagccgggagacccccgcacctgacggagctgcctgttcaacaccagtag

SEQ ID NO: 23079 - DNA, 4704 bp, synthetic construct
  misc_feature 1..4704: note = Description of Artificial Sequence: Synthetic coding sequence
  source 1..4704: mol_type = other DNA
atgaacgtggagaaggccgagttctgcaacaagagcaagcagcccggactggccagatcacagcataatcgatgggctggtagcaaagagacctgcaatgaccggcgcaccccttcaactgagaagaaagtagatctcaacgccgacccgctgtgcgagcgcaaggagtggaataagcaaaaactcccctgcagcgagaatcccagagatacagaagatgtcccttggattacactcaactcgtctatccagaaggtgaacgagtggttttctagatctgatgagctgctcggatctgatgattcacatgacggtgaaagcgaaagcaatgccaaagttgctgacgttctggacgtgctcaatgaagtggacgaatacagcggatctagcgagaagatagatttgttagcctctgaccctcatgaggccctgatatgtaagagcgaacgagtgcatagcaaaagcgtggaatctaatatcgaggacaagatcttcggtaaaacataccgcaaaaaagcatcactgccaaacctttcccacgtcacagaaaatcttataatcggtgcttttgtcacggagcctcaaataatccaagaacgaccactgaccaacaagcttaaacgtaagcgaagacccactagcggcctgcaccccgaagacttcattaaaaaagccgacctagctgtgcagaagacacctgaaatgatcaatcaaggcactaaccagaccgagcaaaatgggcaagtgatgaacatcacaaacagtgggcacgagaacaagacaaagggcgattcaatccagaatgaaaagaatcctaaccctatcgagagcttagaaaaggagtcggcctttaagacaaaagctgagcccattagcagtagtatttcgaatatggaattggaattaaacatccacaacagcaaagcacccaaaaaaaaccgtttgaggcgaaaaagttcgactcgccatatccacgctctggaattggtcgtgagccgcaacctgtccccacccaactgcaccgaactgcaaatcgacagctgttcaagtagcgaggagatcaaaaagaaaaagtataatcaaatgccagtgcggcacagccggaatttgcagctgatggaaggcaaagagccagctactggcgctaaaaaatccaacaagccaaacgagcagacgagcaagagacatgactccgacacattcccggagctaaaactgacaaatgcaccgggcagctttacgaagtgctccaatacaagcgaactcaaagagtttgttaatccttccttacctagggaagaaaaagaggagaaattagaaaccgtaaaagtgtcaaataatgctgaggatcccaaagacctgatgctatcaggggagagggtgcttcagaccgaacggtcggtagagtcttccagcatcagcctcgtccccgggactgactacggaacccaagagagtatctctctgcttgaagtcagcaccctcggcaaggcgaaaaccgaaccaaataaatgcgtttctcaatgtgccgccttcgaaaacccgaaaggtctgatacacggctgcagcaaggataaccgaaacgacactgaagggtttaagtacccactggggcatgaggttaatcactctagagaaacgtcaatcgagatggaagagtctgaactggacgcccagtatctgcagaacacgttcaaagtgtccaagcggcaaagctttgctccgttctcaaaccccgggaatgccgaggaagagtgtgccaccttcagcgctcattctggatcgctgaagaagcagagccccaaagtgaccttcgagtgtgagcagaaggaagaaaatcagggcaagaatgagagcaacatcaagcctgtgcagacggtcaacattacagctggcttcccagtggttggccagaaggacaagcccgtcgataacgccaaatgtagcatcaaaggcgggtcgcgattctgcttaagctctcagtttcgcggaaacgagactgggctcattacgccgaacaagcatgggcttctgcagaatccttacaggattcctccactgtttcccattaagagcttcgtgaagaccaaatgtaagaagaatctgttagaggaaaactttgaagagcacagtatgagcccagaacgtgagatgggcaatgagaacatcccttctaccgtgagtaccattagccggaataatataagagagaatgtattcaaggaggcttctagctccaatattaacgaggtaggttccagcactaacgaagtgggttcttctattaacgaaatcggctcctccgatgagaacatccaggcggagctgggacggaatcgaggtcctaagttgaacgctatgctgcggcttggtgtcctgcagcctgaggtctacaagcagtcactcccagggtccaattgtaagcaccccgagatcaaaaagcaagagtacgaggaggtcgtccagaccgtgaatacagactttagtccatatctgataagcgacaatttggagcaacctatgggctctagtcacgcaagtcaagtctgcagcgagaccccagacgaccttttggacgatggggagattaaagaggacaccagcttcgcggaaaacgatattaaagaatcaagcgctgtgttcagcaaaagcgtgcaaaagggggagctctctaggtctccgtcccctttcacccatacccacttagctcagggctaccgccgtggggcaaaaaaacttgagtcttcagaagagaacttaagtagtgaggacgaggagctcccctgcttccagcacttactgtttggcaaggtgaacaatattccatctcaatccaccaggcattctacggttgcaaccgaatgcctatcaaaaaatacagaggagaatttgcttagccttaaaaactcgctgaacgattgctccaatcaagtcattctcgcaaaggcctcccaggagcaccacctcagtgaggagactaagtgttcagcttccttgtttagtagccagtgtagtgagttagaagacctgactgctaacaccaatacccaggatcctttcctgatcggaagctctaagcaaatgcggcatcaaagtgaatcccaaggcgtggggctgtcggataaagagttagtgtcagatgacgaggaaagggggacaggactggaagagaacaatcaggaagagcagtctatggatagcaacctaggagaggccgcctcgggatgtgaaagcgagacctctgtcagtgaggactgctccggcctgagcagccagtccgacatacttactactcagcagcgagacactatgcagcacaacctgatcaagctccaacaggagatggctgagctggaagccgttctcgagcagcacgggagtcagccatctaactcttacccctctatcatctctgacagctccgctctggaagatctgcgaaatcccgaacagtctacatctgagaaggctgtcctcacttcacagaaaagctctgagtaccccatttcccagaatccagagggcctgtcagccgacaaattcgaggtaagtgcagactcttccacaagcaagaacaaggagcccggtgtggaacgaagtagcccttctaaatgtcctagccttgacgatcgctggtacatgcattcctgcagcggcagcctacaaaatcggaattacccctctcaggaagagctgatcaaggtggttgacgtggaagaacagcaactggaagagagcggtcctcacgatctcacagaaacctcctatttgcccaggcaggacttagaaggcacaccttatctggagtcaggaatctctctgttttctgatgaccccgagtcagacccaagtgaggatcgcgcccccgagtccgcaagagtgggcaatatcccaagttctacaagtgcactcaaggtgcctcagctgaaggtagcagagagcgctcaaagccctgctgctgcacacacaaccgataccgcaggttataacgccatggaggagagcgtgagtcgagaaaagccagaactcacggcctccaccgagagggtgaacaaacgtatgagcatggtggtctccggcctgactcccgaggagttcatgcttgtgtacaagtttgcaaggaaacatcacatcaccctgactaacctgattacagaagaaaccacccacgtcgtgatgaaaaccgacgcagagttcgtctgtgaacgaaccctcaaatatttcctaggcatcgcaggcgggaagtgggttgttagttatttttgggttacacagtctattaaggagcgcaagatgctgaacgaacacgacttcgaggttcggggcgatgtggtgaatgggaggaatcaccaggggcccaagagggcaagggagtcacaggacagaaagatcttccgaggtctggaaatctgttgttatggcccgtttactaatatgcccaccgatcaacttgagtggatggtacagttgtgcggggcttcagtggtaaaggagctgagcagcttcactctgggaactggcgtacatcctattgtggtggtgcagcccgacgcatggacggaagataacggctttcacgcaatcggtcagatgtgtgaggcgcccgttgtcacaagggagtgggtcctggactcagtggcgctttaccagtgccaagaactagacacctatttgatccctcagatcccccatagtcactattag

SEQ ID NO: 23080 - DNA, 4875 bp, synthetic construct
  misc_feature 1..4875: note = Description of Artificial Sequence: Synthetic coding sequence
  source 1..4875: mol_type = other DNA
atggacctgagcgccctgcgggtggaggaggtgcagaacgtgatcaatgctatgcagaagatactcgagtgcccaatctgcttggaacttatcaaagaacctgtgtcaacaaaatgcgaccacatcttctgcaagttttgcatgcttaagctgcttaaccagaagaaagggcctagccagtgtccgctatgtaagaatgacatcaccaagaggtccctgcaggaatctactcgatttagtcagctggtggaggagcttctcaagatcatttgtgcgttccagctggataccggcttggagtatgccaattcctataatttcgcaaagaaagagaacaactcgcccgagcacctgaaagatgaggtttccatcattcagagcatggggtacagaaatagagcgaaacgactcctgcagtccgagcccgagaatccctcgcttcaggaaacttccctgagcgttcaactgtccaaccttggaacagtaaggacactgagaactaaacagaggatccagcctcagaagaccagtgtctacatcgagttagggtctgacagttccgaggacactgtgaacaaagctacgtattgtagtgtgggcgaccaggagttgctccaaataaccccgcagggtacaagagacgaaataagccttgattccgcaaagaaggcagcttgtgaattttccgaaacagatgtaaccaacaccgagcaccaccagccatcaaataacgatctgaacacaacagaaaaaagagcggctgagcggcatcccgaaaagtaccaaggctccagtgtctctaaccttcatgttgagccctgcggcactaacacgcacgcgtcttctttgcagcacgagaattccagcctattgctgacgaaagatcgcatgaatgtggagaaagccgaattctgtaataagtccaagcagcctggtctggcccgctcccagcataatagatgggcagggagcaaggaaacctgcaacgaccggaggacgccttctacagaaaaaaaggttgacctgaacgcggatccattgtgcgagaggaaggaatggaataaacagaagttgccttgcagcgagaatccccgggataccgaagacgtgccctggattaccctaaacagttccatccagaaagtgaacgaatggttcagcaggtctgacgagctgttgggaagcgatgacagccacgacggcgaatcggagtccaatgcaaaagtggccgacgtacttgacgtgctcaatgaagttgacgagtattctggaagctcggagaagattgacctgttggctagcgatccccatgaagctctgatatgtaagagcgagagagtgcattccaagagtgtagaatctaacatcgaggataaaatcttcggcaaaacctacaggaagaaggcatcactcccgaacttatctcatgtgactgagaacctgatcattggcgccttcgttacagagccacagatcattcaggagagacccctgaccaacaaacttaaaagaaagcggaggcctaccagcgggctccaccccgaagattttattaagaaggcagacttggccgtccagaagacccctgaaatgataaaccaggggaccaatcagaccgagcaaaacggccaggtgatgaatatcactaacagcgggcatgagaataaaactaaaggcgactcaatacaaaatgagaaaaatcctaatcctatcgagagtctggagaaggagtccgctttcaaaaccaaggcagaaccaatcagctcttctatctcgaacatggagctggaacttaacattcacaattccaaagcccccaaaaaaaatcggttgcgacggaaaagcagcacccgccacatacacgccctggagctggtggtgtcgagaaatctcagccctcctaactgcaccgaactgcagatcgactcttgctcctcttctgaggaaatcaaaaagaagaagtacaatcagatgccagtccgtcactcacggaatctacagctgatggaaggcaaggaacccgcaactggagccaagaagtccaataagcccaacgagcagacttcgaagcggcacgatagtgacacgtttccagagctgaagctaactaacgcccctggttcgtttactaagtgcagcaatacgtctgaattgaaagaattcgttaacccttctctgccgcgtgaagagaaggaagagaagctcgagacagtaaaggtgagcaacaacgcggaagatcctaaggacttgatgctctctggagagcgagtgttacagactgagcgttccgtcgagtcaagttcaatctctttggtcccagggaccgattatgggacccaggaaagcatctctctgctggaagtcagcaccctcggcaaggccaaaactgagcctaacaaatgcgtctcccagtgcgcagcctttgaaaatcccaagggcctgatccatggttgcagtaaggataacagaaacgacacagaggggttcaagtatcccctcggacacgaggttaaccactctagagagacatccatcgagatggaggagtccgagctcgacgcgcaataccttcagaacactttcaaagtgtccaagcgccagtcctttgcacccttctcaaatcccggtaacgcagaagaagagtgtgccaccttcagtgcacacagtggtagcctgaagaaacaaagcccaaaagtgacattcgagtgtgagcaaaaagaggagaaccagggaaaaaacgagagcaacattaaacctgttcaaaccgtcaatatcaccgctggatttcccgttgtcggtcagaaagacaagcccgtcgacaatgccaagtgcagcatcaagggcggtagcagattctgtctgtcttctcagttccgtggcaacgaaacaggtttgatcacccctaataagcatgggctgcttcaaaacccgtacaggatccccccactcttccctatcaagtcttttgtcaagaccaagtgtaaaaagaatttgctggaggagaactttgaggagcattcgatgtctcctgagcgtgagatgggcaatgagaacatcccctctacagtatccaccatctctcggaataacattcgtgagaacgtattcaaggaagcctcatcatccaacatcaacgaggttggttcctctaccaatgaagtggggtcctccatcaacgagataggatcttctgacgagaacatacaggctgagttgggaagaaaccgaggcccgaagttaaatgcgatgcttcgcctgggggtattgcagcccgaagtttataaacagtccctgccaggctccaactgtaaacatcccgaaatcaagaaacaggagtacgaggaggtcgttcaaaccgtgaacacagacttctccccctaccttatcagcgacaacctcgagcagcccatgggatccagccatgcttcccaggtttgtagtgagactccggatgacttgttggatgacggcgagattaaggaagacacatcttttgccgagaatgacatcaaagaatcttcggccgtgttcagcaaatcagttcagaaaggagagctgtccaggtcaccttctccttttactcacacgcacctagcccagggttatcggaggggtgcaaaaaagcttgagtctagcgaggagaacctgagttccgaggacgaggaattaccttgtttccagcatttattatttggaaaagtgaataacatccctagtcagtctacgagacactcaacagtagcgacagagtgcctgtcaaagaacactgaggagaacctgctgtccctgaaaaactcactgaatgactgcagtaaccaggttatattagccaaggcctcgcaagagcatcacctgagtgaggaaactaaatgtagcgcctccctcttctcctcccagtgctcggagctggaggatctgactgctaatactaacacgcaggatccatttctgataggttcgtcaaaacagatgcgacaccagtcagagtcacaaggggtcggattgagcgataaagaactggtgtccgatgacgaggagcggggtaccggcttagaggaaaataaccaggaggagcaatccatggatagcaatctaggcgaagctgcaagcgggtgcgaatcagagacgtctgtcagtgaagattgctccggcttatcctctcagagcgatattcttacaacccagcagagagatacgatgcaacataatctgattaaactgcagcaggaaatggcagaactagaagcagttctggagcagcatgggtcgcagccttctaattcctacccctcgattatatcggattcttctgccttggaggacctgagaaaccctgagcaatctacttcagagaaagacgccgagtttgtttgtgagaggactttgaagtactttctggggattgcaggaggcaagtgggttgtgtcatatttttgggtgacccagtccatcaaggagcgtaaaatgctcaacgagcacgacttcgaagtgcgaggtgatgtggtgaatggcaggaatcaccagggacccaaacgcgctagggagtcacaagatcgaaagatattccgggggctagaaatatgctgttatggcccatttacgaacatgccaacagaccagttggagtggatggttcagctgtgcggagccagcgtggtgaaggaactgtcaagttttacactcggaactggtgtgcaccccatagtcgtcgtccagcctgatgcgtggaccgaagacaatggctttcatgctatcggccagatgtgtgaggcccccgttgttactagggaatgggtgcttgactctgtagctctataccagtgccaagaactcgatacttatctgataccgcaaataccgcactcccattactag

SEQ ID NO: 23081 - DNA, 2043 bp, synthetic construct
  misc_feature 1..2043: note = Description of Artificial Sequence: Synthetic coding sequence
  source 1..2043: mol_type = other DNA
atggacctgagcgccctgcgggtggaggaggtgcagaacgtgatcaatgccatgcagaaaattttggaatgccctatttgcttagaactcataaaagaacccgtgtcaacaaaatgcgatcatatattttgtaagttctgtatgcttaagctgctgaatcaaaaaaagggccccagtcagtgtccactgtgtaagaacgacataaccaagcggtcccttcaggagagcacacggttctcgcaacttgtcgaggagttgttgaagatcatctgtgcctttcagcttgatacaggccttgaatacgctaattcgtataactttgctaagaaggaaaacaactcccccgaacatctcaaggacgaagtctcaatcatacagtcaatgggctaccgcaatagggccaaacgactccttcaatcggagccagagaacccttccctgcaggagacttctttgtccgtgcagctcagcaatctgggaactgtccgcacgctgcgtaccaagcaaaggatccagccacagaaaacctccgtttacattgagctgggagaggcagcttccggatgcgaaagtgaaaccagcgtgtctgaagactgtagcggcctgtcaagtcagtcagacattctcacgacccagcagagggacacaatgcagcataacctcattaaactacagcaggagatggccgagctggaagcagttctcgaacaacacggttcacagccaagtaattcctacccatccatcataagtgatagtagtgctttagaggacctgagaaaccccgagcaatcaacttcagagaaggccgtgctcaccagtcaaaaaagcagtgagtacccgatctcacagaatcctgagggcctgtccgctgacaaatttgaggtatcggccgacagctcaaccagcaagaataaagagccgggtgtcgagagaagctccccttcaaagtgtcctagtctagacgacaggtggtacatgcactcctgttctggcagtcttcagaacagaaattatccaagccaggaagagctcattaaggtcgtggatgtggaagagcagcagctggaagagtctgggccacacgatctcaccgagacatcttaccttccaaggcaggatctggaaggcacaccatacctggaatcagggatctcccttttttccgatgaccctgagtcggacccttccgaggatcgcgccccagaatcagctagagtcggcaatattccaagctcgacaagcgcccttaaggtgcctcagttgaaagtggcggaaagcgcccaatctcctgcagcggctcacaccactgacaccgctggctacaacgcgatggaggaatccgtgtcacgcgaaaagcctgagctcaccgcctcaactgagagggtaaacaagaggatgtctatggtcgtgagtggacttactccagaagaattcatgcttgtgtacaagttcgccaggaaacaccacatcaccctcacaaatcttatcaccgaggagacaacccacgtggtgatgaagaccgacgccgaattcgtttgcgaaagaaccctgaagtacttcctaggcatcgccggcggtaaatgggtggtttcttacttctgggtgacacagtccattaaagaacgaaaaatgttgaacgagcacgatttcgaagttagaggggatgttgtcaacggtcgaaaccatcagggcccgaagcgcgcccgcgaatcacaagaccggaaaatctttcgtgggctcgagatttgttgctacgggccttttacgaatatgcccactgaccaactggagtggatggttcagttgtgtggcgcttcagttgtgaaagagctcagctcatttacactgggaaccggagttcatccaatagtcgttgtgcagccagacgcatggacagaagataacgggtttcacgccatcggccagatgtgtgaggcccctgtcgttaccagagagtgggtactggattccgtggcgctgtatcaatgccaggaacttgatacatacctgattcctcaaatccctcactcgcactactag

SEQ ID NO: 23082 - DNA, 2166 bp, synthetic construct
  misc_feature 1..2166: note = Description of Artificial Sequence: Synthetic coding sequence
  source 1..2166: mol_type = other DNA
atggacctgagcgccctgcgggtggaggaggtgcagaacgtgatcaacgccatgcagaagattctagagtgtccaatttgtcttgaattgataaaagagcctgtatccactaaatgcgaccatatcttttgtaaattctgtatgctgaagttgctcaaccagaagaaaggcccatctcagtgtcccctgtgtaaaaacgatattacgaaaaggagcttgcaggagtctactagattttcacagttggtagaagagctgctgaaaattatctgtgcctttcagctcgataccggcctcgagtatgcgaactcatataatttcgccaagaaagagaataattctcccgaacatctgaaggatgaggtatccatcatccagagcatggggtatcgcaatcgcgcaaaaaggctcctgcagtctgagcccgaaaatccctccctacaggagacatcactgagtgtgcagctgagcaatttaggcactgtccggaccttgcgaacaaagcagagaatccagccccagaaaactagcgtgtacattgaactgggcagcgactcttcggaagatacagtcaataaggcaacctactgctccgtgggggatcaggagctcctacagattacaccacaggggacacgcgatgaaatctccttggattcagcgaagaaaggtgaagctgccagtgggtgcgaatcagaaacatccgtgtcagaggattgttcgggcctctcttctcagagcgacattttgaccactcagcagcgagatactatgcagcacaacctcattaagcttcagcaagaaatggcagaacttgaggctgttctggagcagcacggtagtcagcccagcaacagctatccctcaatcatcagcgatagtagcgccctagaggacctcaggaatcccgagcagagtacgtcagagaaggccgtgctgacatctcagaagtcaagcgagtaccctattagccagaacccagaaggactctcggccgataaattcgaagtgagcgcggacagcagcacctccaagaacaaagaaccaggcgtggagcggtcttcgccgagcaaatgccctagcctcgatgacagatggtatatgcattcttgcagtggttctctccaaaaccggaactacccgtcacaggaagagctgattaaggtggtggacgtcgaggagcagcaactggaggaaagtgggccacatgatttgactgaaacatcctacctgccaagacaagatctggaggggaccccatatttggagtccggcataagtctgttctctgatgatcccgaatctgatccctcggaggaccgggctcccgaatccgctagggttggcaatatcccctcttccacatccgccctcaaggtgccccagctgaaggtcgctgagtctgcccagtctcccgccgccgctcataccactgacaccgccggatataacgccatggaggagtccgtatctcgcgagaagcctgaactgacagcctccaccgaaagagttaacaagcggatgtctatggtggtcagcggcctgacaccggaagaattcatgctggtgtataagttcgctcgaaagcatcatatcacccttaccaacttgatcaccgaagaaacgacgcacgtcgtgatgaaaactgacgctgagttcgtctgcgagcggaccctgaagtactttctgggaatcgccggcggcaagtgggtcgtttcatatttttgggtgacccagtcgattaaggaaaggaagatgttgaacgaacatgattttgaggtcaggggcgatgtggtcaatggcaggaatcaccagggtccaaagagggctcgtgaatcacaggacaggaagatatttagaggcctcgaaatatgttgttatggtccttttacaaatatgcccacagaccagttagaatggatggtgcaactgtgcggcgcaagcgtcgtcaaggaactaagctccttcaccctcggcaccggcgtacaccccatcgtcgtggtacagccagacgcctggacagaagataatggcttccacgcaatcgggcagatgtgtgaagcccccgtggtcacccgggaatgggtgttggacagtgtggcgttgtaccagtgccaagaactggatacatatctgatccctcaaatccctcactcccattactag

SEQ ID NO: 23083 - DNA, 4797 bp, synthetic construct
  misc_feature 1..4797: note = Description of Artificial Sequence: Synthetic coding sequence
  source 1..4797: mol_type = other DNA
atggacctgagcgccctgcgggtggaggaggtgcagaacgtgatcaatgcaatgcaaaaaatactggaatgtcccatctgtctcgagttgatcaaagaaccagtcagcacaaaatgtgatcacatcttttgtaagttttgcatgttaaagctgcttaaccaaaaaaagggtccgtctcagtgtcctctgtgtaagaatgatatcacgaaacgctctctccaagagagcacacgcttcagtcagctggtggaagagttgctgaaaatcatatgcgccttccaattagataccgggctggagtatgccaactcctacaacttcgccaagaaagaaaacaacagtcctgaacacctgaaggatgaagtttccatcatacagagcatggggtacagaaaccgggcaaaacgattgttgcagtctgagcccgaaaatcctagcctgcaggagacttcactgtccgtgcaactgtctaacctcgggacggtacggacgctcagaacaaaacagaggatacaaccgcagaagacgagcgtttacatcgagctgggctcagactccagcgaagataccgtcaacaaagccacttactgcagcgtgggagatcaggagcttcttcagatcactccgcaaggcacacgggacgagatctctctcgacagtgcaaagaaggccgcatgcgaattttcagaaacagatgtgaccaacacggagcatcaccaaccctccaacaacgatctgaataccaccgagaagagagcagcagagagacatcccgagaagtaccaaggcagttctgtctctaatctacacgtggagccctgtggaacgaacacgcatgcatcctctctgcagcacgagaacagcagtctcctgctcactaaggataggatgaatgtggagaaagcagaattctgtaacaaaagtaagcagcctggcctagcccggagccagcacaacaggtgggccggcagtaaagagacgtgtaatgacaggcggaccccctccacagagaaaaaggtagatctgaatgcagacccgctgtgcgaaagaaaagagtggaataagcaaaagctgccttgctcggagaaccctagggacactgaggatgtgccgtggatcactctcaattcctccatccaaaaagtaaacgagtggttttctagaagcgatgaactcttgggatcagacgattcccacgatggtgaatccgaaagcaacgcaaaggtggccgacgtgctggacgtgttgaatgaggtcgacgagtatagcgggtcctcggaaaaaatcgatctcctggcaagcgacccccacgaagccctgatttgcaaatctgaacgcgtgcacagtaagtccgttgagagtaatattgaagataagattttcggcaagacatatagaaagaaagcaagtctgcctaacttgagtcatgttaccgaaaatctgatcatcggggcattcgttacggagccgcagatcattcaggagcgcccgctgaccaacaaactgaaacgaaagcggcgccccacgagcggtctccatccggaggatttcattaagaaagctgatttagctgtgcagaagacccctgaaatgatcaatcaagggaccaaccagactgagcagaatgggcaagtgatgaatattaccaactcaggccatgagaacaaaaccaagggggactccattcagaacgagaaaaaccccaaccctattgaaagcctcgagaaggaaagcgcatttaagacaaaggcagagcctataagttcttcaattagcaacatggagcttgaactcaacattcataatagtaaggcgccaaaaaagaacaggcttaggagaaaatcttcaacaagacatatccatgcgctcgagctcgtggttagtcggaatctctcaccacctaattgcactgaactgcaaatagattcttgctctagcagcgaagagataaaaaagaaaaagtacaaccagatgcccgtgcggcactcacggaacctgcagctcatggaaggcaaggagcctgctactggcgctaaaaagtccaataagcctaacgaacagactagtaaacggcacgacagcgacactttccccgaactcaagctcacgaatgcccctggcagcttcaccaagtgctcaaacacttctgaactcaaggagtttgtgaatccatccctgcccagggaagagaaagaagagaagttggaaactgtgaaggtttctaataacgccgaggacccgaaagatctgatgttgtctggggagcgcgtgctgcagactgagcgttcggttgaatcttcatcaataagcctagttcctggtactgactatggtacccaggagtctatctcactcctcgaggtctcgacgctcggcaaggctaagaccgagcccaacaaatgcgtttcacagtgtgctgcttttgaaaatcctaaagggctgattcatggatgtagtaaggataacaggaacgatactgaaggtttcaaataccctctgggccacgaagttaaccattctagagagacctccattgagatggaagaatccgaattggacgcacaatatctccagaacacgtttaaggtgagcaagcgccagtctttcgcccccttctctaatcccggcaatgcggaagaagagtgtgcaaccttctccgctcattctggatcgcttaaaaagcagtcccctaaagttaccttcgagtgtgagcagaaagaagagaatcagggcaagaacgagtccaacattaagcccgttcagacagtgaacatcacagcaggcttcccggtggtcggacagaaagacaagcccgtagacaacgccaaatgcagtattaaaggcgggtccagattctgtctctccagtcagttccgcgggaatgagaccggtttgatcacaccaaataagcacggattgctccagaatccgtatcggattccacccttgtttcctatcaagtctttcgtgaaaactaagtgcaaaaaaaaccttctggaggaaaattttgaggaacattcaatgagccccgagcgagaaatgggcaacgaaaatattcccagtaccgtgagcacgatttcccggaacaacatacgcgaaaacgtatttaaagaggcctcaagcagcaatatcaatgaagtgggcagctcgactaacgaggtcggatcatctataaacgaaatcggaagctcagacgagaatatccaagccgaactagggcgaaataggggtcctaaactaaacgctatgctccgattgggggtcttgcaacccgaggtttacaagcagtcgttaccaggatcgaattgtaagcatcctgaaatcaaaaaacaggaatatgaagaggtcgtccagacagtcaacaccgacttttccccttatcttatctctgataatctggagcagcctatgggctctagccacgcgtcacaggtttgttctgaaacacccgacgatctgctcgatgatggggaaattaaggaggatacatcattcgctgaaaacgacatcaaggagtctagtgcggtcttttctaaaagcgtgcagaagggagaactttctcgtagtccttcccctttcacccacacccacctggcccaggggtatcggcgcggcgccaaaaaactcgaaagtagtgaagagaacctgagctcagaggatgaggagctcccatgttttcagcatctgttgtttggaaaagtcaacaacatccccagtcagtccacccgacatagcacagtggctactgaatgtctgtcaaaaaatacggaggaaaatctcctcagtctcaagaattcgttgaatgactgctcgaaccaggtgatcctggctaaggcctctcaggagcatcatcttagcgaggagactaaatgtagcgcaagcctctttagcagccagtgtagtgagctcgaagacctcacagctaacactaatacacaggatcctttcctgatcggaagctctaaacagatgcgacaccagagtgagtcacagggagttgggctttcagacaaggagctggtgagcgacgacgaggaaagaggaaccggtcttgaagagaataatcaggaggagcagagcatggattccaatttgggcgaggcagcttccggatgtgaatctgaaaccagcgtgtccgaagactgctccgggctgtcttcccagagcgacatccttacaacccagcagcgtgacacaatgcagcataacctcataaaactacagcaagaaatggctgaactggaagccgtgctggagcagcacggatctcagcccagcaattcatatccctctataatatctgattcttcagctctggaggatttgaggaaccctgaacagagtacctccgaaaagggcgtgacgcagtctatcaaggagcgcaaaatgctcaacgagcatgatttcgaagtcagaggtgacgtggtgaatggtcgtaaccatcaaggtcccaaacgcgctagggaatctcaggatcgaaaaatcttccgcggccttgaaatttgttgctacggccctttcactaacatgcccacagaccagctagagtggatggtgcaactctgcggtgcaagcgtagtgaaggaactgagctctttcactctgggaacaggcgttcaccctattgtggtcgtgcagccagacgcctggacagaggataacggttttcatgctattggtcagatgtgcgaagccccggtagtgacaagagagtgggttctggacagtgtggccctctatcagtgccaggaacttgacacctacctgattccgcaaataccccactcgcactactag

SEQ ID NO: 23084 - DNA, 5592 bp, synthetic construct
  misc_feature 1..5592: note = Description of Artificial Sequence: Synthetic coding sequence
  source 1..5592: mol_type = other DNA
atggacctgagcgccctgcgggtggaggaggtgcagaacgtgatcaacgcaatgcagaagattctggagtgtcctatttgcttagagctgattaaagagcctgtgtcaactaagtgtgaccatattttttgtaagttctgcatgttgaaattgctgaaccagaaaaagggacccagtcagtgcccgctctgcaagaatgatattaccaaacgtagcttgcaggagagtacgcggttctcacagctcgtggaggaattgctgaaaattatttgcgcattccagctggataccggtctggagtatgctaactcttacaactttgccaagaaagagaataactcgccagagcatttgaaagacgaagtgtcaatcattcagagtatgggctaccgaaaccgggccaagaggctcctccagagcgaacccgagaatccctcattacaagagacatctctgtcagtccaactgtccaacctgggaacagtgcgaaccctaaggacaaagcagcggatccagccccagaagaccagtgtgtatatcgagctggggtccgactccagcgaggacacagtgaacaaggcgacttactgttcagtgggcgatcaagagctcctgcagatcacaccccagggaacccgcgatgagatctcgctggattccgctaagaaagccgcgtgtgaattcagtgagactgatgtgactaacactgaacatcaccagccctcgaacaacgacctcaatactactgagaagagagccgcagagcgccatccagagaaataccaaggcagctctgtgtctaacttgcacgttgagccatgtggaacgaatacacatgcaagctccctgcagcacgaaaacagcagcctgttactcaccaaggaccggatgaatgtcgagaaggccgagttctgcaacaagtccaagcagcccggactggcacgatcacaacacaaccggtgggctggctcaaaggagacgtgtaatgatcgcaggacacctagcacagagaaaaaggtggatctcaacgctgaccctctgtgcgagagaaaggagtggaataaacaaaagcttccatgttctgaaaatcctcgtgatacggaggatgtcccttggattaccctgaactcttcaatacaaaaggtgaacgagtggttctcaaggagcgatgagctcctgggaagcgacgattcacacgacggggaaagtgagtcaaacgcaaaagtggctgatgtcctggacgtcctgaatgaagtcgatgagtatagcggttcatcagagaaaattgatttactggcctcagaccctcatgaagctttgatttgcaagagtgaaagagtacattctaaatctgtcgagagcaatatcgaggataaaatcttcggaaaaacgtatagaaagaaagcctcgctgccaaatctcagtcatgtgacagagaaccttattataggcgcatttgtgactgagcctcaaatcattcaggaacgacccctcacaaacaagttaaaaaggaagcgccggccaacaagtggcctgcaccccgaggactttattaagaaggctgacttggccgttcagaagacacctgagatgatcaatcagggtacaaatcagactgagcagaatggccaggttatgaacatcacaaattcaggccatgagaataagaccaagggcgacagcatccagaatgagaaaaatcccaatcccatagaatctctggaaaaggaaagcgcgtttaagactaaggcagagccaatttcgtcctccatctccaatatggagcttgagttgaatatccacaactcgaaggcccctaaaaagaacaggctccgcagaaagtctagcacccggcacattcatgctcttgaattggtggtctcacgcaatcttagtccccctaattgtacagaacttcagatcgactcgtgcagttcctctgaagaaattaagaagaagaagtacaaccaaatgccagtgcgccactcacggaaccttcagctgatggagggaaaagaacccgctaccggagcgaaaaagagcaataagccaaatgaacaaacttccaagcgtcacgacagtgataccttccctgagctgaaactgacaaatgcaccgggaagcttcaccaagtgtagtaacaccagtgaactgaaagagttcgtaaacccatctctccctagagaggagaaggaggaaaaactggagacagtcaaagtgtccaacaatgctgaggacccgaaggatctgatgctcagcggcgaaagagtgctacagactgagcggtctgtcgagtcttcctctatctctctggtgcccgggacagattacggaacgcaggaatccatttccctgttggaagtgtcaactctgggcaaagcgaagaccgagcccaacaaatgcgtatcccagtgtgccgcttttgagaaccccaaaggcctcattcatggctgttctaaggataatcgtaatgacacggaaggcttcaagtatccattggggcacgaggtaaatcactcccgagaaacgagtattgagatggaggaatcggaacttgatgcccagtacctccagaatacattcaaagtatcaaagcggcagtcgttcgcccccttctccaatccaggtaacgcggaagaggagtgcgctaccttctccgcgcacagcggctcattaaagaagcaatcgcccaaagttacctttgaatgtgagcaaaaagaagaaaatcagggtaagaacgagagcaatattaaaccagtgcagactgtgaatattaccgcggggttccccgttgtagggcagaaggacaagccagttgataacgccaaatgttcaattaagggaggcagcaggttttgcctgtcctcccagttcagagggaatgagacagggctgataacccccaacaagcatggtctcctgcaaaacccataccggatcccacccctgtttcctatcaagtcatttgtaaagacaaagtgcaagaaaaacctacttgaggagaactttgaagagcacagcatgtcaccagaaagggaaatggggaacgagaatatcccgtctactgtgagcaccatctctagaaataacatcagggagaacgtttttaaggaagcctccagttccaacatcaacgaggtcggaagtagcactaatgaggtgggaagctcaatcaatgagataggttcatctgacgaaaacatccaagcagagctcgggcggaaccggggccccaagcttaacgccatgttgaggctcggtgttctccagcccgaggtttacaaacaaagtcttccagggagcaattgtaagcaccctgagatcaaaaaacaggagtatgaggaggtcgtccagactgtgaataccgacttctctccatatctgatctccgataacctggagcagcctatgggctcatctcatgcaagccaggtttgctcggaaacccccgatgatctcctggacgacggtgagatcaaggaagatacgtcttttgcagagaacgatatcaaggaaagcagtgccgtctttagcaagtcagtacagaagggggaactgagtaggtcaccgagtcctttcacacacacccatcttgcacaagggtataggcggggagccaagaaactagaaagctcagaggagaaccttagttcagaagacgaagagctgccatgcttccagcatctgctgtttgggaaggtgaacaacattccatctcagtctactagacacagcacagtggccacggagtgtctttccaaaaacactgaagaaaatttgctgtcactgaaaaattcgctaaatgattgttcaaaccaggtcattctagccaaggcttcgcaggagcaccatctgagtgaggagaccaaatgttccgcctcactattctcctctcagtgtagcgaacttgaagacctgaccgccaacaccaacacgcaggatccgttcttgattggctcatctaagcagatgcggcatcagtccgaaagtcaaggagtcgggctctccgacaaagagctggttagcgatgatgaagagagggggactggcctcgaagaaaacaaccaggaggagcagtcaatggactccaacctgggcgaggccgcctccggatgtgagtcagagacatcggttagcgaagattgctccgggctgagctcccagagcgatatcctcacgactcaacaacgggataccatgcaacataatcttatcaaattacagcaggagatggcagaactggaagcagtgctcgagcagcacggtagccagccgtcaaactcctacccttctatcatatccgattcctccgcgctcgaggatctgcgcaaccccgagcaatccaccagcgaaaaggccgtccttacttctcaaaagtcatctgagtatccgatatctcagaatcccgagggcttgtctgctgataagttcgaagtatcggcggatagctctacttcgaaaaacaaggagccgggggtagaaaggtcatccccaagcaaatgtccctcattggacgatcgttggtacatgcattcttgctccgggtctcttcagaaccggaactatccttcccaggaagaattgattaaggtggtcgatgtcgaagagcagcaacttgaggaatcgggcccgcacgacctgacagagaccagctatctaccaagacaggacttggagggtaccccctacctagagtccggaattagcctattctctgacgatccggagagcgatccctctgaggaccgggcacctgagagcgctcgggtggggaatatcccctcatcaacctccgccctgaaagtgcctcagcttaaagttgctgagagtgctcaatctccggccgcagcacacactaccgatactgcaggttataacgcaatggaggagtcagtgtcccgggagaaacccgaactgacggccagcaccgagcgcgtcaacaagcgaatgtctatggtcgtgtctggactgactccagaagaatttatgcttgtatacaagttcgcccgaaagcatcatataactcttacaaatctcattacagaagagaccactcatgttgtgatgaaaactgatgcagaattcgtgtgcgaaagaacactcaaatactttttgggaattgcggggggaaagtgggtcgtgtcttatttttgggtaacacagagcattaaggaaaggaaaatgttaaacgagcatgattttgaggtgagaggagacgtcgtcaacggccggaaccaccagggccccaagcgcgcaagagagagccaggacagaaagatttttcgcgggctagaaatatgctgctacgggccatttaccaatatgccaactgaccagttggagtggatggtccagctctgtggggcctcagtagtgaaagaactgtcttcctttactctggggaccggtgtgcacccgatcgtcgttgtacagccagacgcttggactgaggacaacgggttccacgccatcggacaaatgtgcgaggcaccagtggtcactagggagtgggtgctcgactcggtggcgctgtatcaatgtcaagaattggatacgtacctaattccgcaaattccacactcccactactag

SEQ ID NO: 23085 - DNA, 2139 bp, synthetic construct
  misc_feature 1..2139: note = Description of Artificial Sequence: Synthetic coding sequence
  source 1..2139: mol_type = other DNA
atgctgaagctgctgaaccagaagaagggccccagccagtgccccctatgcaagaatgatataacgaagcgctccctgcaggaatccacgcgatttagccaactcgtggaggagctcctaaagatcatttgtgccttccaactcgacacaggcctggagtatgctaattcctataactttgctaaaaaggaaaacaattctccagaacatctcaaggacgaggtctccataatacagagtatgggttataggaatagagcaaagaggctactccagtccgaaccagagaatccatctctccaagagaccagtctgagtgtgcaattaagcaatttgggcactgtgaggacactcaggaccaagcagaggatccagccccagaagacatctgtttacatagagcttggatcagattccagcgaggacaccgttaataaagctacttactgtagtgtcggggatcaagaactgcttcagattaccccacagggaacaagagatgagatctccctggatagcgccaaaaaagccgcatgtgaattctccgaaaccgatgtaacgaacactgaacaccaccaaccatccaataacgacctgaacacaactgagaagcgggctgctgagaggcacccggaaaagtatcagggcgaagctgcgtctggatgcgagtctgagacctctgtgagcgaagattgcagcggtcttagctctcagagcgacatactcactacacagcagcgggacacaatgcaacataacctaatcaagctccaacaggagatggccgagcttgaagctgtgctcgaacagcacggatctcagccttccaactcataccctagcatcattagcgattcatccgctcttgaggatctccgaaatccagagcagtcaacttcagagaaggttttgacatctcaaaagagtagcgagtaccctatttcgcaaaatccagagggcctgtccgccgacaagtttgaggtgagcgctgactcaagtacgtcgaaaaacaaggagcccggagttgaacggagctcgccatctaagtgcccctcgctggacgatcgctggtacatgcacagctgttctggaagcctgcagaacagaaactatccttctcaggaggagttaatcaaggtggtggacgtagaggagcagcagctggaagagtccgggccacatgatctgaccgaaacctcctatttgccacgtcaagatctggagggcacgccgtaccttgaaagtggtatcagcctcttcagtgatgatccagaatctgacccttcagaggaccgagctcccgaaagcgctcgtgtgggtaacatccctagctcaacctctgcactcaaggtgccacagctgaaagtggctgaatcagcacagtccccagccgcagcccacacaaccgacacagccggttacaatgcaatggaggaaagcgttagcagagaaaagcccgagctgaccgccagcaccgagagagtgaataagcggatgtcaatggttgtgagtggtttgacaccagaggagtttatgctggtctacaagttcgcgaggaagcatcacatcactctcacaaatctgattaccgaggagaccacccacgtggtcatgaagactgacgccgaattcgtgtgtgagaggaccctgaagtactttctgggaatcgcaggcggtaagtgggtcgtttcctacttctgggtgactcaatctatcaaagaaagaaagatgctcaacgagcacgatttcgaggtccgcggcgacgtggtgaatggtcggaaccatcagggcccgaaacgggccagggagtctcaagatagaaagatcttccggggcctggagatctgttgttacggaccctttacaaacatgcccactgatcaactcgagtggatggtgcagctttgcggcgctagcgtcgtgaaggagctgtcatctttcaccttaggcacaggcgtgcatcccattgttgtcgttcagcccgacgcatggacagaagacaacggcttccatgcgataggacaaatgtgcgaggcaccggtggtgacccgtgaatgggtcttggattctgtggctctctaccagtgtcaggaattggatacatatctgatccctcagattcctcattctcattattag

SEQ ID NO: 23086 - DNA, 5655 bp, synthetic construct
  misc_feature 1..5655: note = Description of Artificial Sequence: Synthetic coding sequence
  source 1..5655: mol_type = other DNA
atggacctgagcgccctgcgggtggaggaggtgcagaacgtgatcaatgctatgcagaaaattctcgaatgccccatctgtctggaactgattaaggagcctgttagtactaaatgtgaccatattttctgcaaattttgcatgttaaagcttctgaaccagaaaaaagggccttcacagtgtcctctatgtaaaaacgacatcaccaaacggagccttcaagagtctacacgtttttcccagcttgtcgaagagctgcttaagattatatgcgcttttcagctggacactggcctagaatatgcaaactcctataattttgccaaaaaggagaataactcaccagaacacctgaaggatgaagtgagtattattcagtcaatgggatataggaacagggccaagagattgttgcagagtgaacccgaaaacccgtctttgcaggagacttccctgtcagtgcaactctcgaatctgggtaccgtcagaactctgcgcaccaaacagagaatccagcctcagaagacctcagtttacattgagttgggatccgacagctccgaggataccgttaacaaagccacgtactgctcagttggggatcaggaattgttgcagattacaccacagggaacgcgggatgaaattagtttagattccgcaaagaaggctgcatgcgagttttcagaaacagacgtgaccaacaccgagcatcaccaaccctctaacaatgatctgaatactactgaaaagcgtgctgccgagagacacccagagaagtatcagggatctagcgtgagtaatctccacgtcgagccgtgcggaacaaatacgcatgctagctcccttcagcatgagaattccagcttgctactgactaaagaccgcatgaatgtggaaaaggccgagttttgcaacaagtctaagcaaccagggctcgcccgctctcagcacaatcgatgggccgggagcaaagagacatgcaatgatcggaggaccccctccactgagaagaaggtggaccttaacgcagatcccctgtgtgaacgcaaagaatggaacaaacagaagctaccctgttctgaaaatccaagggatacggaagatgtaccctggattactctgaacagtagcattcaaaaagtgaacgaatggttttcccgatccgatgagcttttgggaagcgacgattcccatgatggggagtccgaaagtaacgcgaaagtggccgatgtcctggacgtccttaatgaagtggatgaatacagcggcagctctgaaaaaatcgatcttctagctagtgatccgcacgaagccctcatctgcaagagcgagcgggtccactctaaatctgtcgaaagcaacatagaggacaagattttcggcaagacatatcgcaagaaggctagtcttccaaacttgtctcatgtcacggaaaacctgattatcggcgccttcgtgaccgagcctcagataatccaggagaggccccttacgaacaagctcaaaagaaagagacgccccaccagcggacttcaccctgaagatttcattaaaaaagctgacctcgcggtgcagaagactcctgaaatgataaatcaagggacgaatcagaccgagcagaatggacaggtcatgaacataactaattctggccatgagaacaagaccaagggagatagcatccaaaacgagaagaatccgaatcctattgagtcgctagaaaaggagagcgcctttaagaccaaggcggaacctattagcagctctatctctaatatggagctggaactgaatatacataactccaaggcacctaagaagaacagactccgacgaaagtcaagtacccgccacatacacgccctcgagttagtcgtgtccaggaaccttagccctcccaattgtaccgagctccaaatcgactcatgctcttccagcgaggagatcaagaagaagaagtataaccagatgcctgtccgtcatagtcgcaatctccagttgatggaggggaaagagccagctaccggcgctaagaaatccaacaagcccaacgaacagacctccaaacggcatgatagtgacacattcccagagttaaagctgacgaacgctcccggatcctttaccaaatgcagcaataccagcgagctgaaggaattcgttaacccctccctgccaagggaggagaaggaggagaagctggaaaccgtgaaggtgtcaaacaatgccgaggatcccaaagacctgatgctgtccggggaacgggtattgcagacagagcggtcagtcgagagctcttcaatatcactcgttccaggtactgattatggtacccaggaaagtataagcctgcttgaggtttccaccctggggaaggcaaaaactgagcccaataaatgtgtttcgcagtgtgctgcattcgagaaccccaaaggtctgatacatggctgctcgaaggataatcggaatgatactgaggggttcaagtaccccctggggcatgaggtgaatcacagtagagaaacaagtatcgagatggaggagtcagagctcgatgcacagtacctccagaacacattcaaggtgtccaagcggcagtcattcgctcctttctctaaccccggtaacgctgaggaagagtgcgccacattctcagctcattctggctccctcaagaaacagtctccaaaagtgaccttcgaatgtgaacagaaggaggagaaccaagggaagaacgagtccaacatcaagcctgtacaaactgtgaatattactgctggcttccccgtggttggccagaaggataaacccgtggataacgcgaagtgtagcatcaagggggggagcagattctgcttgagctcacaattccggggcaacgagactgggctgattaccccaaataaacacggtctcctgcagaacccatatcggatcccccctctgttccctattaagtcatttgttaagaccaagtgtaagaaaaacctcttggaagagaacttcgaagaacactccatgagtcccgagagagagatggggaatgaaaacattcccagtaccgtttccacgattagtcgcaataatatcagagagaatgtattcaaggaggcatcctctagcaatataaatgaggtcggctctagcacaaacgaggtcggatctagtataaatgagatcgggagttctgacgagaacatacaggctgagttgggaaggaacaggggacctaagctgaacgccatgttgcggttgggggtcctgcaacccgaggtctacaaacagagtctgcctggctcgaactgcaagcatccagagattaagaagcaggaatatgaagaggtagtccagacagtgaacaccgatttcagcccttacctgatctctgataacttagagcaacccatggggagtagccatgcttcacaagtatgctccgagacaccagatgacctgctggacgacggtgagatcaaggaggacaccagttttgcggagaacgacattaaggaatcaagtgccgtcttttcgaagtcagtgcaaaaaggtgaactgagcaggagtcctagccccttcactcatactcatcttgcacaaggttatcggcgtggagccaagaagctggaatctagcgaagagaacttatcaagtgaggacgaggagcttccatgcttccaacacttattattcggaaaggtgaacaatatcccatctcaaagcacccgccactccactgtggcaaccgagtgcctctcgaaaaacaccgaggagaacctcttaagcctcaagaattctttgaatgactgctccaatcaggtgatcctcgcgaaagccagccaggaacaccacctctccgaggagacaaagtgcagtgcaagtctgttctcctcacagtgcagcgagttggaggacttaacagccaatacgaacactcaggacccattcttaatcggatcaagcaagcaaatgcggcatcagagcgagtctcagggggtagggctgtctgataaggaactcgtgagtgacgacgaggaacgaggtaccggactggaggagaataatcaggaagagcagtcgatggatagcaacctgggtgaggccgcctccgggtgtgaatcagagacctctgtgtccgaagattgttcaggcctgtcctctcagtcagatattttaacaacccaacagagggacaccatgcagcacaacttgatcaagttacagcaggagatggccgaactcgaggccgttttggagcaacatgggagccagcctagtaattcgtaccccagcattatttcagatagctcggcactggaggatctgaggaacccagaacagagcacctcagagaaggactcccatatccatggtcagagaaacaactctatgttttcaaaaagacccagagagcacatcagcgtccttacgtctcaaaagtcaagcgaatatcctatatcacagaaccccgaaggcttatcagcagataagtttgaagtttctgcggactctagcacatctaagaacaaggagcccggggtggaacggagtagcccttccaagtgccccagtctggacgatcgatggtatatgcatagctgtagcggctcgctacagaataggaattatccctcgcaggaagaactgattaaagtcgttgatgtcgaggagcagcagctggaagaaagcggaccacacgacctcaccgagacaagctacctgccgcggcaggacctcgaggggaccccctatcttgagagtggaatcagtctctttagtgatgatcctgaaagcgacccgagcgaggatcgggcaccagaatcagctcgcgtcggcaatatcccctcatcaacaagtgccctgaaggtcccccaattgaaagtggccgagagcgctcagagccccgctgcagcacacactaccgacacagctggctataacgctatggaagagtccgtgtctagagagaagcctgagctgactgcctccaccgaaagggtgaacaagcgaatgtcaatggtggtgagcggattgacaccggaggagtttatgctggtgtacaaatttgcacggaagcaccacatcaccctgaccaacctgattactgaagagacgacccacgttgtcatgaagaccgacgccgagtttgtctgtgaacggacactgaagtactttttagggatagctgggggcaagtgggtggtgtcttatttctgggtgacccagagcatcaaagaaagaaagatgttgaacgagcatgactttgaggtgaggggtgacgtcgtgaacggaaggaaccaccaaggacccaagcgggccagggagagtcaggaccggaagatatttcgagggctcgagatctgctgctacggaccatttaccaacatgcctaccgaccagctcgagtggatggttcagctgtgcggggcctcggtcgttaaggagctcagttcgttcaccttgggcactggggtgcaccctatcgtggtggtgcagcccgacgcgtggactgaggataacggattccacgcaatcggccagatgtgtgaagcccctgtagtaactcgtgaatgggtactcgatagtgtggccctctatcagtgtcaagaacttgacacctacctgattccgcagatcccacatagccactattag

SEQ ID NO: 23087 - DNA, 192 bp, synthetic construct
  misc_feature 1..192: note = Description of Artificial Sequence: Synthetic coding sequence
  source 1..192: mol_type = other DNA
atggacctgagcgccctgcgggtggaggaggtgcagaacgtgatcaacgctatgcagaaaatcttggaatgcccaatctgtctggaattaatcaaagaacctgtgagtacaaagtgcgaccacatcttttgtaagttctgcatgctgaagctacttaaccagaaaaaaggcccctctcagtgtccactctag

SEQ ID NO: 23088 - DNA, 192 bp, synthetic construct
  misc_feature 1..192: note = Description of Artificial Sequence: Synthetic coding sequence
  source 1..192: mol_type = other DNA
atggacctgagcgccctgcgggtggaggaggtgcagaacgtgatcaatgccatgcaaaagattctcgagtgtccaatctgtctggaactgattaaggaaccagtaagcacaaagtgcgaccacatcttttgtaaattctgtatgctgaaactgttaaaccagaagaagggtccatcacagtgtcctctgtag

SEQ ID NO: 23089 - DNA, 2100 bp, synthetic construct
  misc_feature 1..2100: note = Description of Artificial Sequence: Synthetic coding sequence
  source 1..2100: mol_type = other DNA
atggacctgagcgccctgcgggtggaggaggtgcagaacgtgatcaacgcaatgcagaaaatcctggaatgcccaatttgtctggagctcataaaggagccagtgtcgactaagtgcgatcatattttctgcaaattttgtatgctcaagctgctgaaccagaagaagggcccttcacaatgcccgctctgtaaaaatgatatcacaaaacgtagcctacaggagagtacacgcttttcacaattggtggaagaactcttgaaaatcatctgcgccttccagctcgatactggcttagaatatgctaactcctacaactttgctaagaaagagaataattccccagaacacctgaaagacgaggtcagcattatccaaagtatggggtatcgcaatagggctaaaagactgttacagtcagaacctgagaatccttcactacaggagacttcgctgtcagtgcagttgtcgaatttggggactgtgaggaccctccgaaccaaacaacgcatccagccacagaagacttcagtgtacattgagctggggtcagatagctccgaagacacagttaataaggccacctattgttcagttggggatcaggagctcctgcaaatcacccctcagggcacaagggacgagatatcactcgacagcgccaagaaggccgcttgcgagttttcagagacagacgttacaaataccgaacaccaccagcctagcaacaacgacctcaacacaactgagaaacgagctgccgaacgccacccagaaaagtatcagggtgaagccgccagcggctgtgagtcagagacaagcgtctcagaggattgctccggcctgtccagtcaaagtgacatactcaccacacagcaaagggacaccatgcaacataatctcatcaagttacagcaagagatggctgaactggaggcggtattggaacagcatggcagccagccttctaatagttatccatctattatttctgattcatctgcactggaagatctgaggaatccggagcaatcaacgagtgaaaaggttctgacctcacagaagagctccgagtacccgatctctcagaaccccgaaggcttatcggccgacaaattcgaggtgagtgccgattctagcacctccaaaaataaggagccaggggtggagcggagcagtccaagcaagtgcccttctctcgatgatcgctggtatatgcactcgtgtagtggttcactgcagaaccgaaattatcccagccaagaggagctgatcaaagtggtcgatgtggaagaacagcagctggaagagtctggaccacatgacctgactgagacaagttacctgccacggcaggatttggaaggaaccccctacctcgagtccggaatcagcctgttttccgacgaccctgaatctgatcctagcgaagatagggcgccagagtcagcccgggtcggcaacattccctccagcacctcagccctgaaggttccccagcttaaagttgctgagtctgcccagagccccgccgctgcacacactacggatactgccgggtacaatgccatggaagagtccgtttccagagagaagccagagctaacagcgtctactgaaagggtgaacaagcgtatgagtatggtagtgtcaggcctgacacctgaagagtttatgctcgtgtataaatttgcacggaagcatcatataaccctgacaaatttgatcactgaagagaccacccacgtcgtgatgaaaacagatgctgaatttgtgtgcgagcggaccctcaagtacttcctgggcattgccggcgggaagtgggtcgtgagttatttttgggtgactcagtctataaaggagcgaaagatgctcaatgagcacgacttcgaggtacgcggagacgtggtgaatgggcggaatcatcagggtcccaagcgtgctagagaaagtcaggatcggaagatatttcggggcctggaaatctgttgttatgggccgttcaccaacatgcccaccggatgcccgccaaattgtggatgtgccgcgcgctgtctggatcggggacagtggttgccctgtaactgggctgacgtgtag

SEQ ID NO: 23090 - DNA, 1950 bp, synthetic construct
  misc_feature 1..1950: note = Description of Artificial Sequence: Synthetic coding sequence
  source 1..1950: mol_type = other DNA
atggacctgagcgccctgcgggtggaggaggtgcagaacgtgatcaacgcaatgcagaagattctcgagtgcccaatttgcctcgagctgattaaggaacctgtgagcacgaagtgcgatcacatcttctgcaagttctgcatgctgaaactgctgaatcagaagaaagggccaagccaatgtcccctttgtaaaaacgatataactaagcggagtctccaggagagcacaaggtttagtcagctggttgaggagctgttgaagatcatttgtgccttccaattagacaccggtcttgagtacgccaacagctacaatttcgccaagaaggaaaacaattcacccgaacacctgaaagacgaggtttccatcatccagtccatgggataccgaaatcgcgcaaaacggctgttacaatcagaacccgagaatcctagcctgcaagagacatccttgagtgttcagctgtccaacctcggaaccgtgagaaccctacggaccaaacaacggatacagccacagaaaacgtccgtttacatcgaactcgggagcgacagctccgaggatacagtcaacaaagccacttactgtagcgtgggcgaccaggagttgctacagattactcctcagggaactagagatgaaatcagtctggattccgcaaagaaagccgcctgtgaattttcggagacagatgttaccaataccgagcatcaccagccctccaacaacgacctaaacactaccgaaaagagagctgccgagcgccaccccgagaaataccaaggctccagtgtttctaatttgcatgtagagccctgtggcacaaacacccatgcctccagtctccagcatgaaaattccagcttattgctcaccaaagatcgaatgaatgtggagaaagcggagttctgcaacaagtccaagcaacctggattggccagatctcagcacaaccgctgggctggatcaaaggaaacctgcaacgacagaaggacccctagcacggaaaaaaaagtggacctcaacgcggatcctctgtgcgaacggaaggagtggaacaaacagaaactcccttgtagcgaaaacccgcgggacaccgaggacgtcccatggataacccttaatagctcaattcagaaagtgaatgaatggttctctcgatcagacgaactcctgggttcagacgatagccacgacggcgaatccgagtcgaatgcgaaggtggccgacgtgctagacgttttaaatgaggtagatgagtacagcggtagctcagagaaaatagacctcctcgccagtgatcctcatgaagccctgatatgcaagagtgagcgagtgcatagtaaatctgtggagtctaatatagaggataaaatcttcggaaagacctaccgtaaaaaggctagtctccctaatctctctcatgttacggaaaatctcatcatcggtgcttttgtcacagagccacagattatacaggaacgaccgctgacgaacaagcttaagagaaagcgcaggcccacctccggcctgcaccctgaagattttatcaagaaggccgatcttgccgttcagaaaacacccgagatgatcaaccaaggaactaaccaaacggaacagaacggtcaagtcatgaatataactaactcaggtcacgaaaacaagaccaaaggcgattctatccaaaacgaaaagaaccccaatcccatcgagtccctcgaaaaagagtccgccttcaaaacaaaagccgagcctatctcaagcagcatatcaaatatggaactcgagctgaatatccacaattccaaagcacctaagaagaacagattgagacggaaatcctccacacggcacatccatgctctcgaacttgttgtgagccgtaatctctcaccaccgaactgcacagagttgcagatcgactcttgtagctcttccgaggagtag

SEQ ID NO: 23091 - DNA, 5658 bp, synthetic construct
  misc_feature 1..5658: note = Description of Artificial Sequence: Synthetic coding sequence
  source 1..5658: mol_type = other DNA
atggacctgagcgccctgcgggtggaggaggtgcagaacgtgatcaacgcgatgcagaagattctcgaatgtcctatttgcctcgaactcattaaagaacccgtgtcgactaagtgtgaccatattttctgtaaattctgtatgctgaaactactgaaccagaagaagggacccagccagtgccctctctgcaaaaacgacataacgaagaggtccctgcaagagtcgaccaggttttctcagctggtagaagagctgctaaagatcatatgcgccttccagctcgataccggccttgagtatgccaactcctacaacttcgccaaaaaggaaaataacagccccgagcatctgaaagatgaggtgtctatcattcagtctatgggctacaggaacagagcgaagcgtttacttcaaagcgagcccgagaacccgtcactacaagaaacctctttgtccgtgcaactctctaatctgggtacagttcggaccctgcgcactaagcaaagaattcagcctcagaagacaagcgtgtatatagaattgggatctgacagtagcgaggacacagtgaacaaagctacatactgcagcgtcggggatcaggagcttctgcaaataactcctcagggaacacgagatgagatttccttagactcggctaagaaggctgcctgtgagtttagtgaaaccgacgtcactaataccgagcaccaccagccaagcaataatgatcttaacaccactgagaagcgtgctgccgagcggcacccagagaaatatcaggggagctcagtcagcaacctccacgtagagccctgtggtacaaacacccacgcctcatctttgcagcatgaaaatagtagcttgctcctgaccaaggataggatgaatgtggaaaaggccgagttctgtaacaagtctaagcagccagggctggccagaagccagcacaaccggtgggccggcagtaaggagacgtgtaatgaccgcaggacacccagtaccgaaaaaaaggtggatctgaacgccgacccactgtgcgagcgcaaggagtggaacaagcagaagctgccctgctcagaaaatcccagagatactgaagacgttccctggatcactttaaactcttctatacagaaagttaatgagtggttcagcagaagcgatgagcttttaggaagcgatgactcccatgacggagagagcgagtctaacgctaaggtcgccgacgtcctggatgtgctaaacgaggttgatgagtattctggaagcagcgagaagattgatttgctggcctcagatccgcacgaagccctgatctgtaagtcggaacgggtgcacagtaagtccgtagagtccaacatcgaggataaaatttttggtaagacgtaccgtaagaaggctagcttgccgaacctctctcacgtgacagagaatttaataattggggcttttgtgaccgagccccagatcattcaggaacgcccactcactaacaaattaaagcgtaaaaggagacctacgagcggtctacaccctgaggactttatcaagaaagcagatctagctgtacaaaaaacccctgaaatgataaatcaggggactaaccagacagagcagaatgggcaagtaatgaacataacaaacagcggccacgagaataagaccaagggggacagcattcagaatgagaagaacccaaatcctattgagtcgctcgagaaagagtccgctttcaaaacaaaggcagagccaatatcatctagtattagcaatatggagctggagctcaatattcataactcaaaggctcccaagaagaaccggctgaggagaaagtcttcaactagacatatccacgcactggagttggttgtgtcacgcaacttgtccccccccaattgcaccgagctgcaaatcgactcttgttcaagcagcgaagagatcaaaaagaaaaaatacaaccagatgcccgttcgccatagccgcaacctgcagttgatggagggaaaagagccagccactggagcgaaaaaatccaataaacctaacgagcaaactagtaagcgtcacgatagtgacacgtttccagagctgaagctgaccaacgctccaggaagcttcacaaaatgcagtaacacttctgaactaaaagagttcgtgaacccctccctgccgagagaggagaaggaagaaaagctggagaccgtcaaggtctccaacaacgccgaggacccaaaggacctcatgctgtctggcgagcgtgtgctgcaaactgagcggtcagttgaatcttcgtcaatcagcctagtgccaggcactgactacggtactcaggaatcgatatccctgctggaagttagcacgctcggaaaggctaaaactgagccaaataaatgtgtctcccaatgtgcagcgtttgagaaccctaagggactgatacacggttgttctaaagacaacaggaatgacacagaaggatttaaatacccccttgggcacgaggtaaatcacagccgagaaacgtcaatagaaatggaggagagtgagctggacgctcagtacttgcagaataccttcaaagtctctaagagacagtcttttgcgccattctcaaatcccggtaacgcggaggaagagtgcgcaaccttcagtgcacattcaggctcgctgaagaaacaatcgccaaaggtgacatttgaatgtgaacagaaggaagagaaccaaggaaaaaacgaatccaatatcaagccggtgcagactgttaatattacagctggcttcccagttgttgggcagaaggacaagcctgtcgacaatgctaaatgtagtattaagggcggaagccggttctgtttatccagtcaatttagaggaaatgaaacgggactgatcacaccaaataagcacgggttgctacagaacccataccggatacccccactgtttcccatcaagtcatttgtgaagaccaagtgcaagaaaaacctactcgaagaaaattttgaggaacatagtatgagcccggagagggagatgggtaacgagaatatcccctcgacggtatccaccatttcacggaataatatcagagaaaacgtcttcaaggaggccagttcaagtaacattaacgaggttgggtctagtacgaacgaggttggctcctctatcaatgagatcgggtccagcgacgaaaacattcaggcagaattgggacgcaaccgtggtcccaagctgaatgcaatgctccgcctgggtgtcctacagcccgaggtgtataaacaatcgctccctggctccaactgtaagcacccggagatcaaaaaacaggagtacgaggaggtggtgcagacagtgaacacggatttctccccttacctgatatctgacaatctcgagcagcctatggggtcctctcatgcatcacaggtgtgttcagagaccccagacgatctgctcgacgacggtgaaattaaagaagatacatctttcgctgaaaatgatatcaaagagtctagtgctgtgtttagcaagagcgtacagaagggagaactctctcgatctcctagtccatttactcacactcacctggctcaggggtataggagaggggcgaaaaaactggaaagcagcgaagagaacctgtcttcggaggatgaagagttgccctgctttcagcatctgctgttcggaaaggtcaataatatcccctcgcagagcacaaggcactccacagtggccaccgagtgtttgagtaagaacacggaagagaatcttttgagtctgaaaaattctctaaatgactgcagcaatcaggtgatcttggccaaggctagccaggaacaccacctaagcgaagagacaaagtgcagcgcctccctcttcagtagtcagtgcagcgagctggaggacctaacagccaataccaacacacaagatccattcttgatagggagcagtaaacagatgaggcaccaatctgaatcacagggggtgggactgagtgataaggagctggtgagtgatgatgaggaacggggaactgggcttgaggagaataaccaggaggagcaatccatggactcgaatcttggagaagctgctagcggctgcgagtccgagaccagcgtgtccgaggactgtagtggattgtcatcccaaagcgatatcctcactacccagcagcgcgataccatgcagcacaatctgatcaagctccagcaggagatggctgagttagaggcggtcctagagcagcacggctcccagccaagtaactcatatccctctattatcagtgattcttccgcactagaagatctgagaaaccctgaacagtctacttccgagaaggacagtcatattcacggacaaagaaataactcgatgttctctaagaggccacgggaacacatctcggccgttctcacctctcagaagtcttctgagtacccaattagccagaatcccgaaggattaagtgccgacaagttcgaggtgagtgccgattcgagtacatctaaaaacaaggaacccggagtggaaagatccagtccttcgaagtgcccttctttagacgaccgatggtacatgcacagttgttctgggtccttgcagaatagaaattatccatcacaggaggagctcatcaaagtagttgatgttgaagagcagcaactagaggaatctggtccccacgatcttaccgaaaccagctatctgccgagacaggacctcgagggtactccatacttagagtctggcataagtctgttctccgatgatcccgagtcggatccatctgaagacagagcaccagagagcgcgcgcgtgggcaacatcccttcctcaacctcggctttgaaggtcccacagctcaaagttgccgaatctgcgcagagcccagctgcggctcacaccactgatacagccggttacaacgccatggaggagagtgtaagtcgtgaaaaaccagagctgacagcctccacggagagggttaacaagcgcatgtctatggttgtgtctggtctcacccctgaagagtttatgctggtgtacaaatttgcacgaaagcatcacattaccctcacaaacctgatcaccgaggagacaactcacgtggtaatgaagacagacgcagagtttgtatgcgagcgcactctgaagtattttttggggattgcgggtggcaaatgggttgtctcatacttctgggtgacacagtcaatcaaggagagaaagatgcttaatgagcatgacttcgaggtgagaggtgatgtcgtgaacggtcgcaatcaccagggacccaagcgagcaagggagagccaggacaggaaaatcttcagaggcctggaaatctgctgctatggaccattcaccaatatgccgactgaccagctagagtggatggtacagctatgcggtgcatctgtcgtgaaagagttgtcaagtttcacactggggaccggggttcatccaatagtggtggtgcagcccgatgcatggactgaagacaacggctttcatgctatcggacaaatgtgcgaggcccccgtggtcacacgcgaatgggtgctggatagtgtggccctctaccagtgccaggagctggacacatatttgattccccagatccctcactctcattactag

SEQ ID NO: 23092 - DNA, 669 bp, synthetic construct
  misc_feature 1..669: note = Description of Artificial Sequence: Synthetic coding sequence
  source 1..669: mol_type = other DNA
atggacctgagcgccctgcgggtggaggaggtgcagaacgtgatcaacgccatgcagaagatcttagagtgccctatctgcctagaactgatcaaggaacccgtgtccacaaaatgtgaccatatcttctgcaaattctgcatgctgaaactactgaaccagaagaaaggtcctagtcagtgtccactctgcaagaatgatatcacaaaaagatccctgcaagaaagcacccggttctcccagctggtggaagagcttttaaagattatatgcgccttccagctcgacactggtcttgaatacgccaattcatataatttcgccaagaaagaaaacaacagtccagagcatttgaaggatgaagtgagcatcatacagagcatgggttaccggaatcgggcaaagaggcttctgcagagcgaacccgaaaatccctccctcgagacaagcctgagcgtccagctctcaaacctgggaaccgttcgaaccctaagaaccaaacagcgcatccagcctcaaaaaacatctgtctatatcgagttgggctctgattctagtgaggacaccgttaacaaggccacatattgcagcgtgggggaccaagaactactgcagatcactccacaggggactcgggatgagatctctctcgattcagccaagaaatag

SEQ ID NO: 23093 - DNA, 1869 bp, synthetic construct
  misc_feature 1..1869: note = Description of Artificial Sequence: Synthetic coding sequence
  source 1..1869: mol_type = other DNA
atggacctgagcgccctgcgggtggaggaggtgcagaacgtgatcaacgctatgcaaaaaattctggaatgccccatttgtctggagctgatcaaagagccagtgagcaccaagtgtgaccacatcttctgcaaaagcctccaagaaagcaccagattcagccagctagtggaagaactgttgaaaatcatttgtgcctttcagctcgatactggtcttgagtacgctaactcatataatttcgctaagaaggaaaacaactcccccgaacacctgaaggacgaggtgtctatcatacaatcaatgggatacagaaaccgcgctaagcggttgctgcagtccgagcccgagaacccgagccttcaggagacctccctgagtgtgcagctgtccaatcttggcactgtacgtacgctgcggacaaagcagagaattcagccacaaaagacatctgtttacatcgaactgggttccgatagcagcgaggatacagttaataaagctacctattgcagcgtgggtgaccaggaattactccaaattaccccccaaggaactagagacgagatttcccttgactctgccaaaaaggccgcttgcgagttctccgagaccgacgtgacaaacactgagcaccaccagccttctaacaatgacctgaatacaaccgagaagagggcagccgaacgccacccggagaaataccaggggtcttccgtgagcaacctccatgtggaaccgtgtggaaccaacacgcatgctagctcgcttcagcatgagaatagctctctgctgttgacaaaggatcgtatgaatgttgaaaaggccgaattttgtaacaagagcaaacaaccaggcctggcacgttctcagcataaccgttgggcaggctcgaaagagacctgcaatgatcggcgcactccaagcactgaaaagaaagtggacctgaacgctgaccccttatgcgagcggaaggagtggaacaaacaaaaactaccatgttccgagaatcctagggacacggaagatgtgccatggataaccttgaattcttctatacagaaggtgaacgaatggttctctagatctgacgagctcttaggcagtgatgacagtcatgatggtgagagtgagagtaatgccaaggtcgccgacgtgcttgacgtgttgaatgaagtggatgagtacagcgggtcttccgagaaaattgacttactggcttcagatccgcacgaggcactcatctgcaagtccgagagggtgcactccaagagcgtagagagcaatatcgaagataagatttttggtaagacatacaggaaaaaagcctcgttgcccaatctatctcacgtgactgagaacctaattataggcgcctttgttacagagccacaaatcatacaagagcgtcccctgaccaataagctgaaacggaaacgccgacctaccagcgggctgcaccctgaggatttcattaagaaggccgacctggcagtgcagaaaacgcccgagatgattaaccagggaaccaatcagacagagcagaatggccaggtgatgaacatcacgaatagcggccacgagaataaaacgaagggtgactccatccagaacgaaaaaaaccccaacccaattgagtccctcgagaaggagtcagcattcaaaactaaggccgaacctatatcatcaagcatcagcaacatggagttagaattgaacattcataattccaaagcacccaaaaaaaaccgactcaggcgtaaatcatccacgagacacatccatgccctggaactcgttgtgtctcgtaacctgagtccgccaaactgcaccgaacttcagatagactcatgcagttcttcagaatag

SEQ ID NO: 23094 - DNA, 1872 bp, synthetic construct
  misc_feature 1..1872: note = Description of Artificial Sequence: Synthetic coding sequence
  source 1..1872: mol_type = other DNA
atggacctgagcgccctgcgggtggaggaggtgcagaacgtgatcaacgccatgcagaagatcttagagtgtcccatatgtctagaacttattaaagagccagtgtcaacgaaatgcgaccatatattctgtaaattttgcatgctgaaactactgaaccagaaaaaaggcccctcccagtgccctctgtgtaagaatgatatcaccaaacgttccctgcaggagagtacaagattctcccagctcgtcgaggaattattgaagatcatctgtgctttccaacttgacacgggcctcgagtacgcaaactcttataacttcgcaaagaaggagaataactcgcctgaacacctcaaggatgaggtgtctattatccagtctatgggctatcgcaatagggccaagaggctccttcagtccgagcccgagaatccttctctcgagactagcctttccgtccaactgtccaatctgggaaccgtgaggaccctacggactaagcagcggatccagccccagaagacctccgtgtatatcgaactgggaagcgattcctccgaggatactgtgaataaagcaacgtactgctccgttggcgatcaggaactgctccagataaccccgcagggaactagagatgaaatctcactggactctgccaaaaaggctgcatgtgagtttagtgaaacggacgtaaccaataccgagcaccaccagccaagcaacaatgacctgaacaccactgagaagcgggctgctgagcgtcaccctgagaagtaccagggagaggccgccagcggctgcgagtcagagacttctgtgtccgaagactgctccggactcagctctcagtctgacatcctcaccacacaacagcgcgacaccatgcagcacaatctaataaagctgcagcaggaaatggccgagctggaagcggttctggagcagcacggcagccaaccatcaaactcctacccaagtatcatcagtgattctagtgcgctcgaggacctgagaaacccagagcagtctacctctgaaaaggccgtgctgacttctcaaaagagctctgaataccccatttcccagaaccctgagggcctgtctgcggataagtttgaggtctctgcagactccagcacaagcaaaaacaaggaaccaggagtagaacgctcatcaccctcaaagtgcccctcactggacgatcgctggtacatgcactcatgcagcggatcccttcaaaacagaaactatccgagccaggaggagttgataaaagttgttgacgtggaagagcaacagctggaggagtctggtccccacgatctcactgagacatcatacctccctagacaggacttggagggcaccccatatttagaatccgggatctccctgttctccgatgatcctgaaagtgatcccagcgaggatcgcgcccctgaaagcgcgagagttgggaacatcccctcatccaccagcgcgctgaaggttccccagctcaaggtggcggagtcagctcagagccccgccgccgcacacacgaccgataccgcaggttataacgccatggaggaatctgtgtccagagagaagccagagctgactgcgagcactgagcgcgtgaacaaacgaatgtctatggtggtgtctgggcttactccagaggaattcatgttagtttataagttcgcgaggaagcaccatataacccttacaaacctgattacagaagaaactacccacgtggttatgaagaccgatgccgaatttgtttgtgaacgtacactcaagtacttcttgggaattgccggcggaaaatgggtcgtgagttacttttgggtcacccagagcatcaaggagagaaaatag

SEQ ID NO: 23095 - DNA, 1497 bp, synthetic construct
  misc_feature 1..1497: note = Description of Artificial Sequence: Synthetic coding sequence
  source 1..1497: mol_type = other DNA
gagctgctgaagatcatctgcgccttccagctggacaccggcctggagtatgcgaattcttacaatttcgccaagaaggagaacaatagtccagaacatcttaaagacgaagtctccattatccaatctatgggttaccggaaccgagccaaacgactgctgcagtccgagcccgaaaacccgtcgttggagacttctctgtctgtgcagctgtcgaacctggggaccgtgcggacattgagaacgaaacagcgtatccaaccccagaagacttctgtatatatcgagctggccgcttgcgagtttagcgaaacagacgtcaccaatacagagcatcatcagcccagcaacaatgacttgaatactactgaaaaacgcgccgctgagagacatcccgagaagtaccagggagaagccgcctccggctgcgaatccgagacttccgtttctgaagattgctctgggctatcctcacagtccgatatcctgacgacccagcagagagacacaatgcagcataatctgatcaagctacagcaggagatggctgagctggaagccgtactagagcagcacggaagtcagccctcaaatagctatccctcaatcatttctgattcgagcgctctcgaggacttgcgtaaccccgaacagtccacaagcgaaaaggcagtgcttaccagtcagaaaagttccgagtatccaatcagccagaacccagagggcttatcagcagacaagttcgaagttagtgcagatagcagtacgtccaaaaataaggagcccggagtcgagaggtcatcaccctccaaatgccctagcctggacgataggtggtacatgcactcctgttccggcagcctccagaatcgcaactacccaagtcaggaagaactcatcaaggtggttgacgtggaagagcaacagctggaagagtccggacctcacgatcttactgaaacctcttacctgcctcgccaggatttggaaggcacaccctacctggagtcagggatcagtctcttctcagatgatcctgagtccgatcctagtgaggacagggccccggagtcagcgagggttggcaacatcccctctagcaccagcgcgctcaaggttccccagctgaaggtcgccgagtcggctcaaagcccagccgccgcgcacaccaccgacacggccggatataacgccatggaggagtcggtgtccagggagaaaccagaactgaccgcaagcacagagcgagtgaacaagcgcatgagtatggtggtgagcggcttgacccctgaggaattcatgttggtttacaaattcgccaggaaacaccacattactcttacaaacctcattacagaggagacaacccacgtggtgatgaagacagacgctgagttcgtgtgtgaaaggacactgaaatactttttgggcatcgccggaggcaagtgggttgttagctatttctgggtcactcagtcaatcaaagaaagaaagtag

SEQ ID NO: 23096 - DNA, 297 bp, synthetic construct
  misc_feature 1..297: note = Description of Artificial Sequence: Synthetic coding sequence
  source 1..297: mol_type = other DNA
atggacctgagcgccctgcgggtggaggaggtgcagaacgtgatcaacgcgatgcagaagattctcgagtgcccaatttgcctggagcttattaaggagcccgtgtctactaagtgcgaccacatcttctgtaagtccctccaggaatcaaccagattttcccagctggttgaggagctcctgaagattatttgcgcttttcagttggatactggactcgagtacgctaacagctacaacttcgccaagaaggagaacaactccccagaacatctgaaggacgaagtaagcatttag

SEQ ID NO: 23097 - DNA, 2280 bp, synthetic construct
  misc_feature 1..2280: note = Description of Artificial Sequence: Synthetic coding sequence
  source 1..2280: mol_type = other DNA
atggacctgagcgccctgcgggtggaggaggtgcagaacgtgatcaatgccatgcagaaaatattagagtgtcccatatgtctagaattgataaaagaaccagtctctactaaatgcgaccacatcttttgcaagttctgcatgctgaagctccttaatcaaaaaaaagggcctagtcaatgcccgctgtgtaagaatgacattactaagaggagccttcaggagagtacgcggttcagccagctggttgaggagctgcttaagatcatctgtgctttccagctggatactggactagagtacgccaattcctacaactttgcgaaaaaggagaataacagtcctgagcacctaaaggatgaagtttctatcatccagtccatgggctaccggaatcgagcgaagcgcctgctgcaaagtgagcccgaaaatccctccctccaggagactagccttagcgtccagctgagcaatctggggactgtgcggacactccgcactaaacagagaatccagccacagaagacctctgtctatatcgaactcggatcagatagtagcgaagataccgtgaataaagctacatactgctcagtcggagaccaggaattactgcagataacaccccaaggaacccgtgacgaaatttccctggactctgccaaaaaagccgcatgtgagttcagcgagacagacgtcactaatacagaacatcaccagccgtctaataacgacttgaataccacagaaaagagagcggcagaacgacaccccgagaaataccagggggaagcggccagcgggtgcgaatcggagaccagtgtctccgaagactgtagcgggctgtccagccagtcggacatcctcacaacacaacagagagatactatgcagcacaacctcattaagttgcaacaggaaatggccgagctggaagccgtgcttgagcagcacgggagccagccttctaacagttatccatccataatcagcgactcctctgcactcgaggatttgcggaatccagagcaaagcacttcagaaaaggtgttgacttctcagaaaagctctgaatacccaatctcccagaaccccgagggcctgtcagccgacaagtttgaagtttctgctgactcttcaaccagcaaaaacaaggagccaggagtggaacgctcctctccaagcaagtgcccctcgctggacgatcggtggtatatgcactcatgttccggtagcttacagaacagaaactaccccagccaggaggagttaatcaaagtagtagacgttgaagagcagcagctggaagagtctgggccacatgaccttaccgagacatcatatctgcccaggcaggatctggagggtactccttatctggagtctggaatttccctgttctccgacgaccctgaaagtgaccctagtgaagaccgcgctcctgagtccgcccgcgtggggaatataccaagctcaacaagtgcgctaaaagtccctcaattaaaggtggctgaaagcgcacagtctcccgccgcagcccatacaacagacactgccggctacaacgcaatggaggaaagcgtgtctcgagaaaaaccagagctaaccgcctccacagagcgcgttaataagagaatgtccatggttgtcagcggcctgaccccggaggaatttatgcttgtgtataaattcgctcgaaagcatcacatcacgcttacaaacctgataacagaagaaaccacccatgtggttatgaaaactgatgcggagtttgtgtgtgagcgtacgctaaagtacttcctggggatcgcgggaggcaaatgggtggtgtcatacttttgggttacacagagtattaaggagcgtaaaatgctgaatgagcacgattttgaggtgaggggcgatgtggtgaacggccgtaaccaccaagggcctaagagggcaagggagtcacaggaccgaaaaatatttagaggattagaaatttgctgttacggcccatttacgaatatgccaaccgatcaactggaatggatggttcaactctgtggagcttccgttgtaaaggagctcagcagtttcacattgggaacaggagtacatcctatcgttgttgtccaaccggatgcgtggactgaagacaatggattccatgcaattgggcagatgtgcgaggcaccggtggttaccagggaatgggttcttgattcggtggccctataccagtgtcaagagctggacacttatctgatcccccagatccctcattcccattactag

SEQ ID NO: 23098 - DNA, 180 bp, synthetic construct
  misc_feature 1..180: note = Description of Artificial Sequence: Synthetic coding sequence
  source 1..180: mol_type = other DNA
atggacctgagcgccctgcgggtggaggaggtgcagaacgtgatcaatgcaatgcaaaaaatcctggagtgtccaatctgccttgaactcataaaagagcctgtatcaacgaagtgcgaccacatcttttgtaaggtccttctgtgttgcccttcctggagcactgttgtccgatcatag

SEQ ID NO: 23099 - DNA, 5451 bp, synthetic construct
  misc_feature 1..5451: note = Description of Artificial Sequence: Synthetic coding sequence
  source 1..5451: mol_type = other DNA
atgctgaagctgctgaaccagaagaagggccccagccagtgccccctctgtaaaaatgatatcactaaaagatcactgcaagagtctacccggtttagccagctcgttgaggagttgctgaagattatctgtgcattccaactcgacaccgggctggaatatgcaaacagctacaatttcgcaaagaaggaaaacaatagccccgagcacctgaaagacgaagtctctattattcagtccatggggtaccgcaacagagctaaacggttgctgcagtcagagcccgaaaatccatctcttcaagagacttctctgagcgtccaactaagcaatctcggaacagtgaggaccttgcggacgaaacagcgtattcagcctcagaagacttccgtgtatatcgagcttggcagtgatagctctgaggacaccgttaataaggctacgtactgctctgtaggcgaccaggaactgctccagatcactccacaggggaccagagatgagatttccctcgatagtgccaaaaaggcagcatgcgagttctctgagaccgacgtaacgaacacagaacatcatcaacccagcaacaatgatctgaatacaaccgaaaaacgcgcagccgaaaggcacccagagaaatatcaggggtcatctgtgtcgaaccttcacgtagagccatgtgggacaaatactcatgcctcctccctgcaacacgaaaactcttctctgctattgacaaaagacaggatgaatgtagagaaggcagagttctgtaacaaatccaaacagccaggcctggctaggtcccagcataacagatgggccggatcaaaggaaacatgtaacgatagacgtaccccctctaccgaaaagaaggttgacctgaacgctgacccattatgtgaaagaaaggagtggaacaaacagaagctgccatgcagcgagaatccgcgggacacagaagatgtgccatggattacactcaactcatcgatacagaaggttaacgagtggttttctcgatctgatgaactcctgggaagtgatgactcccatgatggggaaagcgagagcaacgcgaaagtggcggacgttttagatgttctgaatgaggtggatgaatatagcggctcttctgagaaaatagacttacttgcctctgatcctcatgaagctttgatttgtaagtccgagcgggtgcactctaaatcagttgagtcaaatatcgaagacaaaatctttggaaaaacgtaccgtaaaaaggcttccctgcctaacctttcacatgtgactgaaaatttgatcatcggggctttcgtgacggagccccagattattcaagaacgccccctcacaaataaactcaaaaggaaaagaaggcctaccagtggtttgcatcccgaggactttatcaaaaaggcggatctggctgtccagaagactccagaaatgataaaccagggaaccaatcaaactgagcagaatggccaagtgatgaacatcacaaactctgggcatgaaaataagacaaagggggatagcatccagaatgaaaaaaatccaaaccctatcgaaagtcttgagaaggaaagcgcctttaaaactaaggcagaacctatctcatcatccatctccaatatggaacttgagctgaatatccacaatagcaaggcacctaaaaaaaaccgacttcgccgcaagtcgtctaccagacacatccacgccctggagctggtcgtgagtcgcaatctgagccccccaaattgcacagagttgcagatcgattcttgctctagctctgaagaaattaaaaaaaaaaaatataaccagatgccagtgcgacattcaagaaatctgcagcttatggaagggaaggaacctgcaactggcgcaaagaaatccaacaagccgaacgagcagactagtaagagacacgactcagacactttcccagagctgaagctgaccaatgctccaggctccttcactaagtgtagcaatacgtccgagctgaaggagtttgttaatcccagtctcccccgagaagagaaagaagaaaagctggagaccgtgaaagtaagtaataacgcagaagacccaaaagatctgatgcttagcggagagagggttttacagaccgagcgatccgtggaaagcagctctatatccctggtcccagggacagattacggaacgcaggagtccatttcattgttggaagttagtacacttggaaaagccaagaccgagcctaataagtgtgtgtctcagtgtgccgcttttgagaacccaaaaggtctcattcatggatgtagcaaagacaacagaaatgatacagagggatttaaataccctctcggccacgaggtaaaccactctcgagagaccagcatagagatggaagaaagcgagctggacgctcagtacctccagaacacctttaaggtcagcaagagacaaagcttcgccccgtttagcaaccctggcaacgcggaagaggaatgtgcaactttttcagcgcattcaggctcattgaagaagcagagcccaaaggtcactttcgagtgcgagcaaaaagaggagaatcagggaaaaaacgaatccaacatcaaacccgtgcagacggtgaatatcacagccggattcccagtcgtggggcagaaagacaagccggtagataatgccaagtgttcaattaagggtggatctcgcttttgtctgtcctctcagttcaggggcaatgagaccgggcttatcaccccaaataagcatggcttgctgcagaacccttatcgcatcccccccctgtttcctataaaatctttcgttaagactaaatgtaagaaaaacctgttggaagaaaactttgaggagcactctatgtcacctgaaagggagatgggaaacgaaaatatcccgtccaccgtctcaaccatttctcggaacaacattcgcgagaatgtgtttaaggaggccagcagtagcaacattaatgaggtgggctcttcgaccaacgaagtgggctcatctatcaacgaaatcgggtcatccgatgagaatatccaggctgagctgggacgtaatcgcgggcctaaactgaacgccatgctgaggcttggggtgctgcagccggaagtatataaacagtccctcccgggttcaaactgtaaacatcctgagatcaaaaaacaggagtacgaggaagtggtgcaaactgttaacacagatttcagcccctacctgatttccgacaacctggagcagcctatgggatccagccatgcttcccaggtatgttctgagactcctgatgacctgctcgatgacggagagattaaagaagatacatcttttgctgaaaacgacatcaaagagagttcagccgtgttttccaagagcgtgcagaaaggggaattgtcacgctccccttctccctttacccacacccatctcgctcaagggtatagacgcggggctaagaagctggaaagctctgaggaaaacctctcttcagaggacgaggaactaccatgttttcaacaccttctcttcggcaaggtgaacaacataccatcacagtccacaagacactctacagtggcaactgagtgcctgagcaaaaacaccgaagagaatctgttgtctcttaagaactcactgaatgactgttccaatcaggtcattcttgctaaggctagccaagagcaccacctgtccgaagaaactaaatgctcagcatccctgttctcctcccaatgtagtgagttagaggatcttaccgcaaatacaaacacccaggatcccttccttattggcagtagcaaacagatgcgacatcagtcggaatcacagggcgttggactgagtgacaaggagctggtctctgacgacgaggagagagggacagggctagaagagaacaaccaagaggagcagtcgatggactcgaacttgggcgaagccgcctcaggctgcgaatcagagacctctgttagcgaggactgtagcgggctgtcgagccagtctgatattttaactactcaacagagagatactatgcagcacaatttaattaaactccagcaggagatggcggagttagaagccgtgttagaacagcatgggtctcagccctcgaatagctacccgagtattatatcggacagcagtgcccttgaagacttgaggaaccctgagcagtctacctcagagaaggccgtcctgacttcacagaagtcttcagagtatcccataagccagaacccggaaggcctgagcgccgacaaattcgaggttagcgccgatagctccacaagtaaaaacaaagagcccggcgtggagcgctcttcgccatccaaatgcccaagtttggatgacagatggtacatgcacagttgcagtggttccctgcaaaatcgaaattatccaagtcaggaggagttgattaaggtggtggacgtggaggagcagcaattggaggagtctggtcctcacgatcttaccgagaccagttacctccctcgacaggatttggaggggacaccttatctggagtccggtatctcgctgttcagcgatgaccccgaaagtgatccatctgaagacagagctccggagtctgctcgcgtcggaaacatcccctcgagcaccagtgcactcaaagttccccagctaaaggtggccgaatcagcccagtctcccgccgcagcacacaccaccgatactgctggatataatgcaatggaagagtcggtgagtcgggagaaacccgaattgactgccagcactgaacgggtgaacaaacgcatgagcatggtggttagcgggttgactccagaagagttcatgcttgtttacaagttcgctcgaaaacaccacatcaccctgacaaacctcataaccgaggagacaacacacgtggttatgaagacagacgctgaattcgtctgcgagaggaccctcaagtatttcctcgggatagctggcgggaagtgggtcgtgtcctatttttgggtcacacagtctatcaaagagcgcaaaatgctgaatgagcatgatttcgaagtgcgcggcgacgtggttaacgggagaaatcaccagggcccaaagcgggcaagagagtcccaggataggaaaattttcagggggctcgaaatatgttgctatggcccttttaccaacatgcctaccgaccagttggaatggatggtgcaactatgcggagccagcgtcgtgaaagaattaagctcatttacactcggcacaggcgtgcacccgattgtcgtcgtccagcctgatgcctggacggaagataacggctttcatgctatcggccagatgtgcgaagcgcccgtcgtaacacgagagtgggttctcgacagtgtcgcattataccaatgtcaggagcttgacacttacctgatccctcagattccccactctcactactag

SEQ ID NO: 23100 - DNA, 1719 bp, synthetic construct
  misc_feature 1..1719: note = Description of Artificial Sequence: Synthetic coding sequence
  source 1..1719: mol_type = other DNA
atgctgaagctgctgaaccagaagaagggccccagccagtgccccctttgtaagaatgatatcactaagagatctctgcaggagtcaacacgcttttctcagttagtggaagagctactcaagatcatctgcgccttccagctggacactggtctggaatacgccaatagctacaactttgccaaaaaagagaacaattcccccgagcacctgaaggacgaagtttccataatccagagcatgggctatcggaatcgcgcaaagagactactgcagtcagagcccgaaaacccctctttacaagagacatccctctctgtacagctgtccaatctgggtaccgtgcgaactctgagaaccaaacagcggatacagccccagaagacatccgtgtatattgagttgggaagcgacagctccgaggacactgtgaataaggccacctactgcagtgtaggcgaccaggagttgctccagattaccccgcaggggactagagatgaaatttcactggattccgcgaagaaagcagcctgtgaattctctgagacagacgtgaccaacacagaacaccatcagccatcaaataacgatctgaatacaacagaaaagcgggctgccgagcgtcatcccgaaaagtaccaaggagaagcagctagcggatgcgagagcgagacctcagtcagcgaggactgctctggcctgtctagtcagtctgatatcctaaccacccagcagagagataccatgcagcacaatttgatcaaattacaacaggaaatggctgaacttgaggccgtgctggagcagcacggttcccagccttcgaattcttatccctcaatcatatccgattcctcagctttggaggatctccggaatcctgagcagagcactagtgaaaaggccgtgcttacaagccagaaatctagcgagtaccccatatcccagaatccagaggggctaagcgccgacaagttcgaggtgtccgccgacagtagcacaagtaaaaacaaggagccaggagtggagaggagttcaccatccaagtgtccaagcctggacgaccgatggtacatgcatagttgtagtggctcgctccagaaccgtaactatccatctcaggaggagctgataaaggtagtggacgtggaggaacagcagctggaagaatccggaccgcacgatttgactgagacttcctacctaccgcgccaggacttggaaggtacaccttacctcgagagcggcatttcactcttttccgatgatcccgaatctgatccctcagaggaccgggcccccgagtcagcgcgcgtaggcaacatacctagctcaacctcggcattgaaagttcctcaactgaaagtagccgaaagcgctcagagtcctgcagcagcgcacaccaccgacaccgccggctataatgctatggaggaatctgtgtcccgagaaaaaccagaactcacggccagcactgagcgggttaataagaggatgtccatggtcgtcagtggcctgacacccgaggaatttatgctagtctataagttcgctcgcaagcatcatattacattgactaacctgattaccgaagagactacgcatgtcgttatgaagacagacgccgagttcgtttgcgaaagaactctaaaatatttcctgggaattgctggcggaaaatgggtggttagctacttctgggtcacacagtcctag

SEQ ID NO: 23101 - DNA, 1422 bp, synthetic construct
  misc_feature 1..1422: note = Description of Artificial Sequence: Synthetic coding sequence
  source 1..1422: mol_type = other DNA
atggacctgagcgccctgcgggtggaggaggtgcagaacgtgatcaacgccatgcagaagatcctggaatgccctatctgtctagagctcataaaggagcccgtctcgaccaaatgtgaccatatattctgcaagttctgcatgctgaagcttctgaatcagaagaagggcccgtctcagtgcccactctgtaagaatgacataaccaagaggtccctgcaggaatcaaccagattttcccaactcgttgaggagttgctcaagattatatgcgcctttcagctcgacaccgggctggaatacgctaattcctataacttcgcaaagaaggaaaacaactcaccagagcatctgaaggacgaggttagcatcattcagtctatgggctatagaaatagagcaaaacgcctcctgcagagcgaaccagaaaacccttccctgcaagaaacttctctgagtgtgcagctgtcaaaccttggcaccgtgaggacattacgtactaagcaaagaattcagccacagaaaacatccgtgtatattgagcttggctccgactcttcagaagacaccgttaataaagcgacttattgcagcgtgggagatcaggagctccttcagattaccccccaggggactcgcgacgaaatttctctggacagtgcaaagaaagcagcgtgcgaatttagcgagactgacgttacaaacaccgaacaccatcagccttccaataacgacctgaatacgaccgaaaagcgggcagcagagcgacacccagagaagtaccagggctcatctgtatccaatctgcatgtcgagccttgcggcaccaatacacacgcatcatcactgcagcatgaaaattcatccctgctcctcactaaggataggatgaatgtggagaaggctgagttttgcaacaaaagcaaacaacccggcctggcccgatcccagcataatcgttgggccggctcgaaagagacctgcaacgaccgcaggacaccgagcactgaaaaaaaggtggatctgaacgccgacccactctgcgagcgcaaagagtggaataaacagaaactcccttgctccgaaaatccccgagacaccgaagacgtaccctggatcacgctaaatagtagcatacagaaagtaaatgagtggttttccaggtctgacgaattactcggctcagatgactcccacgatggagagtcggagagtaatgccaaagtcgctgatgtcctggatgttctgaatgaggtggacgagtacagcggaagcagcgagaagattgatctgttagcctcagatccccatgaagctctgatttgcaagtcggaaagggttcactccaagtctgtagagagcaatatcgaggacaaaatcttcggaaaaacttacaggaagaaagccagcctgccgaactag

SEQ ID NO: 23102 - DNA, 534 bp, synthetic construct
  misc_feature 1..534: note = Description of Artificial Sequence: Synthetic coding sequence
  source 1..534: mol_type = other DNA
atgaacgtggagaaggccgagttctgcaacaagagcaagcagcccggccttgcccgatcacagcacaatcggtgggccggaagcaaagaaacgtgtaacgatcgccggaccccatctacagaaaagaaagtggacctgaacgctgatcccctgtgcgaacgaaaggagtggaacaagcagaaactcccctgctccgaaaatcccagagataccgaggatgtgccatggataacgttgaattcctctatccagaaggtgaatgaatggtttagtagatcagacgagctgctaggttccgatgattcgcatgacggggaaagtgagtcaaatgccaaagttgccgacgtcctggacgtgttaaatgaagtggacgagtactctggcagctctgaaaagatcgatttactggcgagcgatccacacgaagcccttatttgcaaatccgagagggtgcattccaaatccgtggagtctaacatcgaagataaaatttttggaaagacctaccgaaaaaaggcttctctgcctaattag

SEQ ID NO: 23103 - DNA, 10257 bp, synthetic construct
  misc_feature 1..10257: note = Description of Artificial Sequence: Synthetic coding sequence
  source 1..10257: mol_type = other DNA
atgcccatcggcagcaaggagcggcccaccttcttcgagatcttcaaaacccgctgcaataaggccgatttggggcctatcagtttgaactggtttgaggaactgagctctgaggcacccccctacaattcggaacccgctgaggaatccgagcacaaaaataataactatgaacctaacttgttcaagacgcctcaacgcaagccttcctacaatcagctggcaagcactccaatcatatttaaagaacagggactgaccctgcccctgtatcaaagcccagtaaaggaactggataaattcaaacttgacctcgggagaaatgttcctaattctagacataaatcactgaggacagtcaaaacaaagatggaccaagcagatgatgtgtcatgcccgcttcttaacagctgcctatcagaatcccctgtggtcctccagtgtacccatgtaaccccacagagagacaaatcagtggtatgcgggagcctgtttcacaccccgaagttcgtgaagggccgacagacccctaagcacatctccgaatcactgggggcagaggtggatcccgatatgagttggtcctcgagcttagcaacccccccaactttgtcatcaacagtgttaatcgttagaaacgaggaagcttccgagactgtgtttccccacgacacgaccgccaatgtcaaatcttatttttcaaatcacgacgaatccctgaagaaaaacgataggttcattgcctcggtgaccgattctgagaacactaaccaacgagaagcggcctctcacggctttggtaagacatcaggcaactcattcaaggtcaactcgtgcaaagaccatattggcaaaagtatgccaaacgtgcttgaagatgaggtctacgagaccgtggtggatacaagtgaggaagattcattctctctctgcttttcaaagtgccggacaaagaatctccagaaagtccgcaccagtaaaacaagaaaaaaaatcttccatgaggctaacgcggatgagtgtgagaagtccaagaaccaggtaaaagaaaagtatagcttcgtgtctgaggtggaacccaatgacactgaccccctagattctaatgtggccaatcaaaaaccttttgagtctgggtccgacaagatctccaaagaggtagttccttccttagcctgtgaatggagccagttgactctcagtggcctcaatggggcccaaatggaaaaaatccccttactgcacatcagttcttgtgaccaaaatatttcagaaaaggacctgctggacactgaaaataaacgcaagaaagactttttgacaagcgagaacagtttacccagaatttcgtccttaccaaaaagtgaaaaacctctcaatgaggagaccgtcgttaataagcgtgatgaggaacagcaccttgagtctcatactgactgtattctggcggttaaacaagccatcagtggaacttccccagtggccagcagttttcaggggattaagaagtccatctttagaattcgcgaatcccccaaggagacctttaacgcttccttcagcggccacatgaccgaccccaactttaagaaagaaaccgaagcgagtgagtcaggcctcgaaatacacactgtgtgctcccagaaggaagactcactgtgccctaatcttattgacaatggctcttggcccgccactaccactcagaatagcgtagccctcaaaaacgcaggcctgatcagcacgctcaaaaagaaaaccaataaatttatatatgctatccacgacgagacaagctataagggaaagaaaatccctaaggaccagaagtctgagcttataaattgcagcgcacaattcgaagctaacgcattcgaggctcctctcacatttgccaatgccgacagcgggttattgcattcctcagtgaagcggagctgtagccagaatgacagtgaagaaccaaccctgtcattgacgtcaagtttcggtactatcctgcggaagtgcagccgcaacgagacatgctcgaataacaccgtcatctcccaggatctcgattacaaggaagcaaagtgtaataaagagaaactgcagctcttcatcactcccgaggccgacagcctgagttgcctccaggagggccagtgcgagaacgacccgaaaagtaaaaaggttagcgatataaaggaagaggtgctggcggccgcctgccatcccgtgcagcactcaaaggtcgaatacagcgataccgatttccaatcccagaagagcctcttgtacgatcatgagaatgcgagtacccttatcctgactcccacaagcaaggatgttctgtctaaccttgtaatgattagccgtggcaaggagagttacaagatgagcgataaactaaaaggaaataattacgagagcgatgtagagctcacaaagaatatccccatggaaaagaaccaggatgtatgcgcactgaacgagaactataagaacgtggaactgctacctcctgaaaaatacatgcgggtggcttcaccttcgagaaaggtccaattcaatcagaatacaaacctcagggtgatacaaaagaaccaagaagaaacaacatctatttcaaaaatcacggtgaatccagactctgaggagctctttagcgacaacgaaaataatttcgtgttccaggtggctaacgaaaggaataacctcgccctcggcaataccaaggagcttcacgaaactgatctgacctgcgtcaatgagcccatctttaaaaactccactatggtgctttacggcgataccggcgacaagcaggccacacaggtgagcataaaaaaagacctagtctacgtgctggccgaggagaataaaaatagcgttaagcaacatatcaagatgaccctgggccaggacttaaaatcagacatttcactgaacattgacaagattcccgaaaaaaataacgactacatgaataaatgggctggactcctgggaccaattagcaaccactctttcgggggcagctttcgaacagcctctaataaagagatcaagcttagtgagcacaacattaaaaagtcgaagatgtttttcaaagatatagaggagcagtatccaacttcgttagcttgcgtcgaaatcgtgaatacccttgctctggataaccagaagaagctgagcaaacctcagagtatcaacacagtgtcagctcatttacagagcagcgtagtcgtttccgattgcaaaaactctcatattacaccgcaaatgctctttagtaaacaggactttaactctaatcacaatctgacacccagccagaaggctgagattactgagctgtcgactatcctggaggaaagcggttcgcagttcgaatttacacagttcagaaaaccaagctacattttgcagaaaagcacatttgaagtgcctgagaaccaaatgactattctcaaaaccacaagcgaggaatgccgcgacgcagacttacatgtaatcatgaatgcaccatcaatcggtcaggtcgacagtagcaagcagttcgaaggcacagtggaaatcaaacgtaagttcgctggtttgctgaaaaacgattgcaataagtccgccagcggttatctgactgatgagaacgaggtgggattccggggcttctactctgcccatggcaccaaattgaacgtttccacagaggcgctgcaaaaagctgttaaactgtttagcgatattgagaacatttctgaggaaacatcagccgaagtacaccccattagtctctctagtagcaagtgtcacgactcagtggtctccatgttcaagatcgagaatcacaacgataagaccgtgagtgaaaagaataacaagtgtcaactgatattgcagaacaacatcgagatgacgaccggaacattcgtcgaggaaataacagaaaattataagcgtaacactgagaatgaggataacaagtacacggctgcctcacgcaattcccacaatctcgagttcgacgggtccgactcttccaaaaatgacactgtttgtatacacaaagacgaaaccgacctgctcttcactgatcaacataatatctgtctaaaactctccggtcagttcatgaaagaagggaatacacagatcaaggaggacctgtctgatctgactttcctggaggtggcaaaagcgcaggaagcttgtcacggcaacacctccaataaagagcaactgaccgctacaaaaacggaacaaaatattaaagacttcgagaccagcgatacattttttcagaccgcttccgggaaaaacattagcgtggctaaggaatcctttaataaaatcgtaaatttttttgatcaaaagcccgaggagctccacaacttctccctgaactcagagctgcactccgacatccgtaaaaacaaaatggacatcctttcctatgaggagacagacatagtgaagcacaagatcctgaaggaatccgtgccggtcggcaccggcaatcagctggtgacctttcagggacagcctgaacgtgacgaaaagataaaggaacccaccctgctgggattccatacggcttctggaaagaaagtaaaaattgccaaagaatcgctggacaaggttaaaaatctttttgatgaaaaggagcagggcacatcggagataacttctttcagccaccagtgggccaagaccttgaaatatagggaagcttgcaaagatctcgagctggcttgtgagactatcgagatcaccgctgcccccaagtgcaaagaaatgcagaattccctcaataatgacaagaatctggtgagtattgagactgtggtcccaccaaagttgctgtccgacaatctctgcagacaaaccgagaatctgaaaacaagcaaaagtatctttctgaaagtgaaggtgcatgaaaacgtggagaaggagacggcgaagtctcccgccacgtgctacacaaaccaatctccttattccgtgattgaaaacagcgccctcgccttttatacctcttgctccaggaaaacgtccgtgtcccagacctccttactggaggcgaaaaaatggctgcgtgagggaatcttcgacggccaacctgagcgtattaataccgcagattacgtggggaactatctgtacgaaaataactctaacagcactatagccgagaatgacaaaaatcacctctcagagaaacaggacacttacctctccaactccagcatgagcaattcctactcctatcacagcgacgaggtctacaacgattcagggtacctgtcgaagaacaagctcgattctggcatcgaacccgtgctcaagaacgtggaagaccagaaaaatacttccttttctaaagttatctccaatgtgaaagacgcaaacgcctacccacaaacggttaatgaggacatctgtgtggaggagctggtaacttcctcaagcccgtgtaagaacaaaaatgcagccatcaagctgtcaatcagcaattctaacaatttcgaagtcggcccccccgctttccggatcgcctcaggcaaaatagtgtgcgtgtctcacgagactatcaaaaaagtaaaggacatattcaccgattccttttctaaggtaatcaaggagaataatgagaacaaaagcaaaatatgccaaacaaaaattatggcaggttgttacgaagcgctagatgactcagaggatattctgcacaatagcctggataatgacgaatgctcgacccacagtcataaggtatttgcagatatacaaagtgaagagattctgcagcacaaccaaaatatgtccggactggagaaggtgtccaagatatcgccttgtgacgtttccctcgagacttctgacatatgtaaatgcagtatcggaaaactacacaagtccgtatccagcgccaacacatgcggaatctttagtactgcatccgggaagagcgtccaggtgagcgatgcaagcctgcagaacgccagacaggttttttctgaaatcgaggactccacaaaacaggttttttcaaaggtcttgtttaagagcaatgaacattcggaccaactcaccagagaagagaatactgctatccggacccctgaacacctcatcagccagaaaggcttttcttacaatgtggttaacagtagcgccttttcaggattctccaccgccagtggtaaacaggtgagcattttagagtcttccctccacaaggtgaagggagttctagaggaattcgatttgatccgaacagagcacagcctgcactacagtcctaccagtaggcagaatgtctctaaaatcctgccccgcgttgacaagaggaacccagagcattgtgtcaactcggaaatggagaagacctgctctaaagagttcaagttgtccaacaacctaaacgtagaaggtgggagcagtgagaataatcactcaatcaaagtctcgccctacctgagtcagtttcagcaggataagcagcagctggttttagggacaaaggtgagccttgtagaaaacatacatgtcctggggaaagaacaggcatccccaaaaaacgtgaagatggaaatcggaaagaccgagactttctccgatgtacctgtgaagacgaatatcgaggtctgcagcacctactcgaaagattcagagaactactttgaaacagaggcggtggagattgctaaggcatttatggaggacgatgagctaacagacagcaaactgccaagccacgctacgcatagtctgttcacctgccctgagaatgaggagatggttctgtccaactcccgaattggtaaaagacgaggggagcctctaattttggttggagaacccagtattaaacggaatctgctgaatgaattcgaccgaattatcgaaaaccaggaaaaatccttaaaggcatcaaaaagtacgcccgacggaaccattaaagatcgcagattgttcatgcaccatgtgtccctggagcctatcacctgtgtccctttcaggacgacaaaggaacggcaagagatacagaatcctaattttactgccccaggtcaggagttcctgtccaagtcacatctgtacgaacacctgaccctggagaagagcagcagcaaccttgcagtgtcagggcatcccttctaccaggtgtccgccacacgcaacgagaagatgcgccacttgataactactgggcgtcctaccaaagtgtttgtgcccccattcaaaaccaaatctcacttccatagggtcgagcagtgtgttcgaaatattaacctggaggaaaatagacagaaacagaatattgatggtcacggatcagacgactcaaaaaataagatcaatgataatgagattcatcagtttaataaaaacaactctaaccaggcggtcgctgtgactttcacgaagtgcgaagaggaaccactggatcttatcacgtcattgcagaatgccagggacattcaggatatgagaatcaagaaaaagcagcgtcaacgggtctttccacagcccggcagtctgtatctggctaagacaagtaccctcccgcggatttcactgaaggccgctgttggcggccaggtcccatcagcctgctctcataaacagttatatacctatggcgtgagcaagcattgcataaagatcaactccaaaaacgccgagtcctttcagtttcataccgaggattacttcgggaaagaatccctgtggaccggaaagggaattcagttggccgatggcggctggctgattccttccaatgatggcaaggccggcaaggaagaattctatcgagcactttgcgacactccaggggtcgacccaaagttaatcagccgcatttgggtttacaatcattatcgttggattatatggaaactggctgctatggaatgcgcttttccaaaagaatttgctaaccgctgtctgtcaccagaacgggtgctgcttcagcttaagtaccgctatgataccgagatcgaccggtcccgaaggtcagcaataaagaagatcatggagcgtgatgataccgcagcgaaaaccttagtgttatgtgtgtcagacatcatatcacttagtgccaatattagcgaaacatcctcaaataaaacatccagcgcggacacccaaaaggtggccatcattgagctgaccgatggttggtacgcagtcaaggcacagttagatcctcctctcctggcagttttgaaaaacggcaggctgactgtaggccagaagattattctccacggagcagaactggtcggctcccctgacgcatgcaccccgctggaagctcccgagagtttaatgctgaagatatcagccaactccacaaggcccgcacgctggtacacaaaactggggtttttccctgaccccaggccatttccgctgcctctgtccagtctgttttctgacggaggaaatgttggatgcgtggacgtgatcatccagcgtgcttatcctatccaatggatggagaagacatctagtggcctatacatatttcgcaatgagagagaggaagagaaagaagccgcaaagtacgtggaggcacagcagaagagactggaggccctgttcacaaaaatccaagaagagttcgaggagcacgaggagaatactacaaagccataccttccgagtcgggctctgacccggcagcaggtgagggccctgcaggatggagctgagctgtacgaagctgttaaaaatgcggccgaccctgcttatttggagggatattttagtgaagaacagctaagggctttgaacaatcatagacagatgctgaatgacaaaaaacaagcgcagattcagctggagatccgaaaagctatggaatctgcagagcagaaagaacaaggactaagtcgagacgtaacaactgtttggaaactgcggattgtgagctattcaaaaaaggagaaggacagcgttatcctgtcaatctggcgtccctctagcgacctttattcactattaacagaggggaaaaggtacaggatataccatctggcaactagcaagagcaaaagcaagagtgagagggccaatatacagctggcggcgactaaaaagacccagtatcagcagctccccgtctccgacgagattctgtttcagatatatcaacctcgcgaacctctccatttcagcaagttcctagaccccgatttccagccaagttgcagtgaggtcgacctgattggcttcgttgtgtctgtggtgaagaagaccgggctggcaccattcgtatatctgtctgacgaatgttataacttattagccataaagttttggattgatctcaacgaagacatcatcaaaccacacatgcttatcgccgctagcaatctccagtggagaccggagagtaagagtggtctgctgactctgtttgctggtgatttcagtgtgttcagtgcctctcccaaagagggacacttccaagagacttttaataagatgaagaacacagtagaaaatattgacatactttgtaacgaggccgaaaacaaattgatgcatatacttcacgccaacgatcctaagtggagtacaccgaccaaagactgtacctctggcccctacacagcccagattatccctggaacaggcaacaaactactcatgtctagccccaactgcgaaatctactaccaatcacccctctccctctgtatggctaaacgaaaaagtgtgagtacccccgtttcagcacaaatgaccagcaaaagctgcaagggcgagaaggaaatagatgaccagaagaattgcaaaaaacgccgggcactcgactttctctctcgacttcctctccccccccccgtcagtccgatctgtacttttgtcagccctgcagctcagaaggcgttccaaccccctagatcctgcggaacaaaatacgagactccaataaagaagaaagaactaaatagccctcagatgactcctttcaagaagtttaacgaaatctctcttctcgaatccaattcgattgcagatgaggaactggctctaatcaatacccaagctctgctctctggcagcacaggggaaaagcagtttatctcagtgagcgagtctactagaacggccccaacatcctcagaggactacttgcgactgaagcgacgatgcacgacatcccttattaaggaacaggagtcttcccaagctagcaccgaagagtgtgaaaagaacaagcaggatacgatcactactaagaagtacatttag

SEQ ID NO: 23104 - DNA, 1809 bp, synthetic construct
  misc_feature 1..1809: note = Description of Artificial Sequence: Synthetic coding sequence
  source 1..1809: mol_type = other DNA
atgcccatcggcagcaaggagcggcccaccttcttcgagatcttcaagacccgctgtaacaaagctggaccaatcagtctaaactggttcgaagagcttagtagcgaggcgcctccctacaatagtgagcccgcagaggagtccgagcataaaaacaataattatgagcccaacctgtttaagaccccacagagaaaacctagctataatcagcttgcctcaacaccaatcatatttaaagagcaaggcctgaccctgcccctatatcagagccctgtcaaggagctcgataagtttaagctggacctgggccggaacgtgccaaattcccgccataaatctctgagaacagtaaagacgaagatggatcaggcggatgatgtatcatgcccactgctgaattcttgcctgtctgaaagtccagtcgtgttacagtgcacccacgttacacctcagcgcgacaaaagcgttgtgtgcggatcgctcttccacacaccaaaattcgtaaagggtaggcagacccccaagcacatttctgaaagcctgggcgccgaggtcgatcctgacatgagctggtcttcgagtctggcgacacctcctactttatcttccactgtgttaatcgtacgaaatgaggaagctagcgagaccgttttcccccatgacacaactgctaacgtcaagtcttatttctctaaccacgatgagagtctcaaaaagaacgatcggttcattgcctcagtcacagacagcgagaacacgaaccagcgagaggccgcctctcatggctttgggaaaacaagtgggaatagctttaaagtaaattcttgcaaggatcatatcggaaaatcaatgcccaacgtcctggaagacgaggtctacgagaccgtggtagatactagcgaagaggattccttctccttatgttttagcaagtgccggactaagaaccttcaaaaagtccgtacctctaagacacgaaagaagatttttcatgaagcaaacgcagacgagtgcgagaagtcaaagaatcaggtcaaagagaagtactcttttgttagtgaggtggaaccaaacgatactgatcccctcgatagtaacgttgccaaccagaaacccttcgaatctggctcagacaagatctctaaggaagtggtgcctagcctagcctgtgagtggtcacagctgacgctatcaggccttaatggagcccagatggaaaagataccattgctgcacatttcaagctgtgatcagaacatttcagagaaagacctgcttgacacggagaacaagaggaaaaaggattttctgacttccgagaacagcctgcccaggatcagttctttgccaaagagcgagaaaccactgaatgaagagaccgtggtgaataaaagagatgaggagcagcaccttgaatcacacacggactgtatcctcgcggtcaagcaggcaatatcaggtacgtccccagtggcgtcttccttccaggggatcaagaaaagtatctttaggatacgagaatccccaaaagagaccttcaacgccagtttctctggccatatgacagacccaaatttcaaaaaggaaacagaagcgagtgagagtggactggagattcacaccgtgtgctcccagaaagaggatagcctgtgtcctaacctgattgacaatggctcttggcctgccactactacccagaactcagtcgcgctgaagaatgcagggctgatcagtaccctcaagaagaaaacaaacaaatttatatatgccattcatgacgagacaagctataagggcaaaaaatag

SEQ ID NO: 23105 - DNA, 10257 bp, synthetic construct
  misc_feature 1..10257: note = Description of Artificial Sequence: Synthetic coding sequence
  source 1..10257: mol_type = other DNA
atgcccatcggcagcaaggagcggcccaccttcttcgagatcttcaaaactaggtgcaacaaagctgaccttggcccaatcagtctgaactggtttgaagagctctccagtgaggcaccaccttataacagcgagcccgcggaggagagcgagcacaagaacaacaattatgagccaaacctgtttaagactcctcagcggaaaccttcctacaaccagttggcatccacgccgattatattcaaggagcaagggctcactctgcccctataccagtcccccgttaaggagctggacaaatttaaactcgatcttggaagaaatgtgccaaacagccgccacaaaagtttgagaactgtgaaaacaaagatggatcaagccgacgatgtttcctgtccgctgctcaactcttgcctctctgaatccccagttgtcctgcagtgcacacacgtgacgccccaacgggacaagtcagtggtttgtggcagtctgttccatactcctaagttcgtcaaggggaggcagaccccgaagcacatctcagagtccctgggcgccgaggtggatcccgacatgtcttggtcatcttcgctggccacaccccccaccctgtctagtacagttctgatagtgagaaatgaggaggcttcagaaacggtcttcccacacgatacaaccgccaacgtcaagtcttatttttctaaccacgacgagagcctgaagaagaatgatcgtttcattgcctctgtgaccgactccgaaaacacaaaccagcgcgaagccgcgagtcatggctttggaaaaacctccggcaactctttcaaagtcaattcttgtaaggaccacataggcaaatcaatgcccaacgtgctagaagatgaggtgtatgaaaccgtcgtggatacatcagaagaggactctttcagcctgtgctttagtaagtgccgcactaagaacctgcagaaggttcgaaccagtaaaactaggaaaaagatattccacgaagccaatgcagatgagtgcgaaaaaagtaaaaaccaggtgaaggagaagtactcttttgtgagcgaggttgagcccaatgataccgaccccctcgacagcaatgtagcaaaccagaagcctttcgaaagcggctcagacaagatttctaaagaggtggtgccttccttggcttgtgaatggagccagctaactctgtcgggcctaaacggggcgcagatggagaaaattccacttctgcatatctcttcctgcgatcagaacatctccgagaaagatttattagacacggaaaacaaacgaaagaaagatttcctgacatccgagaactctttaccccgcatatcttctctgcctaagtcagaaaaaccactcaacgaggaaaccgtggtcaacaaacgagacgaagagcagcatcttgagagccacaccgactgcattttggccgtcaagcaggccatttcaggaacctcacccgtcgcctcttcattccagggcataaagaaatccatcttcagaattagagagtctcctaaagagacctttaacgcatccttctcgggccacatgaccgatccgaactttaaaaaggagactgaggctagtgagagcggcctggagatacacaccgtgtgctcccaaaaggaagattcactctgccccaacctgattgataacgggtcttggcctgctaccacgacccagaacagcgtagctctgaagaatgctggactcatttccacactaaagaaaaaaaccaataagttcatttatgccattcacgatgagacctcatataagggaaagaaaattcccaaagatcagaaatcagaattaattaactgctctgcccagttcgaggctaacgcctttgaggctcctttgaccttcgccaacgcggattctggccttctgcactcgagcgtgaagaggagctgcagccagaatgatagtgaggagcccaccctgagccttactagttcctttgggactatcctgcgaaagtgcagccggaatgaaacgtgttcaaataacacggtcatcagccaagacctggattataaggaagctaagtgtaataaagagaagttacagctctttattacgccagaggctgattcgctgtcttgcttgcaggagggacagtgtgagaacgatcctaagtcgaagaaggttagcgatatcaaggaagaggtgttagccgccgcctgccacccagtccagcacagtaaggtagaatacagcgataccgacttccagagtcagaagtctctgctctatgatcacgagaatgcttccaccttgatacttacccctaccagtaaagacgtcctgagtaatcttgttatgatatcgagaggtaaggagtcctataaaatgtcagacaaactgaaggggaataactacgagtcagacgtcgaactcactaagaacatccctatggaaaagaaccaggacgtgtgcgcactgaatgagaattacaaaaacgtcgaattactgcctcccgagaagtatatgagggtggcttcaccctctaggaaggttcagtttaaccagaatactaacttacgggtgatccaaaaaaatcaggaggagactacaagcatctcaaaaataactgtcaaccccgattcggaggaactgttctccgacaatgagaataactttgtgttccaggtggctaatgagaggaataatctggccttggggaatactaaggaacttcacgagaccgatttaacatgtgtcaatgaacctatctttaagaacagtacaatggtgctatacggcgacaccggagataaacaggcaacccaggtgagtataaagaaggacttggtttatgtgctagcggaggagaacaaaaatagcgtgaaacaacatatcaagatgactctgggacaagatctgaagagtgatatcagtctaaatattgacaagatccccgagaaaaacaacgactacatgaataagtgggcgggactgttagggcccatatcgaaccattcattcggggggtcctttaggacagcctctaataaggagattaaacttagcgagcataatataaaaaagagcaagatgtttttcaaagatattgaggagcagtaccccacctctctggcctgcgtagagatcgtcaacactctggcgctggacaatcagaaaaagctttccaagccccagtcgatcaataccgtgagcgcccaccttcagtcttcagtcgttgtgagcgactgtaagaacagtcacatcacgccacagatgctgttctctaagcaggattttaattctaaccacaatcttactccctctcaaaaagcagaaattaccgaattgtccacaatattggaggaaagcggcagtcagtttgagttcacgcagtttagaaaaccaagttatatcctccaaaagagtacctttgaggttccagaaaatcagatgaccatcctgaagactacgtcagaggaatgcagagatgcggatctgcatgtcatcatgaatgcccctagcatcggtcaggtcgactcatcgaaacagtttgaaggaactgtcgaaattaaacgcaagttcgccggacttctgaagaacgactgtaacaaaagcgcctccggttatttgacagatgaaaatgaggtcggtttccgcggattctatagcgcccatggcactaagctgaacgtgtccactgaggccctgcaaaaagccgtcaaactgtttagtgatattgaaaacattagtgaagaaacttctgcagaggtccaccccatcagtttgagctcctccaaatgccatgattccgtggtgagcatgtttaaaattgaaaatcataacgataagaccgtgtctgagaaaaacaacaagtgtcagttgattctgcagaacaatatcgagatgacaaccggaacttttgttgaagagatcaccgaaaattacaaaaggaacaccgagaacgaggacaacaagtatactgcagctagtcggaattcccacaacctagagttcgatggttctgatagtagtaaaaatgatacggtgtgtattcataaagacgagacggatctcctgtttacagaccagcacaatatctgcttgaaactcagcggccaattcatgaaagaaggtaacacccaaattaaagaggatttatcagatctgacatttctggaggtcgcaaaggcgcaagaggcatgtcacggaaacacttccaataaggaacagctgaccgcaactaaaactgaacaaaatatcaaagatttcgagacatcagatacatttttccaaacagcgtcaggaaagaacatcagcgtggccaaggaatcctttaataaaatcgtgaattttttcgaccagaagccagaagagttacacaacttcagcctgaatagcgaactgcattctgacattagaaagaacaaaatggatatactctcatacgaagaaactgacatagtgaagcacaaaatcctgaaggagtcagtacccgtgggaactggcaatcaattggttaccttccagggtcagccagaaagagacgagaaaatcaaggagccaaccctgcttggattccatacagcatctgggaagaaagtaaaaattgcaaaggaaagcttggataaagtgaaaaacctgttcgacgaaaaggagcagggcacatctgaaataacatccttctctcaccagtgggccaagaccctcaaatatagagaggcctgtaaggacctcgagctggcctgcgaaaccatagagatcacagcggcgccgaagtgtaaggagatgcaaaactctctgaacaatgacaagaacctggtgtccatagaaacggtcgtcccaccgaagcttttgagcgataacctgtgtagacaaacggagaatctcaagacctccaagtccatcttcttgaaagtgaaggtccacgagaatgttgaaaaagaaacagctaagagccccgctacctgttatacaaaccagtcaccttacagcgtcatcgagaattcggcattggccttctacacctcttgcagtcggaaaactagcgtgagtcagacttccttactagaggcaaagaaatggctgcgcgagggcatttttgacggccaaccagaacggatcaacactgcagattacgtgggcaactacctgtacgaaaacaattcaaactccacaattgctgaaaacgataagaaccacctgagtgagaagcaggatacatacctctccaatagctcgatgtcaaacagttatagctatcacagcgacgaggtatataacgattccggctacctgagtaagaataagctagacagtggaatcgaacccgtacttaagaatgtagaggatcagaagaataccagttttagcaaggtcatctcaaacgttaaggacgcaaacgcctacccgcagaccgtcaacgaggacatctgtgtagaagagctggtcacctcttcctcaccgtgcaaaaataagaacgcagctataaagctgtctatctccaactcaaataatttcgaagtcggcccccccgcgttccgaattgcttctgggaaaatcgtgtgcgtgtcccatgaaacgattaaaaaggtaaaagatatctttacggacagtttcagtaaggtgatcaaggaaaacaacgagaataagtctaaaatctgtcagacaaagattatggccggctgttatgaggcgcttgacgacagcgaagacatcctacacaacagcctggataacgacgaatgctcaactcactcccataaggtgtttgccgatatacaatccgaagagatactgcagcacaatcaaaatatgtccggcttagaaaaggtgagcaaaataagcccctgcgacgtctcactagaaacaagcgacatttgcaaatgcagcatcggcaagctgcacaagtctgtgagctccgctaatacttgcggaatattcagcacagcctccggtaagtccgtacaggtgagcgatgcctctcttcaaaacgccagacaagtatttagcgagattgaagattctactaagcaggtcttcagtaaagttttattcaaaagcaatgaacacagtgaccagctgactcgagaggaaaataccgccattcgcacacctgagcacctgattagccagaaggggttcagttacaacgttgttaatagcagtgcattctcagggttctctacagcatccgggaaacaagtgtctatcctggagtcgtccttgcacaaggtgaaaggcgtattagaagagttcgaccttatccgaacagaacactccttacactactcgcccaccagtaggcagaatgtgagtaaaattctgccccgcgttgataagcggaaccctgaacactgtgtcaactccgaaatggaaaaaacatgcagcaaagagttcaagctgtctaataaccttaacgtcgaaggcggcagctccgagaataaccactccatcaaggtttcgccttacttaagccaatttcagcaagacaagcagcaactggtcctgggcacgaaagtctctctcgtcgagaacatccacgtcttgggcaaggagcaagcatcaccgaagaatgtgaaaatggaaatcgggaagacagaaaccttctcagacgtgcccgtgaaaacgaatatcgaggtttgtagcacatatagcaaagattccgagaactacttcgaaacggaggccgtggaaatcgctaaagccttcatggaggatgatgaacttacagactcaaagctgcccagccacgccactcattccttgtttacatgtcccgagaatgaggaaatggttctgagtaactctcgtatagggaagcgtcgcggagaacccttgatactggtgggggaaccaagcatcaagcgcaaccttctgaatgagtttgaccgtatcatagagaaccaagaaaaaagcctgaaagccagcaagtctactccagatggaaccattaaggaccgcagactctttatgcaccatgtgagtctcgagcccatcacctgcgtcccatttcggaccacgaaggaacgccaggagattcagaaccccaacttcactgcccctgggcaggaattcctttcaaaaagtcacctctacgagcatctgactctggaaaagagcagctccaaccttgcagttagcggacatccgttttaccaggtttctgccacccggaacgagaaaatgaggcacctgatcaccaccggaaggccaacaaaggtgttcgtccctccgttcaaaaccaagtctcatttccaccgagtggaacaatgtgtgagaaacataaatctggaagagaataggcaaaaacagaacattgacgggcacggcagcgacgacagcaagaacaagatcaacgataatgaaattcatcagtttaataagaacaatagtaaccaagcggtggcggtaaccttcacaaaatgcgaggaagaacctctggatcttataacgtcgctgcagaacgccagagatatccaggacatgcgcatcaagaaaaagcagagacagagggttttcccacagcccggctccttgtatctggctaaaacatccaccctcccaagaatcagtctgaaggccgctgtgggcgggcaggtcccaagcgcttgctcacacaagcaactgtacacatacggtgtatctaaacattgcatcaagatcaactccaagaatgctgagagctttcaatttcatacagaggactattttggtaaagaaagcttgtggactggcaaaggaatccagctggccgacggtggctggctgatccccagcaacgacggcaaggccggcaaagaagagttctatagggcgctctgtgatacgcccggggttgaccccaaactgataagtaggatttgggtgtacaaccattaccgctggattatatggaaactggctgccatggaatgcgcatttccaaaggaatttgcgaaccggtgcctctcccccgaacgggtcttattgcagctgaaatatcggtatgatacagagatcgatcggtcgaggaggtcagccattaaaaagatcatggagcgggacgacaccgcggccaagaccctggtactctgtgtgagcgatattatcagcctctctgccaacatctcagaaacatcttctaataaaacttctagcgccgatactcagaaagtggctatcattgaactgacggacggctggtatgccgtgaaagcccagctggatccccctctgctggccgtgctcaagaacgggcgccttaccgtcggtcagaagatcatcctccatggtgccgagttggtaggttctcccgacgcttgcacccctctggaagccccagagtcactgatgctgaagatctctgctaacagcacaaggcctgcgagatggtacactaagttaggtttttttcccgatccaaggccattcccgcttccattatcttcactcttctcagatggcggaaacgtcggctgtgtggacgtgataattcagcgggcctaccccatacagtggatggagaagacaagctccggactctacatttttcgaaatgaaagagaggaggaaaaggaagcagctaagtacgtcgaagcacagcaaaaacgtctggaagccctgttcactaaaattcaggaagagttcgaggaacatgaggaaaacaccaccaaaccttacctgccaagcagggctctcactcggcaacaagtgagagccttacaggatggagcggagctgtatgaagctgtgaagaatgcagctgacccggcctacctggagggttacttttccgaggaacaactccgggcgctcaataaccaccgacagatgctcaatgataagaagcaagcccaaattcaattagagattcggaaggccatggaaagcgctgaacagaaggagcagggtttgtctagagatgtcactactgtttggaaactgcggattgtgtcatacagtaagaaggagaaggattcagttatcctgtctatttggcgaccttcctctgacctatactcgttgttgacagagggcaagcggtatcgcatctaccacctggctacgtcaaaaagtaaaagcaagagcgagagagccaacatccaactcgcggccactaagaagacacaataccagcagttgcccgtgagcgatgagattctgttccaaatctaccagcctcgtgagcccctgcactttagcaaattcctggatccggactttcagcctagctgttccgaggtcgatctgattggctttgtcgtttcagtcgtgaaaaagactggtttagccccctttgtgtacctcagcgatgagtgctacaacctgcttgctataaagttttggatcgacttaaatgaagacataatcaaacctcacatgctcatcgcagcctccaacctgcagtggcgtcccgagtccaaaagcggcttgttaacactgttcgctggtgattttagcgtcttcagcgcaagtccaaaggaagggcattttcaggaaacatttaacaagatgaagaacaccgtggaaaatatcgacattctttgcaatgaggccgagaacaaattgatgcatatcctgcatgccaacgatcctaagtggtcaacccctacgaaggactgcacaagcggcccatacaccgctcagatcattcccggcactggcaataagctcctgatgagctcccccaactgcgagatttattatcagtcaccgctttctctgtgtatggccaagaggaagagtgtgagcacacccgtgagcgcccagatgacttcaaagtcctgcaaaggcgagaaggaaattgatgatcagaaaaactgtaaaaagcggcgcgcactcgactttttatctaggctgccattgccgcccccggtgagccccatatgcacttttgtgagccccgccgctcaaaaggcatttcagccacccaggtcgtgcggaactaaatatgaaacccccatcaagaagaaggaactgaactcgccgcaaatgaccccatttaagaaattcaatgagattagcctgctggagtccaactccatagctgacgaagagctggcgcttataaacactcaggctctgctgtcaggttctaccggcgagaaacagttcatcagcgttagtgaatccactcggacggctccaacgtcctcggaggactacttgcgccttaagaggcggtgcaccacatctttgattaaggagcaggagtcatcccaagcatccacagaggagtgcgaaaagaataagcaagatacaattacgactaagaaatacatatag

SEQ ID NO: 23106 - DNA, 2667 bp, synthetic construct
  misc_feature 1..2667: note = Description of Artificial Sequence: Synthetic coding sequence
  source 1..2667: mol_type = other DNA
atgcactgccccggcgaggcccccctggccgccccccggcccaccccaaaggacccttgcctgaggaacgtcctagcaaaggcattgtacgataacgtcgcagaaagcccagatgaactctcgttccgcaagggcgacataatgacagtcctggagcaggacacacagggactggatgggtggtggctttgcagcctccatggaaggcagggaatagttcctggcaacagactcaagattttagtgggtatgtatgacaagaaacccgccggcccaggtcccggcccccctgcaacccctgctcagcctcagcccggcctgcatgcaccggctcctcctgctagtcagtatacgcccatgctaccaaacacctatcagccacaaccagactcagtgtatctggttcctacacccagcaaggctcaacagggcctctaccaggtacctggtccgagcccgcaattccagtccccacctgcaaaacagacatctacgttcagtaaacagacacctcatcatccattcccatccccggccaccgacttgtatcaggtccccccggggcctggagggcctgcccaagatatctatcaggtacccccctccgccggcatgggtcacgatatctatcaagtccctcccagtatggacaccagaagctgggagggaacaaagccgcccgccaaggtggtcgtgccaacacgcgtcggtcagggttacgtttatgaggccgctcaaccagagcaggatgagtacgacattcctcggcatctgcttgcgccaggcccacaggatatctacgacgtaccccccgtgcgaggtctgttgccctctcagtatggccaggaagtgtacgacaccccgccaatggctgtgaaaggtcccaatggaagggatcccctgctggaagtgtatgatgtgcctccttccgtggaaaagggtctaccaccatcgaaccatcatgctgtttatgatgttcccccctccgtgagcaaggatgtcccagacgggcccctcctgcgagaagagacatacgacgtgccccctgctttcgcaaaagcaaaaccatttgaccctgcacggacccctcttgtgctcgccgctccgcctccagatagtccgccggcagaagacgtgtacgatgtgcctccgcctgccccagacctgtatgacgtccctcccggactcaggagaccaggccccggcactctgtacgatgttcctagagagagagtcctgccaccggaggttgccgacggcggtgtagtggactccggcgtctacgcagttcccccccctgcggagagggaagctccggcggagggcaaaaggctgtcggcttcctccacaggctccaccaggtcaagccagtctgcttcatcccttgaggtggcaggcccagggcgggagcccctggaactggaggtggccgtagaagctttggctcggctccagcagggcgtgtcggccactgttgcgcatctgttggacctcgctgggtccgccggcgctactggtagctggcggagccccagcgagcctcaggagcccctggtacaggatctccaggccgccgtggcagcagtccaatctgccgtgcacgagttgttggaattcgctagatcagccgtgggcaatgcagcccacacatcagacagagccctgcatgctaagctcagtcgacaacttcagaaaatggaagatgtgcaccagacactcgtcgctcacggacaggcactggacgccggccgcggaggtagcggcgccactctagaggatctagatagattagtggcttgtagccgcgccgtgcctgaagacgccaagcagttagcttccttcctacacgggaacgcatcactccttttcagacgtacaaaggctacggcacctggacctgaagggggagggacattacaccccaaccctaccgacaagacttccagtatccagtctaggcctctgccgtccccccccaaatttacctctcaggacagtcctgacggtcaatatgaaaatagcgaaggtggctggatggaggattacgactatgtgcacctccaggggaaagaggagtttgagaagacccagaaagagctgttggagaaagggagcatcactcgtcagggcaagagccaactggagcttcagcagctaaagcagtttgaaagattggagcaagaggtatcaaggcccattgaccatgatttggctaactggacgccagcccaaccactagcccctggtcggactggaggcctgggaccatctgatcgccagctgttgctcttctatcttgagcagtgcgaggctaatttgactactttgactaatgcagtggatgccttttttacggccgttgccaccaaccagccgcctaaaattttcgtcgctcactcgaaattcgtgattctgtctgctcacaagctcgtattcataggcgacactctgtcccgccaagctaaagcagccgacgtgcgtagccaggtgacccactacagcaacctgctgtgcgacttgctgcgcggcatcgtggcaactacaaaggcagctgcactgcagtacccatcaccatcagcggcccaggacatggttgagcgcgtgaaggagttaggtcactctacccaacagttccggagggtgttgggccagctggctgcagcctag

SEQ ID NO: 23107 - DNA, 2613 bp, synthetic construct
  misc_feature 1..2613: note = Description of Artificial Sequence: Synthetic coding sequence
  source 1..2613: mol_type = other DNA
atgaaccacctgaacgtgctggccaaggccctgtacgacaacgtggcagaatctccagatgaactgagctttaggaagggagacatcatgaccgtgctggagcaagacacccaaggtttggatgggtggtggttgtgttcactgcatgggaggcaggggatagtgcccggtaaccggctaaagatacttgtgggtatgtacgataaaaaacctgccggcccgggtcccggcccccctgcgactcctgcccagccccaaccgggcctgcacgctcccgctccaccagcttcccagtatacccccatgctgccaaatacttaccaaccccaacccgattcggtctacttagtgccaacacccagtaaggcccaacaggggctttatcaggttccgggaccttctccccaatttcagtctcctcctgctaagcagacctcaacgttctcgaagcaaacgccccaccacccattccctagcccagcaacagacctctaccaggtgcctcctggcccgggaggtcccgcacaggatatttaccaggtgcccccaagcgctggcatgggacatgatatctatcaagtccccccaagtatggacacacgatcctgggagggtaccaagccacctgccaaagtggttgttcccacccgcgtgggtcaggggtacgtctacgaggccgcccaacccgagcaagatgagtatgacattcctaggcatctcctggcccccggcccacaggatatctacgatgtgcctcctgtcagggggctcctgcccagtcagtacggtcaggaagtgtatgatacgccaccgatggctgtcaaaggacccaacggcagggaccctctcctggaggtgtatgatgttcccccaagcgtcgagaaaggcctccctccatcaaaccaccacgcagtctatgatgtaccaccctcagtctctaaggacgttcctgacggccccctcctgcgcgaagaaacctatgatgtacctccagcattcgcgaaagctaagccgtttgatcccgctcgcacccctctggtgttagctgctccccctcctgattctcctccagctgaggacgtctatgatgtgccaccgccggcacccgatctctacgatgtccccccaggtctgcgaagaccaggccccgggaccctctacgatgtgcctcgtgaacgggtgctccccccagaggtggccgatggtggcgtggttgactctggggtgtacgcagttccaccacccgctgaacgggaggcacccgcagaaggcaagagactgtccgcctcatctacagggtcgacgcggagtagccagagtgcttctagtttagaagttgctggtccggggcgcgaacccctggaactggaagtcgccgtggaagcactggcacggcttcagcaaggcgtcagcgccacagtggctcaccttctggatttagcggggagtgccggcgctacaggctcgtggaggtctcctagcgagccccaagaaccccttgtccaggacctgcaagccgccgtggccgccgtgcagagcgcagtccacgagctcctcgagtttgccaggtccgccgttggtaacgccgcccatacctcagaccgcgctttacacgccaaactatcccgccagctccaaaagatggaggatgtgcatcaaaccctggtcgcgcatggccaggccctggacgctggtaggggaggatccggggctacactcgaggatttggaccgattggtcgcctgttcacgagcagtccccgaggacgcaaagcagctggcctcctttcttcacggaaacgcttcactgctgttccgacgtacgaaagctacagcacccggacccgagggcggcggcacgctccatccaaatccgacggacaagacttcatctattcagagcagacccctgccctcccctcccaaatttacaagccaggactcgccagacggacagtacgagaactctgaggggggatggatggaggactatgattacgtgcacctgcaaggtaaagaggagtttgagaaaacacagaaagagctccttgagaagggctcaattacacgccaggggaagtcccaactggagctacagcagcttaagcagtttgagcgactggagcaggaggtgtcccgacccatcgatcacgatctggcaaactggacacccgctcaacctctcgctcccggccggacgggcggattggggccttccgatcgccaactgctgcttttttatctggagcaatgcgaggccaaccttaccacactgaccaacgccgtggacgccttcttcaccgctgtggccacaaatcaaccaccaaaaatctttgtcgcccatagcaagttcgtcattctgtccgcacataaactagtgtttattggcgacacactctcgcggcaggcaaaagcagcggatgtgagatctcaagtgactcactactctaacctgttgtgcgacctcctgcgcgggattgtcgccactactaaggccgcggcactccagtaccctagcccgtcagccgcgcaagatatggttgagcgcgtgaaggagttaggacactccactcagcaattcaggcgggtgcttggccaactcgcggcggcctag

SEQ ID NO: 23108 - DNA, 2667 bp, synthetic construct
  misc_feature 1..2667: note = Description of Artificial Sequence: Synthetic coding sequence
  source 1..2667: mol_type = other DNA
atgaaccacctgaacgtgctggccaaggccctgtacgacaacgtggccgagagcccggatgaactgagcttcaggaagggagatatcatgaccgtgttagagcaggatacccagggactggacggctggtggctgtgctccctccacggtagacaagggattgtccccggtaaccgcctgaagattctggtgggaatgtacgacaagaaaccagctggacctggccccgggccccccgctacccctgcgcaaccgcagccgggcctccacgctcccgcccctccagctagtcagtatacacccatgctgccaaacacatatcaaccacagcctgactcggtgtacctggtgcctacccctagcaaggcccagcaggggctgtaccaggttccaggcccgtctcctcagtttcagtcaccgcctgctaagcaaacatccactttttcaaaacagactccacaccatccattcccatccccggccactgacctttaccaggtacccccaggaccaggaggccctgctcaggacatctaccaagtgccccccagtgcaggtatgggccacgacatctatcaggttcctccaagtatggatactcggagttgggaaggaaccaagccccctgcgaaggtggtggtgcctacccgcgtcggccaaggctatgtgtacgaggcggcccagcccgagcaggatgagtatgacataccccgacacctgctggctcctggccctcaggacatctatgatgtccctcctgtgagggggctgcttccctcacagtacggccaagaagtgtatgatacacccccaatggctgttaagggccccaacggacgcgacccactcctcgaggtttacgatgttcctccttctgtcgagaagggcctgcccccttcgaatcatcacgccgtgagtaagtgtcagggaaatgccagagcaaggctgcgcctctggggcgtgtgggtgtatgatgttccgccctctgtgtctaaggatgttccggacggtccgttactgcgggaggagacctatgacgtgccgcccgcctttgccaaagcgaagcctttcgacccagcgcggaccccgctagtcttagctgcaccaccccctgattcacccccagccgaggacgtgtacgacgtcccaccccctgcccctgacctgtacgacgtgcctcctggcctgcggaggcccggccccggaacattatatgatgtgcccagggagagagtgctcccacctgaggttgcagatggaggcgtggtcgacagtggggtgtatgccgtgcccccgcccgcagagcgggaagcaccagctgaaggcaagagactgagcgccagttcaactgggtctacaagatcttcccagtccgcttcctccctggaagtagccggtcctgggagggaacctctggagctggaagtcgccgtggaagctcttgctcgcctgcagcagggcgtctccgctacagtcgcacacttactggacctcgccggctcagctggggcaaccggctcctggcggagcccctccgagcctcaggagcccttagtgcaagatctgcaagcagcagtggccgccgtgcagtctgccgtacacgagctgttggaatttgctaggtctgctgtcggtaatgctgcacatacttccgatcgggctcttcacgcaaaactgtccaggcagctccagaaaatggaagatgttcatcagacgctggttgcgcatggacaggccctagacgccggacgtgggggctccggagctacattagaagatttggacaggcttgtggcctgttcaagagctgtccccgaggatgctaagcaacttgcttcctttctgcacgggaatgcatccctgctgttccgtcgtacaaaagccaccgcccctggacccgaagggggggggacactgcacccaaaccctacagacaagacaagcagcattcagtcacggccactgccatcaccgcctaagtttacgtctcaagattcacccgacgggcagtacgagaacagcgaggggggatggatggaagactacgactatgtgcaccttcaggggaaggaagaattcgaaaaaacccaaaaggagctcctggagaaggggagtataaccaggcagggcaaatcccagctcgagctgcaacaactgaagcagtttgaacgcttggaacaggaggtgagccgccctatcgatcatgacttggcaaactggacacctgcccagccactggcccctggcaggacaggtggtctgggaccaagtgatcgacagcttctactgttctacctcgaacagtgtgaggcaaatcttacaacgctgacaaatgccgtggatgcgtttttcacggcagttgctacgaaccagccccctaagatattcgttgcacactctaagtttgtgatactaagtgcacacaaacttgtgttcataggtgataccctgtctcgccaggccaaggcagccgatgtgagatctcaggtgacgcactatagtaatcttctttgcgacctccttaggggcattgttgcaaccaccaaggccgccgcccttcagtacccaagcccttctgccgcacaggatatggtggaaagagtgaaagagctgggccattccacccagcaattccggagagttctcggtcagcttgcagctgcctag

SEQ ID NO: 23109 - DNA, 2751 bp, synthetic construct
  misc_feature 1..2751: note = Description of Artificial Sequence: Synthetic coding sequence
  source 1..2751: mol_type = other DNA
atgcccgccaagcccttcctgagcagcgtgctgctgagctggaaggtcctggacttcagcggacccggcccgcagggcacaggccaaccatgctcttgcggccattgggccgaggggcagggtggtccacccgaacctgctggcggcccaaatgtcctggcaaaagctctgtatgataatgttgccgagagcccggatgagctgtcatttagaaaaggagatatcatgacagtgctggaacaggacacccaagggctggacgggtggtggctgtgctcccttcacgggaggcaaggaattgtgcctggtaatcgactaaagatactggtggggatgtatgacaaaaaacccgccggcccaggccccggtccacccgccactccagcccagccacagcccggactgcatgcaccggcccctcctgcctcgcaatacacaccaatgctgcccaacacataccagccccaaccggattccgtttacctggttccaacaccgtccaaggcccaacagggcctgtatcaggtgccgggtccctctccacagtttcagtcaccccccgctaaacagacatctacatttagcaagcaaacaccccaccatccgttccctagccccgctacagacttatatcaagtcccccccggtccaggcggccctgcacaggatatatatcaggtgcctccaagcgctggcatgggacatgacatctaccaggtaccccctagtatggacaccagatcctgggaggggacaaaacctcctgctaaagtcgtagtgcccacccgagtcggacaggggtacgtgtatgaggctgctcagcctgagcaggacgaatacgatatccctaggcacctcctggctcctggcccccaggacatctacgacgtgccacccgtgcggggcttgctgccatcccagtatggtcaagaggtctatgatacacctcccatggctgtgaaaggccccaacggtcgagatcccctgctggaggtttacgatgttcccccttcagtcgagaagggcttgccaccttctaatcatcatgctgtgtatgacgtccctccatccgtgagtaaggatgtgccagatgggcccttgttaagagaggaaacatatgacgtaccaccagcattcgccaaggcaaagccctttgaccctgcaagaacgcctctggtcctggcagcacccccaccagattccccccccgccgaggatgtgtatgacgtgcccccaccagcaccagacttatacgacgtcccaccaggccttcgcaggcctggcccgggaacactatacgatgtcccccgggagcgagtattaccccctgaggtcgctgatggaggcgtggttgactccggagtgtatgccgtgcctccacccgccgagagggaagcccctgcggaggggaagcggctttcggcctccagtaccggatccacccgaagctcacagtccgcgagctcacttgaagttgcagggcccggtcgggagcctcttgagctcgaggtcgctgtcgaggcactagcacgcctccagcagggggtgagcgctactgtggctcatctactggatctggctgggtccgctggcgccacaggatcttggcggagtccctctgagccccaggagcctttagtacaggatcttcaggccgccgtggccgccgtacagtctgctgtgcacgaacttctggagttcgcacggagcgctgtaggcaatgccgcacatacttcagatcgcgccttgcacgcaaaattatcccggcagctgcagaaaatggaggatgtgcaccaaaccttggtggcgcacggccaggctcttgacgctggtagaggtggatccggtgctaccctcgaggaccttgaccgcctggttgcctgctcccgagctgtccctgaggatgctaagcagctggctagcttcctgcatggtaacgcttcacttctatttcgcagaacaaaggccactgcaccaggcccagagggcgggggcactctgcatcccaaccccacagacaagactagcagtattcagtcccgacctctgccctccccaccaaagtttacatcacaggacagcccagacggccagtacgaaaattcagagggtggctggatggaggactacgattacgtgcatctgcagggaaaagaggaatttgaaaaaactcagaaggagcttctggagaaaggatcaattacccgacaaggtaagagtcagttagaacttcagcagctgaagcagttcgaacggctagaacaggaagtgagccgccctatcgaccacgatctggccaattggaccccagcccagcctcttgcacctggccgtaccggtggcctgggaccatctgatagacagcttctcctgttttacctggaacaatgcgaagctaatctgactacactcacaaacgccgtcgacgcgttcttcaccgcagtagccaccaatcagcctcccaaaatcttcgtggctcactccaagtttgtaatcctgagcgctcataagcttgtctttataggagataccctgtcccgacaagccaaggccgctgacgtgaggtctcaagtcacacactatagcaatctgctctgcgatctgctgaggggtatcgtggccaccaccaaagcagctgcgttgcagtatccatctcctagtgctgctcaggacatggtcgagcgcgtgaaggagctgggacactcaacccagcagttccgaagggtcctcggccagttggccgcggcatag

SEQ ID NO: 23110 - DNA, 2667 bp, synthetic construct
  misc_feature 1..2667: note = Description of Artificial Sequence: Synthetic coding sequence
  source 1..2667: mol_type = other DNA
atgctgacccaccggccccaggaggccgagcagcggggccggaccccagggccatcattcgaatggaacgtgcttgcaaaggcgttgtacgacaatgttgccgagagtcctgatgagctgagcttccggaagggagatataatgaccgtgttggagcaggatacccaggggctcgacggctggtggctctgtagtctgcacggacgccaggggattgtaccaggaaaccgccttaaaatcctcgtagggatgtatgacaagaaacccgcgggccccgggcctggacctcccgctaccccggcccagccacaacccgggctacatgccccagctcctcccgcctcccagtacacacccatgttaccgaatacatatcagcctcagccagattctgtgtatttagttcccactccatctaaagcccagcagggtctgtatcaagttccgggcccttcacctcagtttcagtctcctccagccaaacaaacctcaacattcagcaaacagaccccccaccacccctttcctagtccggcaacagatctgtaccaagtgccgcccggtcctgggggtcccgctcaagatatctatcaggttccgcccagcgctggtatgggacatgacatataccaggtcccacctagcatggacactagatcctgggaaggcactaagccgcctgccaaagtggtggttccgacgcgggtagggcagggctatgtctacgaggctgcccagccagagcaggatgagtatgacatccccaggcacctgctggccccaggccctcaggatatttatgatgtacccccagttaggggactgcttcccagtcagtacggtcaagaggtctacgacaccccaccaatggctgtgaaggggccaaacggtcgtgacccactcctggaggtgtacgacgtgccaccaagcgtcgaaaagggtttgcctccttctaatcaccatgctgtgtatgacgtgccgccgtcagtttccaaagacgtacctgacggccctttgttaagagaggaaacctatgacgttccccctgcattcgccaaagccaagccctttgatccagctagaacacctttggtgctggctgctccacctccggactctccaccagcggaagatgtctatgacgtgcctccccccgcccccgacctgtatgacgtgccgccaggactgcgacgccccggtcccggcaccctctatgatgtgccaagagagcgcgtcctgccccccgaagttgcggacggtggggtcgtggactctggagtttatgccgttccgccccctgccgaaagagaggccccagccgagggcaaacgactgagtgctagcagcactgggtcaactcgcagctcacagagtgcttcttccctagaggtcgctggccccggccgggaaccattggagctagaggtggccgtagaagcgctggcccgtctgcagcagggggtatccgccactgtggcccacctgcttgaccttgccggatccgccggagccactggctcttggcggtctccaagtgagccccaggagccactcgtgcaagacctgcaggcggctgtcgctgccgttcagtccgccgttcacgagctcctcgaatttgcccggtccgccgtgggaaacgctgcgcatacaagcgaccgggccctgcacgctaaactgtcccgacagcttcaaaaaatggaggatgtacatcagacattagtggcccatggacaggctctggacgcaggtcggggcgggtccggtgccactctggaggatctggacaggttggtggcatgttcacgcgcagtgcctgaggatgctaaacagcttgcttctttcctccatggcaacgcttctttgctgttccgaaggaccaaagccacagctcctggacctgaggggggcggcacactgcatccaaatcccaccgacaaaacgtctagtatccagtcccgtcccctgccctctccccctaaatttacctctcaagacagccccgatggacagtacgagaactccgagggcggttggatggaggattacgactacgtacatctgcaaggtaaggaagaattcgaaaagacccagaaggagctcctcgaaaaagggagtatcacaaggcagggcaagagccagttggagctccaacagctcaagcaattcgagaggctggaacaggaagtgagcaggcccatcgatcacgacctggccaactggacccccgcacaacctcttgcgccagggcggaccggtggtttgggaccatcagaccgacagttacttcttttttatctcgagcagtgtgaggcaaatctgacaacattgacgaacgcggtagatgcgttcttcaccgctgtagctaccaatcaaccaccgaagattttcgtcgcacatagcaagtttgttattctcagcgcccacaagcttgtgttcattggagatacactatcccggcaggcgaaggccgctgacgtgaggtcccaggtcactcactactccaatctactgtgtgatctcctcaggggcattgtcgctacaacaaaagctgccgctctacagtatccgtccccatctgccgcgcaagacatggtggaacgggtgaaggagttggggcacagtacgcagcaatttagacgcgtgctggggcaattggctgcagcttag

SEQ ID NO: 23111 - DNA, 2169 bp, synthetic construct
  misc_feature 1..2169: note = Description of Artificial Sequence: Synthetic coding sequence
  source 1..2169: mol_type = other DNA
atgcagggcaagaacgtgctggccaaggccctgtacgacaacgtggcagaatcacccgacgaactcagcttccgcaaaggcgatattatgaccgtgctggagcaggatactcagggcctagatggctggtggctctgtagccttcatggccgacagggcattgtcccagggaatagactcaaaatcctggtcgtggttcccacccgtgtggggcaggggtacgtttatgaagccgcccagccagagcaggacgagtatgacattccacgccatctcctggctcccgggccacaggacatttacgacgtgcctcccgttcgcggcctcctgccgagtcagtatggccaagaagtgtacgatacacctcccatggccgtgaaaggaccgaacggaagagaccccttgctcgaggtctatgacgtaccacctagtgtcgaaaaagggctgcccccctcgaaccatcacgccgtgtatgacgtgccgccctccgtgtctaaggatgtgcctgacgggccgctactgagggaagagacctacgatgtcccaccagcctttgcaaaagcaaagccttttgatcctgccagaactcccctggtgctggcggcccccccccctgactcccctcctgcggaggatgtgtacgatgtccctccacccgcaccagatctgtatgacgtgcctcccggactcaggagaccagggccaggaacactctacgatgttcctcgagaacgggttttaccccccgaggtggcagacggcggagtcgtggactccggggtctatgccgtgccccctccagctgagagagaggcccctgctgaagggaaaagactgagtgcgtccagtacaggatcgacgcgatccagtcaaagcgcctctagcctggaagtggccggcccaggcagagagcccttggaactggaagtcgctgtggaggctctggccaggctccagcagggagtttctgctacagtggcccacctgctagacctggccggttcagctggagccaccggttcttggagaagccctagtgaaccccaggagccactggtccaagacctgcaagctgcagtggctgcggtgcaatctgccgttcatgagttattagagttcgcacggtctgccgtcggtaacgctgcccacacttccgacagagccctgcatgccaagcttagtcgccagttgcaaaaaatggaagacgtgcatcagactctggtggctcacgggcaagcactagatgccggtcgcggtgggagcggcgctacccttgaagacctggatcgcctcgtggcttgcagcagagccgtccctgaagatgctaagcaacttgctagttttctgcacggcaatgcatctctgctattcagacgaacaaaagctactgccccaggaccggaggggggcgggacactccacccaaatccaacagacaagacttcttctattcagagccgaccacttcccagcccccccaagtttacatctcaggacagccccgatggtcagtacgaaaatagtgagggcggttggatggaagattatgattacgtgcatctgcagggaaaagaggagttcgagaaaacccaaaaagagctccttgagaagggctctatcacaagacagggcaaaagtcagcttgaactgcagcaactgaagcagttcgaacggttggagcaagaggtctctcgccctattgatcacgatttagccaattggacccctgcgcaacccttggcccctggacggactggcgggctgggcccctctgatcgtcagttactgcttttctacctggagcagtgcgaggctaacttgacaaccctgactaacgcggtggacgctttctttacggcagttgcgaccaaccaaccccctaagatcttcgtcgctcatagcaagtttgtaatcttgtctgcacataaactggtcttcatcggtgatacactctcaaggcaggcaaaggccgccgatgtgcgcagccaggttacacactatagcaacctgttgtgtgatctcctcagaggcatcgtggccaccactaaagccgctgcactgcaatacccgagtccgtccgctgctcaggatatggtggaacgggttaaagagttggggcacagtacgcagcagttcagaagagtcctgggccaactcgcggccgcttag

SEQ ID NO: 23112 - DNA, 2613 bp, synthetic construct
  misc_feature 1..2613: note = Description of Artificial Sequence: Synthetic coding sequence
  source 1..2613: mol_type = other DNA
atgagcgtgcccaacgtgctggccaaggccctgtacgacaacgtggcagaatctcccgacgagctaagttttaggaagggggatatcatgacggtgctggaacaggacactcaaggactcgatggatggtggctctgttccttacacggacgacagggtattgtgccgggtaatcgtctgaagatattggtaggcatgtacgacaaaaaaccagcaggaccagggccaggaccccctgccacccctgcgcaaccgcaaccaggcttgcacgcaccggccccccccgccagccagtacactcctatgctgcccaatacctaccagccacagcccgattcagtgtacttggtaccaacacctagtaaggcgcagcaaggcctctatcaagtaccgggtccatcgccccaattccaatcaccacccgcaaagcagaccagcacatttagtaagcagacccctcatcatcccttccccagtcccgccaccgacttgtaccaggtaccaccaggccctggcggtcctgcccaggatatctatcaggtgcctcccagtgcaggaatgggccacgatatctatcaggtgcctccaagcatggatacccgaagctgggagggtaccaagccaccggccaaagtggtggtccccacgcgagtggggcaaggctatgtttacgaggcggcacagccggaacaggatgaatacgacatccccagacaccttctggctccaggacctcaggatatctacgacgtcccacccgttcgggggcttctgcccagtcagtacggccaggaagtatacgacactccacccatggccgtgaagggccccaacggacgggaccccctgctggaggtctacgatgtgcctccttcggtggaaaaagggctgccaccatctaatcatcatgcagtttacgatgtgccaccctccgtgtctaaggacgtgcctgacggccctctgttacgggaggagacctacgatgtgccaccggccttcgcaaaagctaagccatttgatccggcccgtaccccattagtgcttgctgcccccccccctgacagtccaccagcagaggatgtctacgatgtccccccacctgcccccgacctgtacgatgttccacccggcctccgacggcccgggcctggaactctctacgacgtccccagagagagggtcctgcccccagaagttgctgatggtggcgtcgtagacagcggggtgtacgctgtgccaccccctgcagagagggaggcgccagccgaaggcaaacggctctcagctagtagtactggctcaacgagaagcagccagtccgcctcttctcttgaggtcgccggtccaggccgggagcccctcgagctcgaggtcgcggtggaagccctcgctagacttcagcagggagtgagcgcgactgtggcacacttactggatctggcagggtctgcgggtgccactggttcatggcgtagccccagtgagccccaggaacctctggtccaggatcttcaggccgcagtagcggcagtgcaaagcgccgttcacgagcttctcgagttcgcccgctctgcggtcgggaacgcagcacacacctccgacagggcactgcatgcaaagctgtccagacaattgcagaaaatggaggatgttcaccagacacttgttgcccacggacaggcacttgatgcagggaggggcggatctggagcaacactggaggatttggacaggttagtggcatgctccagagcagtccctgaggacgcaaaacagttagcaagttttctgcacgggaacgctagccttcttttcagaagaacaaaagcaaccgcccccggcccagagggtggtgggacacttcatcccaaccccaccgacaaaaccagtagcattcagtcacggccacttccctccccgccgaagtttacttcacaggactctccagacgggcagtatgaaaactctgagggcgggtggatggaggactacgattacgtacacctccaggggaaggaagagtttgagaagacacagaaagagctgctggagaagggcagcatcaccaggcagggtaaatctcagttggagctacagcagctaaaacagttcgagcggctcgagcaagaggtgtcacggcccattgaccacgatctcgcaaattggacacctgcccaacccttggctccaggacgcactggcgggttggggccttccgaccgtcagttacttctcttctatctcgagcagtgtgaggccaacctaaccacgctcactaacgcagtggatgctttttttacggctgtcgcgaccaatcagccaccgaaaatctttgtggctcactccaagtttgtaatcttgtctgcacataaactggtctttatcggggacacgctttctcgccaggccaaagccgccgatgtgagaagtcaggtcactcactactctaacttactttgcgatctgctgaggggaattgtggccacgacaaaggccgcagcactgcaatacccaagtcctagtgccgcccaagacatggtggagcgagtgaaagaacttggccacagcacgcaacagttcaggcgcgtcctcggacaattagcagcggcctag

SEQ ID NO: 23113 - DNA, 2607 bp, synthetic construct
  misc_feature 1..2607: note = Description of Artificial Sequence: Synthetic coding sequence
  source 1..2607: mol_type = other DNA
atggagaacgtgctggccaaggccctgtacgacaacgtggccgagtccccagatgaattgagctttaggaaaggcgacattatgactgttctggagcaagacacacaggggcttgatgggtggtggctttgcagcttacatggtaggcagggaattgtgcccggcaaccggttgaagattttagtgggaatgtacgacaagaaaccggctggcccggggcccggcccacccgctactcctgctcagccccagcctgggttacacgcgcctgcacctccagcaagtcagtatacacccatgctccctaatacataccaaccgcaacctgacagcgtgtacctggttcctacacccagcaaagcccagcaaggtctgtatcaggtccctggaccctctcctcagttccagtctccaccagctaaacagacaagcacattctccaagcagactccccaccaccccttcccaagcccagccacagacctatatcaggtgccccctgggcccggcggacccgcccaggatatttaccaggtgcctccgtcagcgggcatgggccacgacatataccaggtgccaccttcgatggacaccaggtcctgggagggcaccaagccacctgcaaaggtggtcgtccccacacgagtcggtcaggggtatgtgtatgaagccgctcagcctgaacaggatgaatacgatattcccaggcacctgctcgcaccgggccctcaagatatctacgacgtacctccagtacgtgggctccttccaagtcagtatggacaggaagtgtatgacacacctccaatggccgttaaaggccccaatggaagagatccattactcgaggtctacgatgtgcctccctctgtggaaaaaggtttgcctccctccaatcatcatgctgtctacgatgttccaccctctgtcagtaaagacgtgccagatggtccactactgagggaagaaacatacgatgtcccccctgcatttgcaaaagcaaagccctttgacccagcccggacccctctggtgctggccgctccaccccctgactccccacccgcagaggatgtttatgacgtcccgccgcccgcaccagacctctatgacgttcctccaggcctgagacggccagggcctgggaccttgtacgacgtgcctagagagcgtgtactacctcctgaagtggcggacggcggcgtggttgactctggggtgtacgctgtgccccctcctgccgagcgggaagccccagcagaggggaagagactatccgcctcatctaccggatcaactaggtcatcgcagtcagcttccagcctggaggtcgctggacccggcagagagcccctggaactggaagtggcggtggaggccctggctcgcctgcagcagggagtgtccgccaccgtcgcccatctcctggatttggctgggtctgcaggcgcaactggctcatggcggtcaccctcggagcctcaggagccactggtgcaagacctgcaggccgctgtggctgctgtgcagtccgccgtccacgagctcctggaattcgcacgctccgcggtgggcaatgccgcccacactagcgaccgggctctgcatgctaaactatcaagacagctgcagaaaatggaggacgtgcaccagaccctcgtggctcacgggcaagcactggatgctggaagaggaggaagtggtgcaactctcgaagatttggatcgcctggtggcatgtagccgggccgtgcctgaagatgcgaagcaactcgcctcctttctgcacggcaacgcctcattgctttttcgtagaaccaaggcgaccgcccctggacccgagggcgggggtacactgcatccaaacccaaccgataaaacttcctcgattcagtcacggccccttccgtctccacctaaattcacttcccaggatagtcccgacgggcagtacgaaaacagtgagggcggatggatggaggattacgattacgttcatctccaaggcaaggaagaattcgaaaagacacagaaggaacttctggagaagggctcaatcactcggcagggaaagagccagttagagttacagcagctgaaacagtttgaacggctggaacaggaggtgtcccggccaatcgaccacgatttagccaattggacacctgcgcagcccctggcccctgggcggaccggggggttagggccctccgacagacaactcttgctattctatttagagcagtgcgaagcaaacctaacaacactgaccaatgccgtggacgcattcttcacagccgttgccacaaatcagccacccaaaatctttgtggcacactcaaagtttgttattctctctgcccacaagctggtgttcatcggggataccctctcccggcaagcaaaagctgccgacgtccggtcgcaggtgacccattatagcaaccttctttgcgacctacttcggggaatcgtggcaaccacaaaagccgccgcccttcaatacccaagcccgtccgcagcgcaggatatggtcgagagggtgaaggaactggggcatagcacacagcaattcagacgggtgctgggacaacttgccgcagcttag

SEQ ID NO: 23114 - DNA, 2526 bp, synthetic construct
  misc_feature 1..2526: note = Description of Artificial Sequence: Synthetic coding sequence
  source 1..2526: mol_type = other DNA
atgaccgtgctggagcaggacacccagggcctggacggctggtggctgtgttcccttcacggtagacaaggaattgtgccgggcaatcggttgaagattctggtgggcatgtacgataagaagcctgccggcccagggccaggacctcctgctaccccagcacagccccaacccggtctgcacgcccctgcacccccagcatcccagtacacaccaatgctgccaaacacctaccagcctcagcctgactccgtgtacctagtgcccacaccttccaaagcccagcagggattgtatcaggtgcccggcccctctccgcagtttcagtccccccctgctaagcaaacctccactttcagcaaacagacaccccatcacccattcccgtcaccagcgactgatctctaccaggtccctcctggacctggaggtccagcacaagacatttaccaagtgcctccaagtgcaggcatgggccatgacatttaccaggtacctcccagtatggataccaggagttgggaaggaaccaagccgcctgccaaggtggtggtccccaccagggtcggacagggttacgtttacgaggccgcccagccagagcaagacgaatatgacattccccgccatttattagctccgggccctcaagatatctacgatgtgccgcccgtgcggggcctccttccatcgcagtacggtcaagaggtatatgacactccacctatggccgtgaagggccccaacggccgggaccccctcctggaagtgtacgatgttccaccatctgtggaaaaggggctgccaccatccaatcaccacgccgtgtacgatgtgccaccgtctgtatccaaagacgtgccggatggtcctttgttaagggaagagacatacgacgtccccccagcttttgctaaggcaaaaccatttgacccggcccgtacgcccctggtacttgctgcccccccccctgactctcccccagccgaggacgtgtacgatgtgcctcctccagcgcccgacctgtatgatgtgccccccggccttcgcagacctggacccggaacactctacgacgtcccacgagagagagttttgcccccggaggtcgctgacggaggggttgtggattcaggcgtctatgccgtgcccccccccgccgaacgtgaggcccctgcagagggtaaaaggctctcagcatcaagcactggtagtaccagatcctcccagagtgctagcagtctagaggtggccggccccggccgtgagcctctagagctggaggtggccgtggaagctctcgcccgcctgcagcagggcgtcagtgccaccgtcgctcacctgcttgacctcgccggctcagctggagccactgggtcttggcgatctccttctgaaccccaggagcctttggtgcaagacctgcaggctgcggtggcagcagtacagtctgccgtgcacgaactcctggagtttgcacgtagcgcagtgggaaatgctgcgcatacatctgatagggcgctgcatgcgaagctcagtaggcagttgcagaagatggaggacgtccatcagaccctggtcgcgcatggtcaggcgctcgacgccgggcggggaggaagtggggctactctggaggacctggatcggctggtagcctgcagccgtgctgtccccgaagatgctaaacagctggcttcattcctccatggcaacgcctcccttctgttccgccggaccaaagctacagcgcctggccccgaagggggaggcactctgcaccccaatcccactgacaagaccagctctatccagagtcgcccactcccatcaccacctaaattcacgtcccaagactctcccgacggacagtatgaaaactctgagggcggctggatggaggattatgactacgtacacctccaggggaaggaggagttcgaaaaaacgcagaaggagctgctggagaaagggtccatcacaagacagggtaagtctcagctggagttgcagcaattaaaacaatttgaacgtctggagcaggaagtgagccggcccattgaccacgatctggctaattggaccccggcgcagccactcgctccaggaaggactggcggccttggtcctagtgaccgacaactcctccttttctacctcgagcagtgcgaagctaacctaactacactcacaaacgccgtcgatgctttcttcacagccgtggctactaatcagccccccaaaatattcgtcgcacattctaagtttgtcatcttgtccgcccataagctggtttttatcggggacacgctgagccggcaagctaaggccgcagacgtacggtcgcaggttacacactatagtaatctgttgtgtgacctgctcagaggcatcgtggccacaactaaagcagccgctcttcaatacccttctccaagcgctgctcaagatatggtggaaagagtcaaagaattaggccattccactcagcaatttcggcgcgtgctgggacagctcgccgccgcctag

SEQ ID NO: 23115 - DNA, 741 bp, synthetic construct
  misc_feature 1..741: note = Description of Artificial Sequence: Synthetic coding sequence
  source 1..741: mol_type = other DNA
atgcccgtgcagccccccagcaaggacaccgaggagatggaggccgaaggcgacagtgccgccgagatgaacggagaagaagaggagagtgaagaagaacgttcagggtcacagacagaatcggaagaggaatccagcgaaatggatgacgaggactatgaacgcaggcggtcagaatgcgttagtgagatgctggatttagaaaaacagttctccgaactgaaggagaaactctttcgagagcgcctgagccaactgcgactgaggctcgaagaagtgggggccgaacgggccccagaatacacggagccccttggaggacttcagcggagtctgaaaattagaatacaggtcgctggtatctataaagggttttgccttgatgtcatccgaaacaaatatgagtgcgaactgcaaggcgcaaaacaacacctggaatccgaaaaactgctgctctacgataccttacaaggggaactacaggagcggattcaaaggctggaggaagaccgccagagtctagatctatcatcggaatggtgggatgataaactacacgcccggggatcttctcggagctgggatagcctgccacctagcaagcgaaaaaaggcccccctggtgtcaggaccttacatcgtatatatgctgcaggaaattgacatactggaagattggaccgccatcaagaaggccagggctgccgtttccccacaaaaaaggaaaagcgacggcccctag

SEQ ID NO: 23116 - DNA, 873 bp, synthetic construct
  misc_feature 1..873: note = Description of Artificial Sequence: Synthetic coding sequence
  source 1..873: mol_type = other DNA
atgcccgtgcagccccccagcaaggacaccgaggagatggaggccgaaggagactccgccgcggaaatgaatggggaagaagaagagtctgaggaagagcgcagcggtagccaaaccgaatctgaggaggagtcatccgagatggacgacgaggattacgagcggaggcggagtgaatgcgtgtctgaaatgcttgacctggagaagcaattctctgagcttaaggagaagctgttccgcgagcggcttagccaactcagactgcggctcgaagaggtgggggccgagagggctccagagtacacagaaccactaggcggattgcagcgtagcctgaagatccgaattcaggtcgctggtatatacaaaggattctgtctggatgtgattcggaacaaatatgagtgcgaactccagggagccaagcagcaccttgaatcagagaagttgctgctgtatgacactctgcaaggcgagttacaggagcgcattcagcggttagaggaggaccgacagtcactcgatcttagcagtgagtggtgggacgataagctgcacgcgcggggcagtagccgaagttgggatagccttccaccttctaaacgaaagaaagcacctttggtctccggaccttacatcgtgtacatgctgcaagagattgacattctagaagactggacagctattaagaaggctcgggccgccgttagcccccagaagcgcaaatccgacgatcgaaggacacatcgccctttgcgggtttgccctgctcgactgctttggtgttgctgggctctacccttgcacctggctctcgcatggaccccccccctgccttcgagcagacccgcacagctgtggccttggtcttag

SEQ ID NO: 23117 - DNA, 735 bp, synthetic construct
  misc_feature 1..735: note = Description of Artificial Sequence: Synthetic coding sequence
  source 1..735: mol_type = other DNA
atgcccgtgcagccccccagcaaggacaccgaggagatggaggccgagggcgactctgctgccgagatgaatggtgaagaggaggagagtgaggaggaaagatccggatcccagacggagtcagaggaggaatcatctgagatggatgatgaagactacgagagaagaaggtcagagtgcgtgtctgagatgctagaccttgaaaagcagttcagtgaactcaaagagaagttgtttagagagcggttgagccagctgcggcttagactcgaggaggtcggggccgaacgagctcccgagtataccgagccccttggggggcttcaacggtctctaaaaatccgcatacaggttgccgggatctacaagggcttctgcttggacgtcatcaggaataagtatgagtgtgagctgcagggcgctaaacagcacctggaatcagagaaactgctgctttatgatactctgcagggggaattgcaggagcggatccagcggctcgaagaggaccgccaatcactagatctcagttcagaatggtgggacgacaagctgcacgctcgaggcagttccaggtcctgggattctctaccaccgtctaaacgaaagaaggctcccctggtcagtggcccttacatcgtgtatatgctgcaagaaattgacatcctcgaggactggacagctattaaaaaagctcgggcagctgtaagccctcagaagcggaaatctgattag

SEQ ID NO: 23118 - DNA, 1494 bp, synthetic construct
  misc_feature 1..1494: note = Description of Artificial Sequence: Synthetic coding sequence
  source 1..1494: mol_type = other DNA
atggccgagatgggcagcaagggcgtgaccgccggcaagatcgcctctaatgtgcagaaaaagctgacacgtgctcaggagaaagtcctccaaaaactgggaaaagccgacgagacgaaagatgagcaattcgagcaatgtgttcagaacttcaataaacagctgaccgagggcacccgccttcaaaaagatcttaggacctaccttgcatctgtgaaagccatgcatgaagcgtcaaagaagttgaatgaatgtcttcaggaagtttacgaacccgactggccagggagggacgaggcaaacaaaatcgccgaaaacaacgacttgttgtggatggattatcatcagaagctcgtcgaccaggcattactgacaatggatacatatcttggtcagtttcctgacatcaagtcaagaatcgccaagcgcggccggaagctcgtcgattatgattctgcacgacatcactacgaaagccttcagactgctaagaagaaggacgaggccaagatcgcaaaggccgaggaggaactgatcaaggcccagaaggtgtttgaggagatgaacgtggacctgcaagaggaactcccttctctctggaactcacgggtaggattttatgtgaacacatttcagagtattgctggcctggaagagaactttcacaaggagatgagcaaacttaaccagaatctcaatgacgtgttagtgggcttagagaagcagcatggctctaataccttcaccgtcaaggcgcagccgcgtaagaagagcaaactctttagccgcctccgaagaaagaagaactccgacaacgctccagctaaaggaaacaagtccccttcccctccagatggaagcccggccgcgactccagagatccgtgtgaaccacgaaccagagcctgcgggaggtgccacacctggagctactctcccgaaaagtcccagtcagctgagaaaagggccccccgttcctcctccaccaaaacatactccaagcaaggaggtcaaacaggagcagatcctgtcactgtttgaggacactttcgtacctgagatctcagttacaacgccaagccaaccggctgaagccagtgaggtggcaggaggcacacaaccagcggctggggcccaggaacccggagaaactgcagcaagtgaagccgcctccagctctcttccagcggttgtggtcgagaccttccccgccactgtgaatggtaccgttgagggcggatccggggctggaagacttgatctcccaccgggattcatgttcaaggttcaggcgcagcacgattataccgccactgataccgatgagcttcagctgaaggcgggcgatgtcgtgttggttattcccttccaaaacccagaggaacaggatgaaggctggctgatgggcgtcaaagagagtgactggaatcagcacaaggagcttgaaaagtgccgcggtgtgtttccggaaaatttcaccgagagggtgccatag

SEQ ID NO: 23119 - DNA, 1782 bp, synthetic construct
  misc_feature 1..1782: note = Description of Artificial Sequence: Synthetic coding sequence
  source 1..1782: mol_type = other DNA
atggccgagatgggcagcaagggcgtgaccgccggcaagatcgccagcaacgtgcagaaaaagctgaccagggcgcaggagaaagtactgcagaagctcggtaaggcagacgagacaaaagatgaacagttcgagcagtgcgttcagaacttcaataaacagctcaccgaaggcactcgcctacagaaagatctgcggacctatctcgcgagcgtaaaagctatgcacgaggcctctaagaagcttaacgaatgcctccaggaggtatacgaaccagactggcccggtcgcgacgaggctaataagattgcggaaaataatgatttactatggatggactaccaccagaagctcgtcgaccaggcactactcacaatggatacttatctgggacaatttcctgacataaagtctagaatcgctaagcggggacgcaagttggtggactacgatagtgcaagacatcactacgaatccctacagactgccaagaagaaagacgaggccaagatcgctaagcctgtgtccctcctggagaaagcggctccacagtggtgtcagggcaagcttcaagctcacctcgtcgctcagactaatctcctcagaaatcaagcagaggaagaactcattaaagcccagaaggttttcgaggaaatgaatgtggaccttcaggaagaactgccttctctgtggaatagtagggtcggcttctacgtgaatacattccagagcatcgctggcctcgaggaaaatttccacaaagagatgagcaaactcaaccaaaacctcaacgacgtgctggtcggcctggaaaagcagcacggatccaataccttcacggtgaaagctcagccatcagataatgcccctgctaagggtaacaagagtcccagtcccccagacggttctcctgctgctactcctgagatcagggtgaatcatgagcccgagccagctgggggggcaactcctggggccactttgcccaaatctccttcgcagctcaggaaggggcccccagtgcctcccccgccaaagcacaccccgtctaaggaggttaaacaggaacaaattttgtcgttattcgaggataccttcgtgccagagatctccgtgacgactccaagccagttcgaagctcccgggccattcagcgagcaggcatctcttctggacctggacttcgaccctctaccccccgttaccagtccagtaaaggcccctacgccctcgggtcagtctattccctgggacttgtgggaacccaccgaatctccagctggttcccttccttcaggagagcccagcgcagccgagggtactttcgctgtgtcttggccaagccagactgcagagccaggcccagcacagcctgcagaagcttccgaagtggcgggtgggactcagcctgctgctggcgcccaggagccaggtgagaccgcagcatcagaagcagcttcctcatctctgcctgccgtggtggtcgagactttccctgcaacagtgaacggaacagtggaaggaggctcgggagcaggcaggctggatctgccacccgggttcatgttcaaggtccaggctcagcacgactatacggctacagatactgacgagctgcagctcaaagctggggacgtagttctcgtgatcccctttcagaaccccgaggagcaagacgaggggtggcttatgggggttaaggaatcggactggaaccagcataaagagcttgagaagtgtcggggggtgttccccgaaaacttcacagagcgagtgccctag

SEQ ID NO: 23120 - DNA, 1557 bp, synthetic construct
  misc_feature 1..1557: note = Description of Artificial Sequence: Synthetic coding sequence
  source 1..1557: mol_type = other DNA
atggccgagatgggcagcaagggcgtgaccgccggcaagatcgccagcaacgtacagaaaaaactaacccgcgcccaggagaaggtgctgcaaaagctcggcaaggctgatgagacaaaagatgaacaattcgaacaatgcgtccagaatttcaacaaacagctgactgaggggaccaggctgcagaaagacctcaggacgtatctggcaagtgtgaaagctatgcatgaggcttccaaaaagcttaatgaatgtttgcaggaagtctacgaacctgattggccgggccgcgatgaagccaataagatcgcagaaaacaatgacttgctgtggatggactatcatcaaaagctcgtggaccaggctctgttgactatggatacctatctggggcaatttcctgatatcaagtctaggattgcgaagcgggggaggaaactagtggactacgacagcgccaggcaccattacgagagccttcagactgcaaaaaaaaaagatgaggcaaagatcgctaaagctgaggaggagctaattaaagctcagaaagtcttcgaggaaatgaacgtggatttacaggaggaattgccctccttatggaacagcagggtggggttctacgtgaacacgtttcagtcaatcgctgggctggaggagaactttcataaggagatgtcaaaactgaatcagaatttgaatgacgtgctagttggattggagaaacagcacgggagcaacacctttacggttaaggcgcagccttctgacaatgcccccgctaaagggaataagtctcccagtcccccggacggctctcccgctgctaccccagaaattagagtgaaccacgaaccagaacccgccgggggggccaccccaggggctaccctgcccaaaagtccctctcagctgagaaagggacctcccgtacctcctcctcctaagcacactccctctaaggaagtgaagcaggagcagattcttagcctgttcgaagacacattcgtgcccgagatttcggttaccaccccatcccagccaaccgagagccccgctggcagcctgccgtcaggagaaccaagcgccgccgagggaacatttgcagtctcatggccctctcagaccgcggaaccagggccggcgcagcccgccgaagctagcgaggttgcaggggggacccaaccggctgcaggagcccaggagcccggcgagaccgccgctagtgaagccgcttccagctcgttgccagccgtcgtggttgaaacattccctgccactgtgaacggaacagtggaaggcggctctggcgccggaaggttagacctgccaccaggcttcatgtttaaggtgcaggcacagcatgactataccgcaactgacaccgacgagttgcagctgaaggcaggggacgtggtcctagtaattccattccagaaccctgaggagcaagatgagggttggttgatgggcgtgaaggagagcgattggaaccagcataaggagctggaaaaatgtaggggcgtctttcctgagaatttcactgaaagggtgccgtag

SEQ ID NO: 23121 - DNA, 1230 bp, synthetic construct
  misc_feature 1..1230: note = Description of Artificial Sequence: Synthetic coding sequence
  source 1..1230: mol_type = other DNA
atggccgagatgggcagcaagggcgtgaccgccggcaagatcgcctcaaatgtgcagaaaaagctgactcgggcccaggaaaaggtgttgcaaaaactgggcaaggccgacgagactaaggacgagcagttcgaacagtgtgtacagaacttcaataaacagctgactgagggcactcgcttgcaaaaagatctcaggacgtatctcgcgtccgtgaaagctatgcacgaggccagtaagaagctgaatgaatgcctccaggaagtttatgaacccgattggccgggcagagatgaagctaataagattgcggaaaacaacgacctcctttggatggactaccaccagaaactggtggaccaggccctgttgacgatggatacgtatctaggacagtttcccgacatcaaatcccgaattgccaaacgcggtaggaaactagtggattatgacagtgctagacaccactacgaatccctgcagactgccaagaagaaagacgaggccaaaatcgcaaaggcggaggaagaattaattaaagctcaaaaggtgtttgaggagatgaacgttgatctccaggaagagctgccctcgctctggaactcacgagtgggattctatgttaatactttccagagcattgccggtctggaggaaaacttccacaaagagatgtctaaacttaatcagaacctgaacgacgtgctcgtaggactggaaaagcaacatggcagtaacacctttactgtaaaggcacagcccagtgacaacgctcccgcaaagggaaacaaatctccaagcccacctgacggaagtccagctgctacccccgaaattagggtgaaccatgaacccgaacccgcaggcggggccactcccggagcaaccctgccaaaatcaccatctcagagcagtctgccagcagtcgtcgttgaaacctttcctgccactgtgaacggtactgtcgagggcggaagtggcgcaggcagactggatttaccacccggatttatgtttaaggttcaggcccagcacgattacaccgcaaccgatacggatgaactgcagctgaaagcaggagacgtggtgttggtcatccctttccagaatcctgaggagcaggacgaaggatggctcatgggagtgaaggagagcgactggaaccagcataaagagcttgagaagtgcaggggtgtgttccctgaaaatttcacagagcgagtgccttag

SEQ ID NO: 23122 - DNA, 1521 bp, synthetic construct
  misc_feature 1..1521: note = Description of Artificial Sequence: Synthetic coding sequence
  source 1..1521: mol_type = other DNA
atggccgagatgggcagcaagggcgtgaccgccggcaagatcgcctccaatgtccagaagaagcttacacgggcccaggagaaggtgttacagaaactgggcaaggccgacgaaactaaagacgaacagttcgaacagtgtgtccagaattttaacaagcaactgactgagggtacaagattgcaaaaagacctgagaacctacctggccagcgtcaaagccatgcacgaagcctcaaagaagcttaatgaatgtttacaggaggtttatgagccagattggccaggcagggacgaggcaaataagatagcagagaataacgatctattgtggatggattatcatcagaagttggtcgaccaggccctgctcactatggatacttatctgggccagttcccggatattaaatcccggatcgccaagaggggaagaaagctggtggattacgattcagctaggcaccactatgagtctctgcagaccgctaagaagaaggacgaggccaaaatcgccaagcccgtgtccctcctcgagaaggctgcaccacaatggtgccaaggcaaattgcaggcccacttggtggctcaaacaaacttactccggaaccaggcagaagaagagttgatcaaggcacagaaggtgttcgaagagatgaatgtggatctgcaagaagagctacccagtctttggaactccagggtcggcttctatgtcaatacgttccagtctatcgccggactggaggaaaacttccacaaggaaatgtccaaactcaaccagaatctgaacgacgtgctggtcggtctggaaaagcagcatggttctaatacctttactgttaaggctcagcccagtgataatgctcccgccaaaggcaacaagagcccttcaccgccggacgggtctcccgcagctacacccgagattcgcgtaaaccatgagccagagccagctggtggggctacacccggggcgactcttcctaagtcccccagccaacctaccgagtcccccgccggtagtttgcccagcggggagccaagcgcggctgaaggtacctttgctgtgagttggcccagccaaactgccgagcccggaccggctcaaccagcggaggccagcgaggttgccgggggcactcagccggccgcgggagctcaagagcctggtgagacggcagctagcgaagcggctagcagcagcttgcccgccgttgtggttgaaacttttcctgcaaccgtgaacgggaccgtagagggtggttctggcgctggaagactggatctgcctcccggctttatgtttaaggtgcaggctcaacatgattatacagccacggataccgatgagttgcagcttaaagccggtgacgttgttctcgttatcccatttcagaatccagaagagcaagacgaaggatggctgatgggagtgaaggagtccgactggaaccagcataaggaattagagaagtgccgaggtgtgttccccgaaaacttcacggagagagtcccttag

SEQ ID NO: 23123 - DNA, 1365 bp, synthetic construct
  misc_feature 1..1365: note = Description of Artificial Sequence: Synthetic coding sequence
  source 1..1365: mol_type = other DNA
atggccgagatgggcagcaagggcgtgaccgccggcaagatcgcctctaacgttcagaaaaagttgactcgggcccaggaaaaggttctgcagaagctagggaaagctgacgagacgaaggatgagcaatttgagcaatgcgtgcaaaattttaataaacagttgaccgaagggacccggctccagaaagatctcaggacctaccttgcttcagtaaaggctatgcacgaggcgtccaaaaagctgaacgagtgcctgcaagaagtatatgaacccgactggcccggacgagatgaggccaataaaattgctgagaataacgatttgttatggatggattaccatcagaagttagtcgatcaggcactcctcacgatggacacgtacctgggccaatttcccgacatcaagagcaggatcgccaagaggggaagaaaactcgtggactacgactccgctaggcatcattatgagagcctgcagactgccaaaaaaaaggatgaggcaaagatcgctaaagcggaagaggagcttataaaagcgcaaaaggtgtttgaggagatgaacgtggacttgcaggaggagctcccgtctctgtggaattcaagagtagggttctacgtcaacacttttcagagcattgctggcctggaggaaaactttcataaagagatgagtaagctgaatcagaatcttaacgatgtgctggtggggctggagaaacagcacgggtccaacacattcaccgtgaaggcccaaccgcgtaagaagagtaagctgttttccaggcttcgaaggaagaagaactcagacaatgcacctgcaaagggcaacaagagcccgagcccaccggatggaagccctgcggccacgcccgagattcgggttaatcatgaaccagaaccagccggtggcgcaaccccgggcgccaccctgccgaaaagcccttcacaaccagcagaggcctctgaagtcgcaggggggacacagcccgcggcaggtgcccaagagccaggagaaacagccgctagcgaagcagcctcatcttctctaccagccgttgtggtggaaacttttcccgcaactgtgaatggtacagttgaagggggctcaggagcaggccgcctggatctgccccccgggttcatgttcaaggtgcaggctcaacacgattatacggccactgacacagatgaacttcagctcaaggctggtgatgttgttctagtgattccttttcaaaatcctgaagagcaggacgaaggttggctaatgggggtgaaggagtccgactggaatcagcataaggaactggaaaaatgccgtggggtatttcccgagaattttacagaaagagtgccgtag

SEQ ID NO: 23124 - DNA, 1653 bp, synthetic construct
  misc_feature 1..1653: note = Description of Artificial Sequence: Synthetic coding sequence
  source 1..1653: mol_type = other DNA
atggccgagatgggcagcaagggcgtgaccgccggcaagatcgcctccaacgtgcaaaaaaagctgactcgcgcacaagaaaaagtcctgcaaaaactgggaaaagcggatgagacaaaggacgagcagtttgaacagtgtgtgcaaaattttaataagcagctgactgagggcacgagactccagaaggatttgagaacgtatcttgccagcgtcaaagcaatgcacgaagcttcgaaaaagctgaacgagtgcctccaggaggtgtacgagcccgactggcccgggcgggatgaggcaaacaagattgccgagaataatgacctgttgtggatggactatcaccaaaaactcgtcgaccaagctctgctgacaatggacacctacctggggcaattcccggatatcaagtctaggatcgctaagcggggacgcaagttagtagattacgacagcgcccgtcaccactacgaatctcttcagacagccaagaagaaggacgaagccaagattgccaagccggtgagcttgctggaaaaggcagcgcctcagtggtgtcagggcaagctccaagcacacctcgtagcacagaccaacctgttgagaaatcaggctgaggaagaactgattaaggcccagaaagtatttgaagagatgaatgtggatcttcaggaggagttaccatctttgtggaacagccgggtgggattctacgtcaacacctttcagtcgatcgcgggacttgaggagaacttccacaaggagatgagcaaactcaaccagaacttgaacgatgtgctcgtgggtctagagaagcagcatgggagtaatacattcaccgtcaaggctcagcccagcgacaacgctccagctaaaggcaacaaaagcccctctccccccgatggttccccagcagccacacccgagattcgcgtgaaccatgagcccgagcctgctggcggagccaccccgggcgccactctgcccaagagtccctctcagttcgaagctccaggcccattctccgagcaagctagcctcttagatctagattttgacccattgccccctgtgacaagccccgtgaaagctccaacgccttcgggtcagtccattccctgggatctgtgggagcctacagaaagtcccgccgggtctctcccctccggcgaaccctccgcagcagaaggaactttcgctgttagctggcccagccagacggccgagccgggtccagctcaacccgccgaggctagtgaggttgcgggcggaacacaacccgccgcaggcgcgcaggagccgggcgaaacagccgccagtgaagcagcatcatcttctctacctgctgtggtggtcgagactttccccgcaacagttaacggcactgtagagggaggttccggagccggccggctcgacctgcccccagggtttatgtttaaagtccaggctcagcacgattatactgctacagatactgatgaactgcaactcaaggcgggggacgtagtccttgttataccctttcagaaccccgaggagcaggatgagggatggctgatgggagtgaaagaaagtgactggaatcagcataaggagctggaaaaatgtcggggtgtgttccctgagaactttaccgagagagttccatag

SEQ ID NO: 23125 - DNA, 1449 bp, synthetic construct
  misc_feature 1..1449: note = Description of Artificial Sequence: Synthetic coding sequence
  source 1..1449: mol_type = other DNA
atggccgagatgggcagcaagggcgtgaccgccggcaagatcgccagcaacgtgcagaaaaagctgacccgcgcccaggagaaggtcctgcagaagctcggaaaagcagatgaaactaaggacgagcaatttgaacagtgtgtgcagaatttcaacaaacagttaacagaaggaacaaggctccagaaggacctgcgtacctatttggctagtgtgaaggccatgcatgaggcctccaagaagctaaacgagtgcctgcaggaggtctacgaacctgattggcctggccgcgacgaggccaacaaaatcgccgagaataatgacttactgtggatggattatcatcaaaagctggtggaccaggcacttctgacaatggacacgtatttaggccagtttcctgacattaagagccgcattgcaaagcgggggaggaaactggtggactatgactcagctcgccaccattatgagtccctacaaaccgccaaaaagaaggacgaggctaagattgccaaagcggaagaggagctgatcaaagcccagaaagtattcgaagagatgaacgtagatttacaggaagaacttcctagtttgtggaacagtcgcgtgggcttctatgtcaacactttccagtccatagctggactggaggagaatttccacaaggagatgagcaaactgaaccagaatctgaacgacgtgctggtcggcctcgaaaagcagcacggctcgaacacgtttacagtcaaggcacagccgagcgacaacgctcctgctaagggtaataaaagcccctccccccccgacggatcaccggccgccacccccgaaataagagttaatcacgagccagagcctgctgggggggctactccaggcgccactctcccgaagtcccccagtcaattacgcaaggggccccctgtccctcctcccccaaaacacactccaagcaaggaggtcaagcaggaacagatcctttccttgtttgaggacacgtttgtccccgagatctctgtcacaacaccttcccaaccggccgaagcctcggaagtggcaggaggaacccagccggctgccggcgcacaagagcctggagagacggcagcctcggaagcagcgagcagtagtctgccagcagtggttgttgagacttttccggcaaccgttaacggaacagtagaggggggtagcggcgcaggacggttagatctccctccaggcttcatgttcaaagtccaggcacagcacgactataccgctaccgacaccgacgaacttcagctgaaggcaggggacgtggtgctggtcatccctttccagaacccagaagaacaggacgaggggtggctaatgggcgtgaaggaaagcgattggaaccagcacaaggagctggagaagtgccgaggagtgttcccagagaactttacggagagggtgccttag

SEQ ID NO: 23126 - DNA, 1428 bp, synthetic construct
  misc_feature 1..1428: note = Description of Artificial Sequence: Synthetic coding sequence
  source 1..1428: mol_type = other DNA
atggccgagatgggcagcaagggcgtgaccgccggcaagatcgcctccaatgttcagaagaaactgactcgggctcaggagaaagttttgcaaaagttaggaaaggccgatgaaaccaaagacgagcaatttgaacagtgtgtgcagaattttaataagcagctgacagaagggaccaggcttcagaaagacttgcgaacctacctcgcatcggttaaagcaatgcacgaggcttctaagaaattaaatgaatgcctacaggaggtttacgagcctgattggcccggccgggatgaggccaataagatcgctgagaacaacgatcttctttggatggactaccaccagaaactggtcgaccaagcccttttgacaatggacacatacctgggacaatttcccgacatcaaaagtcgtatcgcaaagcgaggccggaagctcgtcgactacgatagtgctcgtcaccattacgagtctcttcaaaccgctaagaagaaagatgaagctaagattgccaaagccgaagaggagttgataaaggcccagaaggtcttcgaggagatgaatgtggacctgcaggaagagctcccatctctatggaactcaagagtcggtttttatgtgaacacatttcagagcattgccgggctggaagagaactttcataaggagatgtcaaaactgaatcaaaatctcaatgacgtgctggtgggcctagagaaacagcacggttcgaatacttttaccgtgaaggcacaaccttctgataatgccccagctaaaggaaataagtctccttctcctccagacggtagcccggccgccacccctgagatccgtgtgaaccatgaacccgagcccgcggggggcgctacccctggggccactctccctaaatccccttcccagccaaccgagagccctgccggtagtcttcctagcggcgaaccaagtgcggccgagggaacatttgctgtgtcttggccttcccagacagcagagcctggccctgcccagcctgccgaagcttctgaagtggcgggcggaacccagcctgctgctggcgcccaggagcctggcgaaactgccgcaagtgaagcagcctccagttcactgccagcagtggtggtggaaaccttccccgccacggtgaatggaactgttgagggaggtagtggagctggaagactggatctccctccaggattcatgtttaaagtgcaagcacaacacgactacactgccactgacacagatgagctccagctgaaggctggcgacgtcgtgctggtgatcccctttcagaatcccgaagagcaagacgaaggatggttgatgggagttaaagaatccgactggaatcagcataaggagcttgagaaatgcagaggggtattccccgagaattttaccgagcgggttccgtag

SEQ ID NO: 23127 - DNA, 1320 bp, synthetic construct
  misc_feature 1..1320: note = Description of Artificial Sequence: Synthetic coding sequence
  source 1..1320: mol_type = other DNA
atggccgagatgggcagcaagggcgtgaccgccggcaagatcgccagtaatgtgcagaaaaagctcactagggcgcaggagaaggtcctacaaaagctaggtaaggccgatgaaaccaaagacgagcaattcgaacagtgcgtacagaattttaataagcagttgacagagggcacccggctccagaaggacctgaggacctacctggcctctgtcaaggccatgcatgaggcttccaagaaattaaatgaatgcctccaagaggtgtatgagcccgactggccaggcagagatgaggcaaataaaatcgcagaaaataacgacctcctctggatggattatcatcagaagctggtcgaccaggcactacttacaatggacacatatcttggacaatttccagatatcaagagccgcatcgccaagagaggacgcaagcttgtcgactacgacagcgctcgtcaccattacgaatctctacaaacagccaagaaaaaggatgaagccaagatagccaaagctgaggaggaactcattaaggcacagaaggtgtttgaggagatgaacgttgaccttcaggaagaactgccgtctctatggaactctcgggtggggttctacgtcaacaccttccaatccatcgctggccttgaagaaaattttcataaggagatgtcaaaactgaatcagaacctgaacgacgtgctggtcgggttagagaagcagcatggatctaacaccttcacggtcaaagctcagcccagtgataacgctcccgctaagggtaacaagtccccgtctccccccgatgggtcacccgctgcgactcccgagattcgggtcaatcacgaaccagaacccgcaggtggtgccacaccaggggccacactgcccaaatcaccttctcagcctgcagaggcctccgaagttgccggtggaacacagcccgctgccggagcccaggagccaggcgagaccgcggcctctgaggccgccagtagctccctccctgctgttgtcgtggaaacatttcccgctactgtcaatggtaccgtagaaggcggctcgggggccgggcgactagatcttccccctggatttatgttcaaggttcaggcccagcacgactatactgctacggataccgacgaactgcagcttaaggccggtgatgtggtcctcgtgattccatttcaaaatcccgaggaacaggatgaagggtggttgatgggtgtcaaggagagtgactggaatcagcataaggagctcgagaaatgtcgcggcgtctttccagaaaattttaccgagcgagtgccttag

SEQ ID NO: 23128 - DNA, 1956 bp, synthetic construct
  misc_feature 1..1956: note = Description of Artificial Sequence: Synthetic coding sequence
  source 1..1956: mol_type = other DNA
atgggcaagaagcacaagaagcacaagagcgacaagcacctgtacgaagaatacgttgagaaacctctgaaactggtgctgaaagtcggcggcaatgaggtcacggagttgagcactgggtccagcgggcacgacagcagccttttcgaggataagaacgaccatgataaacataaggaccgtaagagaaaaaagagaaagaaaggagaaaaacagataccaggtgaggaaaagggtagaaaacggcgtcgtgtgaaagaagataagaagaagagagatcgggatcgggtggagaatgaggcggagaaggacctgcagtgtcacgcacctgtgaggttggacctgccccccgagaaacctcttaccagctcactagccaagcaggaagaagtggaacaaacccccctgcaagaggcccttaatcagttgatgcgtcagctgcagagaaaggatccctctgcctttttctcctttccagtcacagacttcatagcgccgggatattctatgataataaaacaccccatggattttagtacaatgaaagaaaagattaagaataatgactatcagtctattgaggaactcaaagacaactttaagctaatgtgtactaatgccatgatatataataagcctgaaacaatttactacaaggccgcaaaaaagcttctgcatagcgggatgaaaatcctgtctcaggagagaatccagagtctgaagcagtctatagactttatggccgatctgcaaaagaccagaaagcagaaagacggaactgatactagccagagcggggaagatggagggtgctggcagagggaacgcgaagactccggagatgctgaggctcacgcctttaaaagtccctcaaaggaaaataaaaaaaaagataaggatatgctcgaagacaaatttaaatcaaataacctggaacgtgagcaggaacagcttgacaggattgtgaaagagagtggaggcaagctcactaggaggttggttaatagccaatgcgagttcgagaggagaaagccagacgggacaaccaccctcgggttgctccatccagttgacccaatcgtaggcgagccgggttactgtcctgtcagactgggcatgacaaccggaagactgcagtcaggggtgaacactcttcaggggtttaaggaggataaaaggaataaggtcacacccgtcctctatctgaattatggcccttactccagttacgctccccactatgactcgacctttgcaaacatttctaaggacgatagcgacttgatatatagtacgtacggcgaggactcagacctcccttctgacttttctatccacgagtttctcgcgacttgccaggactacccgtatgtcatggcggacagcctcttagacgtgctgacaaaaggtggacattcaagaacccttcaggagatggagatgagtctgcctgaggacgagggccatacaagaaccctcgataccgctaaagagatggaaataaccgaggtggagccacctgggaggctggactctagcacccaggatcggctgatcgctctaaaggctgtgactaattttggagtgccagtagaagtgttcgacagtgaagaggccgagatattccagaaaaagctcgacgaaaccacccggctgctgagagaacttcaggaagctcaaaatgaacgactgtctactaggcccccacccaatatgatctgcctgctgggcccttcctaccgcgagatgcacctggctgagcaagtcacgaataatctgaaggaactggctcagcaggtgacgccaggggatattgtatccacgtatggagttcgaaaagccatgggaattagtatcccgagccccgttatggagaacaactttgtcgacttaaccgaggacacagaagaacccaagaagacagacgttgcggagtgcggtcccggaggatcgtag

SEQ ID NO: 23129 - DNA, 1959 bp, synthetic construct
  misc_feature 1..1959: note = Description of Artificial Sequence: Synthetic coding sequence
  source 1..1959: mol_type = other DNA
atgggcaagaagcacaagaagcacaagagcgacaagcacctgtacgaggagtatgttgagaaaccactaaagttagtcctgaaagtgggcgggaacgaagttactgagttatcaacaggcagctccggccatgattcatcactttttgaggataaaaacgaccacgacaaacataaagatcggaaacgaaagaaaaggaagaaaggggagaaacagattcctggtgaagaaaaaggcaggaagaggcgaagggtgaaggaggacaagaagaagcgcgatcgagaccgcgtagagaatgaagctgaaaaggatcttcaatgccatgcccccgtccggctggatttgccgcccgaaaagcccttaacaagctcactggctaagcaagaggaggtagaacagacgccactccaggaggcccttaaccagctcatgagacagctgcagagaaaagatccctccgcatttttttcgttccctgttaccgatttcatcgcccccggctatagtatgattatcaagcacccaatggatttctctacaatgaaagaaaagatcaagaacaatgactaccagtccatcgaggaactgaaggacaacttcaagctaatgtgtacgaacgccatgatttataataagccggagacaatttattacaaggccgcgaagaagctacttcactccgggatgaaaatcctgagtcaggagcgaatccaatccctgaaacagtcgatcgattttatggctgacctgcagaaaacgaggaagcagaaggacgggacagacacgagtcagtctggcgaggatggcggatgctggcaaagggaaagggaagattctggcgatgctgaggcacacgcgttcaagagcccatcaaaagaaaacaaaaaaaaggataaggacatgctcgaagataagtttaagtctaataaccttgagcgcgaacaggagcagctggacagaattgtgaaggaatctggaggaaagctaactcggcgcctggttaatagccagtgtgagtttgagagaaggaagccggacggtactactacattggggctgttgcacccagttgatcctattgtgggtgagcctggttactgtcccgttaggttggggatgactactgggcgcttacagagtggggtcaacaccctgcaaggcttcaaggaagacaaacgtaacaaagttacaccggtcctttaccttaactatgggccctattccagttatgcaccgcactacgactctaccttcgccaatatttccaaggatgattcagatctgatctactcaacatatggagaagattcagatcttccctcagatttctcaatacatgaattcctcgcaacctgtcaggattacccatatgtgatggccgactcactgctggacgtcctgactaagggcggccattctcgaactttacaggagatggagatgagtctccctgaggatgagggacatacccggacccttgacacagctaaagaaatggagcagattacagaagttgagcctcctggcaggcttgatagcagcacacaggacagactgattgcactcaaagctgttaccaatttcggcgtgcccgttgaggtgttcgactcggaggaagcagagattttccagaaaaagctggatgaaaccaccagacttttacgggaattgcaagaagctcagaatgaacgactgtccaccaggcccccccccaacatgatctgcctcctcgggccttcatatagagagatgcatctagctgagcaggtgaccaacaaccttaaggagctggcacagcaggtcactcccggagacatcgtatctacctacggggtgcgcaaagcaatgggcatatccatccccagcccagtgatggagaacaacttcgtcgatcttaccgaggatactgaagagccaaaaaagaccgatgtggctgagtgtggccctggcggctcctag

SEQ ID NO: 23130 - DNA, 1959 bp, synthetic construct
  misc_feature 1..1959: note = Description of Artificial Sequence: Synthetic coding sequence
  source 1..1959: mol_type = other DNA
atgggcaagaagcacaagaagcacaagagcgacaagcacctgtacgaggaatacgtcgagaagccgctgaaactcgtccttaaggtgggagggaacgaagtcactgagctcagcacgggcagtagtggacatgattcctccctgtttgaggacaagaacgatcacgataagcacaaggataggaaacggaaaaagagaaagaagggcgaaaaacagatccccggtgaagagaaaggacggaagagaagaagggtgaaagaggacaaaaaaaaaagagatcgggatcgagtcgagaatgaggccgagaaggacctgcagtgtcacgccccggtgaggctcgatttgcctcccgaaaagcctctcacatcatccctggctaaacaggaagaggtggagcagactcccctgcaggaggcactgaatcagttgatgaggcagttgcagcggaaggatccatctgcgttctttagctttcccgtcactgactttatcgctcccggatattcaatgataatcaagcaccccatggatttttctacaatgaaggaaaaaattaagaataatgattatcagagcatcgaagagcttaaggataactttaagctgatgtgcacaaacgcaatgatctacaacaaacccgagactatatactataaggcagctaagaaattgctacacagtgggatgaagattctctctcaagagcgtattcaaagtctgaagcagtccatcgattttatggctgatttacagaagactcggaagcagaaggacgggaccgatacaagccagtcaggggaagatggcggatgctggcaacgagagcgagaagactcaggggatgcagaggcacacgctttcaagtcaccctcaaaagaaaataaaaaaaaggacaaagatatgctcgaggacaagtttaaatccaacaatctcgaacgcgagcaggagcagctggatcgcatcgttaaggagtcgggaggtaaactgaccaggagactggtgaattcccagtgtgagtttgaacggaggaaaccggacggcacaacgaccctgggattgctgcatcccgtggacccgattgtgggggagcctggctactgtccagtgcggctgggtatgactacagggaggctgcaatccggggtaaatactctgcaaggtttcaaggaggacaaacggaacaaggtgacccccgtgctttacttaaattacgggccttattcgtcatatgccccacactacgattctacttttgcaaacatctctaaagacgacagcgacctgatatattctacttacggagaagattcagacttgcccagtgacttcagtatccacgaattcctggctacttgtcaagactatccatacgtgatggccgacagcctgctggatgtgcttacgaaaggaggtcattctcgcacactgcaggaaatggaaatgtctctgcccgaggatgaaggacataccaggactctggacaccgccaaggagatggaacagatcaccgaggttgaacctcccggtcggctggactccagtacgcaagatcgactgatcgcgttaaaggccgtcaccaattttggcgttcctgtcgaagtgttcgattctgaggaggccgagatcttccagaagaaactggacgaaacgacccgactgctcagagaactgcaggaagcccagaacgagcgtctgtccacccgcccacctccgaacatgatctgtttactagggccatcatatcgtgagatgcatctcgctgagcaggtgacgaataacttaaaagagctcgcccagcaggtgactccgggtgatatcgttagtacctatggagtgagaaaggctatggggatcagcatcccatctccagtgatggagaataactttgtagatctcacagaggatacagaggagcccaagaaaacagacgtcgccgagtgcggacctggcgggagctag

SEQ ID NO: 23131 - DNA, 1980 bp, synthetic construct
  misc_feature 1..1980: note = Description of Artificial Sequence: Synthetic coding sequence
  source 1..1980: mol_type = other DNA
atggccgccgtgatcctggagagcatcttcctgaagcggagccagcagaaaaaaaagaccagcccactaaatttcaagaagcggctattccttctaacggtacacaagctgtcctattacgagtatgatttcgaaaggggtcgaaggggctcaaagaaaggatccattgacgtggagaaaatcacctgcgtggagaccgttgtgccggaaaagaatcctccgccggagaggcagattccaagaaggggcgaagagtcgagtgagatggaacagatttccattatcgagagattcccgtacccctttcaggtggtgtatgatgaagggcctctctatgttttctcaccaaccgaggaactgcggaaaagatggatccaccagctgaagaacgtcatccggtataatagtgacctggtacagaaatatcatccctgtttttggatcgatgggcaatacttgtgttgctcacagacagccaaaaatgcaatgggctgtcagatccttgagaataggaacgggtctttgaagcctggatcgtcacacagaaagaccaaaaaacccctgcctccaacacctgaggaggatcagattctcaagaagcccctcccaccggaaccggccgccgcccccgtgagcacttccgagttgaaaaaggttgtggccctatacgattacatgcccatgaacgccaacgatctacaactgaggaagggtgatgagtactttattctggaggaatctaatttaccatggtggagggctagggacaagaacggccaggaggggtatattccctccaactacgttactgaagccgaggatagcattgagatgtacgaatggtactctaaacacatgacccggtcccaagccgaacagctgctgaagcaggagggaaaggaaggcggcttcatcgttcgagactcaagcaaggccggcaaatataccgtttcagtcttcgccaagtctaccggtgatccccagggcgtgattcggcactatgtagtatgttctactccccagtcccagtattacctcgccgagaaacacctattttctaccattcctgaactcattaattaccaccagcataactccgctgggctaatctctcgattgaagtaccccgtgagtcagcaaaacaaaaacgcaccaagcaccgctggcctgggatatggaagctgggagatcgatcctaaggatttaacatttctgaaagaactagggacaggtcagtttggtgtggtgaaatatgggaaatggcgcgggcagtatgatgttgctattaaaatgatcaaggaggggtctatgtcggaggacgaattcattgaagaagcaaaagttatgatgaatctcagtcacgaaaagctcgtgcagctgtatggggtatgtacaaaacagagacccatttttattatcactgagtacatggctaacggatgcctattaaattatctaagagagatgcgacaccgtttccaaacacaacagctgcttgagatgtgtaaagatgtttgtgaagccatggaatacctggagagtaaacaatttctacaccgggaccttgcagcccgcaactgcctcgtaaatgaccagggagtcgtgaaggtgagtgacttcggactgtcccgatatgtcctggatgacgagtacacatcttccgtaggatctaaatttccagtcagatggtccccccctgaggtactcatgtattccaagttctcttctaaaagtgatatttgggcatttggtgttctgatgtgggagatctattccctgggaaagatgccctacgagagatttactaatagtgagaccgcagaacacattgcacaggggcttcggctgtaccggccacacctcgcatccgaaaaggtttacaccattatgtactcttgttggcatgaaaaggctgatgagcgaccaacattcaagatcctcctaagcaatattctggacgtgatggatgaagagtcttag

SEQ ID NO: 23132 - DNA, 627 bp, synthetic construct
  misc_feature 1..627: note = Description of Artificial Sequence: Synthetic coding sequence
  source 1..627: mol_type = other DNA
gtgatccggcactacgtggtgtgcagcaccccccagagccagtactaccttgcagaaaaacatctttttagcacgatacctgaactgattaattaccaccagcacaattccgccggtctgattagcaggacccagcagttactggaaatgtgcaaagacgtgtgcgaggccatggagtatcttgagagtaagcaattcctccaccgggatctggctgcacgcaactgccttgtaaacgaccagggggtggtcaaggtgtccgattttggcctaagccggtatgttctggatgatgagtatacctcaagtgtcggcagtaaatttcctgtaaggtggagcccccctgaagttctgatgtacagtaaattctcatctaaatctgatatttgggcattcggcgtcctcatgtgggaaatctatagtttggggaaaatgccctacgagcggtttacaaattctgagactgctgagcatatcgctcaaggactcaggctgtacagaccccaccttgcatctgaaaaggtttacactattatgtacagttgctggcatgaaaaagccgatgagagacccacttttaaaattctcctgtcgaatattctggacgtgatggatgaggaaagctag

SEQ ID NO: 23133 - DNA, 420 bp, synthetic construct
  misc_feature 1..420: note = Description of Artificial Sequence: Synthetic coding sequence
  source 1..420: mol_type = other DNA
gtgatccggcactacgtggtgtgcagcaccccccagagccagtactacttagctgagaagcacctcttcagtactatcccagagttaattaattaccaccagcataattctgcagggctgatctccaggctgaagtacccagtgtcccagcagaataaaaacgcccccagcacagcgggactgggttatggagtgcttatgtgggagatctattctcttggaaagatgccatacgagcgcttcaccaactccgagaccgcagagcacattgcccagggcctacggttatatcgacctcatctggcctcagagaaggtctacaccattatgtattcatgctggcatgaaaaggctgatgagcggcccacatttaagatcctgctttctaacattctagacgtgatggatgaagagtcctag

SEQ ID NO: 23134 - DNA, 705 bp, synthetic construct
  misc_feature 1..705: note = Description of Artificial Sequence: Synthetic coding sequence
  source 1..705: mol_type = other DNA
cggcactacgtggtgtgcagcaccccccagagccagtactacctggctgagaagcatctctttagcacaatacccgaactgattaattatcaccagcacaactccgccggccttatctcccggttaaaatacccagtgtcccagcagaacaagaacgccccttcaacagcaggcctggggtatggaagctgggagatagacccaaaagatctgactttcctcaaagaactcggaaccggccagtttggcgtcgtcaaatacggcaagtggagaggacagtacgatgtggccattaagatgattaaggagggaagcatgtccgaggatgagtttatcgaagaggcaaaggtgatgatgtatgttctggacgacgagtacactagcagcgttgggtccaagttcccagtaagatggagcccacctgaggtgctgatgtactctaaattttctagcaagagcgacatctgggctttcggcgtcctcatgtgggagatctattccctcggtaaaatgccatacgagcgatttacgaattcagaaacagcagaacacattgcccaagggcttcgactttatcgaccccatttggcctcggagaaggtctatacaatcatgtactcctgctggcatgagaaggccgacgagcgtccgacattcaagatactgctgtctaatatcttagacgtgatggatgaagagagctag

SEQ ID NO: 23135 - DNA, 225 bp, synthetic construct
  misc_feature 1..225: note = Description of Artificial Sequence: Synthetic coding sequence
  source 1..225: mol_type = other DNA
gtgatccggcactacgtggtgtgcagcaccccccagagccagtactatctcgctgagaaacatctgttttcaacaataccggaactgatcaactaccaccaacataatagtgcaggactgatatctcggcttaaatatcccgttagtcaacagaataaaaatgccccatctacagccggactgggatacggtatgagttggatgatgaacacacaggcacagtag

SEQ ID NO: 23136 - DNA, 1452 bp, synthetic construct
  misc_feature 1..1452: note = Description of Artificial Sequence: Synthetic coding sequence
  source 1..1452: mol_type = other DNA
atggccgccgtgatcctggagagcatcttcctgaagcggagccagcagaagaagaagacttcccctctgaattttaaaaagaggttattcttactgaccgtgcacaagctgtcctactatgagtatgattttgagcgtgggaggagaggctccaagaagggctctatagacgtggagaaaatcacctgcgtagagaccgtggtgcctgagaagaatcccccaccagagcgccagatcccacggcgcggggaagagtcaagcgaaatggaacagattagcataattgaaagattcccttaccccttccaggttgtctacgacgaagggcccctgtatgtgtttagcccgacagaagaactcaggaagagatggatccatcagctgaagaacgtgattcgctacaattccgacctcgtacaaaagtatcatccctgtttctggattgatggtcaatacctctgctgctcacaaacagcaaagaacgcgatgggatgccagatactcgaaaaccgcaacggaagtcttaaacctggatccagtcacagaaaaactaaaaagcctctgccacctactccagaggaagatcagatactcaaaaagcccttaccgcccgaacccgccgccgcaccggttagcacatccgaacttaaaaaagttgtggcattgtacgactacatgcccatgaatgccaacgatctccagttgcgcaaaggggacgagtactttatcttagaagagtctaatctgccctggtggcgggcacgcgacaagaacggccaagaaggctacatcccatctaactacgtgacagaagccgaagatagcatcgagatgtacgaatggtatagcaaacatatgacacggtcccaggccgagcaactcttaaaacaggaggggaaggaagggggattcatagtgcgcgattcttcgaaagccggaaagtataccgtttccgtgtttgctaagtccaccggtgatccccagggcgtcatcaggcattacgttgtttgcagtacaccacagtctcagtattacctggccgctcgcaactgcctagtaaatgatcagggagtggtgaaggtgagcgatttcgggctgtcccgttacgttctggatgacgaatacacgagttccgtgggcagcaagttccccgtcaggtggtctcctcctgaagtcctaatgtacagtaaattctcctcaaaatccgatatttgggcttttggcgttctcatgtgggaaatatacagtctcggaaaaatgccctatgaaaggttcactaattcagaaactgctgaacatatagcacaaggattacgcctatacaggccacatctggcaagtgagaaggtgtacaccatcatgtactcatgttggcatgagaaagccgatgaaaggcctacattcaaaatcctgctctccaatattctggatgtgatggacgaggagagctag

SEQ ID NO: 23137 - DNA, 519 bp, synthetic construct
  misc_feature 1..519: note = Description of Artificial Sequence: Synthetic coding sequence
  source 1..519: mol_type = other DNA
gtgatccggcactacgtggtgtgcagcaccccccagagccagtactatcttgccgagaaacatttgttctccacaatccccgagctgatcaattatcatcaacacaatagcgctgggctgatttcaagacttaagtaccccgtcagccaacagaataagaatgcgcccagtacagccggccttggctatggcagttgggaaattgaccccaaagatctgactttcctgaaggaactgggcactggacagttcggcgtcgtgaagtacggaaaatggcgcgggcagtatgatgtggctatcaaaatgatcaaagagggatcaatgagtgaagacgaattcattgaagaggcaaaggtcatgatgaacctttcgcatgagaaactggtgcagctctacggtgtttgcactaagcaacgcccaatctttatcattaccgagtacatggccaatggctgtctgccgtgtaccgtagctggcatgcgcaaacagatgagcgtgccactgtctaaattcttctag

SEQ ID NO: 23138 - DNA, 594 bp, synthetic construct
  misc_feature 1..594: note = Description of Artificial Sequence: Synthetic coding sequence
  source 1..594: mol_type = other DNA
gtgatccggcactacgtggtgtgcagcaccccccagagccagtactacctggctgaaaagcatctgtttagcaccatcccagaactcatcaattaccaccagcacaattctgcaggattgatttctaggctaaagtaccctgtgtcccagcagaacaagaatgcgccgagcacagcaggcttgggctatggctcttgggagatcgatccaaaagatctcacgtttctgaaggagctggggaccggccagttcggtgtagtgaaatacgggaagtggcgtggtcagtacgacgtggccatcaagatgatcaaggagggctccatgtcagaagatgagtttattgaggaggcaaaggtgatgatgaatttgtcacacgagaagctggtgcagttatacggcgtctgcacgaaacagcgcccgatctttatcatcacggagtacatggcaaatgggtgtcttttgaattacttaagagagatgcggcacagatttcaaacccagcagttactcgaaatgtgcaaggacgtgtgcgaagccatggaatatcttgagagcaagcaattcctgcatcgcgatctggtttgccccggctag

SEQ ID NO: 23139 - DNA, 156 bp, synthetic construct
  misc_feature 1..156: note = Description of Artificial Sequence: Synthetic coding sequence
  source 1..156: mol_type = other DNA
atccggcactacgtggtgtgcagcaccccccagagccagtactacctcgccgaaaaacaccttttcagcaccatccctgaactcattaattaccatcagcataacagcgcaggcgaggactccgcagctgctcgggatgtgcaaggctgcctgtag

SEQ ID NO: 23140 - DNA, 891 bp, synthetic construct
  misc_feature 1..891: note = Description of Artificial Sequence: Synthetic coding sequence
  source 1..891: mol_type = other DNA
atgaagaacgagatcgccgccgtggtgttcttcttcacccggctggtgagaaagcacgacaaactcaagaaggaagccgtggagagatttgctgagaagctgaccctgatccttcaggagaaatacaaaaatcactggtacccagagaagcctagcaaaggccaggcttaccggtgtataagagtgaataagtttcagcgcgtggatcccgatgttctgaaggcttgcgagaatagctgtattttgtacagcgacctgggtcttccgaaagagctcacgctatgggtcgacccatgcgaggtgtgctgccggcgcgatggagtgagcccctgctggccagattgctctcaaacacccgatttggttatcaggccaccctggccacccaaagccctggactacaggcgggagcccttgcgcccagccagttcgttccttatcatgtacggtgaaaagaataacgcttttatagttgcctcctttgaaaataaagatgaaaataaggatgagatctcccgcaaagtgacccgcgcccttgacaaagtgacttcagactatcactcgggctcttcttctagcgacgaagaaacgagcaaggaaatggaggtgaagccatcaagtgtaaccgccgccgcaagcccagtgtatcagatctccgaactgatcttcccccccctgccaatgtggcatcccctcccacgcaagaaaccaggtatgtaccggggcaacgggcatcaaaaccattacccccctcctgtgccttttggctaccccaatcagggaaggaagaataagccatatcggcctataccagtaacctgggtgccacctcctggcatgcactgcgacagaaatcactggataaacccccatatgctggccccgcactag

SEQ ID NO: 23141 - DNA, 759 bp, synthetic construct
  misc_feature 1..759: note = Description of Artificial Sequence: Synthetic coding sequence
  source 1..759: mol_type = other DNA
atgaagaacgagatcgccgccgtggtgttcttcttcacccggctggttagaaagcacgataagctcaaaaaagaggcagtcgaaagattcgccgagaagttgaccctcatactccaggagaagtacaaaaaccactggtaccccgaaaaaccctctaagggccaggcctaccgatgcattagggttaacaaattccagagggtggaccctgatgtgttgaaggcctgtgagaactcatgtatcctgtatagcgatctgggactccccaaggagttaacgctttgggttgacccatgcgaagtttgctgtcgctacggagagaagaacaatgcatttatcgtggcaagcttcgagaacaaggacgaaaacaaagatgaaatcagccgaaaagtgaccagggccctggacaaggtgacatccgactaccattctggatctagtagctccgatgaggaaacaagcaaggagatggaggttaaacccagtagtgtgactgccgccgcgtctcctgtgtatcagatttccgagttaattttcccaccattgcctatgtggcaccccttgcccaggaaaaagcccggaatgtatagaggcaacggacaccagaaccactaccctccaccagttccattcggctacccaaaccagggtcggaagaacaagccttatcgacctatccccgtgacctgggttcccccacccgggatgcattgtgatagaaatcactggatcaatccacatatgctggcacctcattag

SEQ ID NO: 23142 - DNA, 141 bp, synthetic construct
  misc_feature 1..141: note = Description of Artificial Sequence: Synthetic coding sequence
  source 1..141: mol_type = other DNA
atgaagaacgagatcgccgccgtggtgttcttcttcacccggctggtcaggaagcatgacaaactcaaaaaggaggccgtagagaggtttgccgagaagctgacactcattctgcaggaaaagtacaaaaatcattggtag

SEQ ID NO: 23143 - DNA, 1560 bp, synthetic construct
  misc_feature 1..1560: note = Description of Artificial Sequence: Synthetic coding sequence
  source 1..1560: mol_type = other DNA
atgatgagcgagcacgacctggccgacgtggtgcagatcgccgtggaagacctttcacccgatcaccctgttgtgttagagaatcacgtggtaacagacgaagacgaaccagctctcaaacggcagcggttggagattaactgccaagacccttcaatcaagactatttgcctgagactcgattcgattgaggctaaacttcaggccctcgaggcaacctgcaagagtctggaggagaaactggatttagtcactaacaagcagcactccccgattcaggtgcccatggtggccggcagcccactaggagcaacccagacgtgcaacaaagtgagatgcgtagtacctcagaccacagtcatcctgaacaacgacaggcagaacgcaatagtggccaagatggaggaccccttgagtaatagggccccagactcactcgagaacgtgatctccaacgccgtcccaggcaggagacaaaacactattgtggttaaggtgccaggccaggaggactcacatcacgaagacggcgaaagcgggagtgaggcctctgattcagtatctagttgcgggcaggctgggtctcaaagcatcgggagcaacgtcacactaattacactgaattccgaggaggattacccaaatgggacatggctaggcgacgagaataatccagaaatgcgagtgcgatgtgccattatcccgtcggatatgttgcacataagcactaattgccgaaccgccgagaagatggccctgactctcttggattatctcttccacagggaggtgcaggctgtatctaacctgtctggtcaggggaagcacggtaaaaagcagctcgaccctctcacaatttacgggatccgttgtcacctgttttacaagtttggaatcacagaaagcgattggtatagaatcaaacaatcgattgacagcaagtgtcggactgcctggaggagaaagcagcggggccaatcattggcggtgaagtcattttctcgtcgtacgcccaacagtagctcatactgcccctcggagccaatgatgtctaccccgccccctgcctccgagttgccgcagccccagccccaaccgcaggccttacactacgctctggccaatgctcaacaggtgcagattcatcagatcggggaggatggacaggtgcaggtcgggcacctccacatcgctcaagtcccacaaggagaacaggtgcagattacacaggattccgaggggaacctgcagatccaccatgttggccaagacggacagttattggaagccacgcggattccctgtcttttagcaccttctgtttttaaggcatcttccggccaggtcctgcagggtgctcaactcatcgcggtggcttccagtgatccagcagctgccggagtggatggcagcccactccaggggtctgatattcaggtgcagtatgtacagctggcaccagtgtccgaccacacggccggagctcagaccgctgaggctctgcagcctaccttgcaaccagagatgcagctggagcatggcgcaatccagatacagtag

SEQ ID NO: 23144 - DNA, 1398 bp, synthetic construct
  misc_feature 1..1398: note = Description of Artificial Sequence: Synthetic coding sequence
  source 1..1398: mol_type = other DNA
atgatgagcgagcacgacctggccgacgtggtgcagatcgccgtggaggatttaagccccgatcaccccgttgtgctggaaaaccacgtggtcacagatgaggatgaacctgccctgaaacggcaacggctagaaatcaactgtcaagatcccagtattaagagctttctgtattcaataaaccaaacaatttgtcttaggctggattcaattgaagccaagttgcaagctttagaggctacatgcaagagcctcgaagaaaagctggatcttgttacgaataagcagcacagccccattcaagtgcccatggtggcaggatcacctctcggagcaactcagacttgcaatgcggtgcccggacgcagacaaaacactatcgtggtgaaggttccaggccaggaagactctcaccatgaagacggcgagtccggcagtgaagcatccgatagcgtgtcttcttgcggtcaagcgggttcccaatcgatcgggtcaaatgtcactcttatcactttgaattccgaggaggattaccccaatggcacatggttaggtgatgaaaataacccggaaatgcgagtgagatgtgccattatcccgtcagatatgttgcacatttctacgaattgtagaaccgctgagaaaatggcccttaccttgcttgactatctgttccatcgagaggtgcaggccgtcagcaatctcagcggacagggcaagcacgggaaaaaacagctggaccctttgactatctacgggataaggtgtcaccttttctataaatttggcattacagagagtgattggtacaggatcaaacaatccattgacagcaaatgcagaacagcctggcgtcgcaaacagcgtggccagagccttgccgtgaagtctttctcccgccggacccctaatagttcatcctactgtccgtcagagccgatgatgagcacaccaccacccgcaagtgagctgcctcaaccacaaccgcagcctcaagctctccattatgctctggctaacgctcagcaggtccaaatacaccagatcggagaggatggacaggtccaggtgattccacagggccacctccacattgcgcaggtcccccagggggagcaagtgcaaatcacacaagacagcgaggggaacttgcaaattcatcacgtgggacaggacgggcaggtgctccagggtgcgcaactcattgcggtcgcttccagcgacccagccgcagcaggagtcgatggctccccactgcagggctcagatatccaggtgcagtatgttcagctggctccggttagcgaccatacagccggtgctcagacagccgaagcgcttcagccaactttacagccggagatgcagctggagcacggagccatccagattcagtag

SEQ ID NO: 23145 - DNA, 1410 bp, synthetic construct
  misc_feature 1..1410: note = Description of Artificial Sequence: Synthetic coding sequence
  source 1..1410: mol_type = other DNA
atgatgagcgagcacgacctggccgacgtggtgcagatcgccgtggaagatctatcacccgaccacccagttgtactggagaatcatgtagtaaccgacgaagacgagcctgcccttaagaggcagagactcgagattaattgccaagacccctctatcaagtcttttctatacagtattaaccagaccatttgcctcaggcttgatagtatagaggcgaaacttcaggccctcgaagccacctgtaaaagtctggaggaaaagctggacctggtcactaacaagcagcattcccctatacaagtcccaatggtagcgggctcccctctgggggccacccagacatgcaacaaagtaaggtgtgctgtgccaggcaggcgacagaacacaatagtagttaaagttcctggccaggaggattcccaccatgaagacggagagtcagggtctgaggcatctgactccgtgtccagttgtggacaagcgggatcccagagtattgggtccaatgtcaccttgatcacccttaacagcgaggaggactatcctaacgggacctggctgggcgacgaaaacaacccggagatgagagtccgttgcgcaatcattccatccgacatgctacacatcagcaccaattgtcgtactgcggagaaaatggccctgacccttctagactacttattccacagggaggtccaagctgtgtccaatttgtccggccagggaaagcatggaaaaaagcagctagatccccttactatttacgggataaggtgtcacctcttttacaaattcggcatcacagagtccgattggtatcggattaagcagagcatcgatagtaagtgccggacggcttggcgccgcaaacagcggggtcagtccttggctgtcaagtctttctcacggcgaacccccaactctagttcatattgcccttccgaaccgatgatgtcaactccgccaccggcgagcgaactacctcaacctcagccacagcctcaggccctgcattacgcgcttgcgaatgcacagcaggtccagatccaccagattggggaagatggtcaggtccaggtgatcccccagggccatctccatatcgcccaagtgccgcagggcgagcaggtgcagattacccaggattctgaaggaaatcttcagatccaccacgtgggacaggatggacaggtgctccagggagctcaactgatcgccgtggcatcgtccgaccccgcggctgctggcgtggatggttccccactgcagggatccgacatacaggtgcagtacgtgcagctggcacctgtgagcgatcatacagcgggcgcccaaaccgcagaggccctccagcctacgcttcagcctgaaatgcaattagagcatggtgccattcagatacaatag

SEQ ID NO: 23146 - DNA, 1494 bp, synthetic construct
  misc_feature 1..1494: note = Description of Artificial Sequence: Synthetic coding sequence
  source 1..1494: mol_type = other DNA
atgatgagcgagcacgacctggccgacgtggtgcagatcgccgtggaagacctgtcacccgaccatcccggaaccgagctctgggatatcgtgttggagaatcacgtggttactgacgaagatgaacctgcactgaagcgccagcgtctagagattaactgtcaagacccatctataaagagctttctgtatagcattaaccagacaatatgtctgcggttggactccatcgaagcgaaactgcaagctcttgaagccacttgtaagagtctggaagagaaattggacttggtcactaataagcaacatagtcctatccaggtaccaatggtagccgggtccccactcggtgccacccagacttgcaacaaagttcgctgtgccgttcctggccgacgccagaacacaattgtggtgaaggtacctggccaggaagattcccaccacgaggatggcgagtccgggagcgaagcctcagattcagtatcttcctgcggacaggccgggtcccagtcgattggttccaatgtgacactcatcacactgaactctgaagaggattatcccaacgggacctggcttggggatgaaaacaaccccgaaatgcgagtgcggtgcgcgatcatccctagtgacatgctgcatatctccaccaattgccgcacggcggagaaaatggcattaacgctgctggattatctgtttcacagggaggtccaggccgtgagtaacctctctggccaggggaaacacggcaagaagcagctggatcctcttacaatttatggcattaggtgccacctgttctataagttcggtatcacagaatcagattggtatcgcataaaacagtccatagattccaagtgcaggactgcatggaggaggaagcaaaggggacaatctttggccgtgaagtccttttcgaggagaaccccaaatagctcttcttattgtcctagtgaaccgatgatgtctaccccgcctcctgcatccgaacttccccaaccccagccccagccacaggccctacactatgcactggcaaatgctcaacaagtgcagattcaccagatcggtgaagacgggcaggttcaggtaattcctcagggtcatctccacatcgctcaagtcccacagggcgaacaggtgcagatcacccaagattcagagggcaacctgcagattcatcacgtagggcaggatggccagctgctggaggctactcgaatcccatgcttacttgctccatcagtatttaaagcctcttcaggccaggtgctccagggtgctcagctgatcgccgtagcttcaagcgatcctgctgcagccggagttgacggctctccactccagggtagtgacattcaggtgcagtatgtgcagcttgcaccagtctcggaccacaccgccggcgcgcagacagctgaggcactgcaacccactttgcagccggagatgcagttggagcacggagctatccagatccaatag

SEQ ID NO: 23147 - DNA, 1560 bp, synthetic construct
  misc_feature 1..1560: note = Description of Artificial Sequence: Synthetic coding sequence
  source 1..1560: mol_type = other DNA
atgatgagcgagcacgacctggccgacgtggtgcagatcgccgtggaggacctcagtccagaccatccagtcgtcttagagaatcatgttgtcaccgacgaggatgagcctgcactgaagcggcagaggctggagatcaactgtcaagacccaagcatcaagaccatttgtctgcgccttgattccatagaggctaagctccaagctctggaggccacttgtaagagcttagaagaaaagctcgaccttgtgacaaataaacaacatagccccatccaagtgcccatggtcgccggtagcccccttggggcaactcagacgtgtaacaaagtccgatgcgttgtgccacaaacaacggtaatcctgaataatgaccggcagaatgccatcgtcgccaaaatggaagacccccttagtaatcgtgcaccggattcgctcgagaatgtgatttcaaatgccgtgccaggtcgccgacagaacacaatcgtcgtgaaggtgccaggtcaggaagactctcaccatgaggatggagagtctggcagcgaagcttccgactctgtgagcagttgcggccaggcagggagccagtcaattgggtctaatgtgactctgattaccttgaacagcgaggaggactatcctaatgggacctggttgggcgacgaaaataatcccgagatgcgtgtgagatgtgcaatcatccccagcgacatgttgcatataagcactaattgccggaccgcagagaagatggcgcttactttgctggactatttgtttcacagagaggtgcaggccgtgtccaatttgtccgggcagggaaagcacggcaagaaacagctggatccactgacaatctacgggatccgatgtcatctgttttataagttcggcatcactgagagcgactggtaccgaatcaagcagagtatcgacagtaagtgtcgaaccgcctggagacggaaacagagagggcagtcacttgccgtaaaatccttctctcggaggacaccaaactcatcgagttattgtccaagcgaaccgatgatgagtaccccgcccccagcatctgaacttcctcagccacaacctcagccacaggccctacactatgcgttggctaatgcccagcaggtgcagatccaccaaatcggagaagacggacaggtacaggtgggccacctgcatatcgcacaggtgccgcagggtgaacaggtccaaatcacccaagactcggaagggaaccttcaaattcaccacgtggggcaagacgggcagcttctcgaagcgacccgcattccttgcttgctcgcaccatccgtcttcaaagcaagcagtggccaggtgctgcagggcgcccagctgatcgctgtcgcctcctccgaccctgccgcggccggggtggacgggtccccccttcaaggctccgatattcaggttcagtacgtccagctagccccggtgagcgaccatacagccggcgcccaaacagcagaagccttgcagccaacactgcaacctgagatgcagcttgaacacggtgcaatccagatccagtag

SEQ ID NO: 23148 - DNA, 1476 bp, synthetic construct
  misc_feature 1..1476: note = Description of Artificial Sequence: Synthetic coding sequence
  source 1..1476: mol_type = other DNA
atgatgagcgagcacgacctggccgacgtggtgcagatcgccgtggaggacctcagtccagaccaccccgtagttctggagaatcatgttgttaccgacgaagacgagcccgcgttaaagaggcagagacttgagataaattgccaggatccttctattaaatcctttctgtactccattaatcagacaatctgcctgcggcttgacagcattgaagcgaaactacaggcgctggaggcgacttgcaaaagtctggaggagaaacttgatctggtgacgaataagcagcactcccctatccaggtcccaatggtggcaggtagtccacttggagcaactcagacctgtaacaaggtgaggtgcgctgtgccagggcgcagacaaaataccatcgtcgtgaaggtgcccggtcaggaggacagccatcatgaggacggcgagtcggggtcggaggcatctgatagcgtgtcatcatgtggacaagctggatcacagtctatcggtagtaacgtgaccctgatcacgctaaattccgaggaagattaccccaatggcacttggctgggggacgagaacaatcccgagatgagagtgcgttgcgccataattcccagcgatatgctccacatctcaactaattgcagaaccgctgagaaaatggccctgacactgcttgactacctcttccaccgggaagtacaagcagtgagcaacttgagcggtcaaggaaagcacgggaagaagcaactggatccactgaccatttatggtattagatgccacctcttctacaagttcggaattaccgaaagcgattggtaccgcatcaaacagagcattgacagtaagtgtaggacagcctggaggaggaaacagcggggccaaagtctggccgtgaagagcttctcacgccggacaccgaacagctcaagctattgtccctcggaacctatgatgagcacacccccccccgcaagcgagttgccccagcctcagccacagccccaagctctacattacgcacttgctaatgcccagcaagtccagatacaccaaattggtgaagatggccaggtgcaggttatccctcaaggtcatcttcatatcgcccaggtccctcagggtgagcaggttcagatcacccaggactctgagggaaatctccaaatacaccacgtcggacaggatggccagttacttgaagccacgcgcataccttgcctgctcgcgcccagcgtcttcaaagcatcgagtggacaggtgcttcagggcgcacagctcatagccgtcgcgtcctccgaccccgccgctgcgggtgtcgacgggtcacctctgcaaggcagtgatatccaagtgcagtacgtgcagcttgccccagtgagcgaccacaccgctggggcacagaccgcagaggcacttcagcccactttgcagcctgagatgcagctggaacacggggccattcaaatccaatag

SEQ ID NO: 23149 - DNA, 357 bp, synthetic construct
  misc_feature 1..357: note = Description of Artificial Sequence: Synthetic coding sequence
  source 1..357: mol_type = other DNA
atgatgagcgagcacgacctggccgacgtggtgcagatcgccgtggaggaccttagccctgaccaccccgttgttctggaaaaccatgtagtcacagacgaggatgagccagctctaaagcgccagaggctggagattaactgccaagatccaagtatcaagtcatttttatactcgataaaccaaacaatttgcttacgcttggacagcatagaggctaagttacaggccctggaagcgacctgcaaatcacttgaagaaaagctcgatctcgtgacaaataaacagcactccccaattcaggtcccgatggtggccggatcgccattgggagctacacagacctgtaacaagtag

SEQ ID NO: 23150 - DNA, 87 bp, synthetic construct
  misc_feature 1..87: note = Description of Artificial Sequence: Synthetic coding sequence
  source 1..87: mol_type = other DNA
atgatgagcgagcacgacctggccgacgtggtgcagatcgccgtggaggatctgagccccgaccatccagtcgttctggagaattag

SEQ ID NO: 23151 - DNA, 288 bp, synthetic construct
  misc_feature 1..288: note = Description of Artificial Sequence: Synthetic coding sequence
  source 1..288: mol_type = other DNA
atgatgagcgagcacgacctggccgacgtggtgcagatcgccgtggaagatctcagcccagaccaccccgtagtcctcgagaatcatgttgtgacagacgaagacgagcctgccctgaaacgtcagaggttagagataaattgtcaggaccccagtatcaaatcttttctctacagcatcaatcagacaatttgcctgcgactggactctatcgaagccaagctgcaagccctggaggcaacatgcaagtccctggaggagaagcttgatctggtcacaaataagtag

SEQ ID NO: 23152 - DNA, 372 bp, synthetic construct
  misc_feature 1..372: note = Description of Artificial Sequence: Synthetic coding sequence
  source 1..372: mol_type = other DNA
atgatgagcgagcacgacctggccgacgtggtgcagatcgccgtggaggacctgtccccggaccacccagttgtcttggagaaccacgttgtgaccgatgaagatgagcctgcactgaaaagacagcggctggaaatcaactgccaggatccatcgataaagtcctttttgtactctattaaccaaactatatgcctccgcctggacagtatcgaggcaaaactgcaggcgctggaggccacttgcaaaagtttggaagagaaactggatttggtcacaaataaacagcactccccgatacaggtacccatggttgctggctctcctcttggcgctacccagacatgtaataaagtcaggtgtgtagtatag

SEQ ID NO: 23153 - DNA, 588 bp, synthetic construct
  misc_feature 1..588: note = Description of Artificial Sequence: Synthetic coding sequence
  source 1..588: mol_type = other DNA
atgatgagcgagcacgacctggccgacgtggtgcagatcgccgtggaggacttgagtcccgaccaccccggcacagagctgtgggacatcgtactggaaaatcacgtggtgacggacgaggacgaacccgccctgaaacgtcagcgcctggaaataaattgccaggacccatctattaagtccttcctttatagcattaatcagacaatctgcctgagactggatagtattgaggctaaactccaagcccttgaagctacttgcaagtctctcgaggaaaagttagatctagtgaccaacaagcagcactctccgattcaggtgccaatggtggctggctccccgctgggggccacccagacctgtaataaggttcgttgcgctgtccccggacggcgtcagaatacgatcgtggttaaagtgccaggtcaggaggactcccaccacgaggatggcgaaagtggaagtgaagcatccgatagcgtgtcaagctgtggacaggccggcagtcaaagtatcggtagcaatgtgactcttattacgttaaatagcgaggaggattatccaaacggaacatggctcggatag

SEQ ID NO: 23154 - DNA, 360 bp, synthetic construct
  misc_feature 1..360: note = Description of Artificial Sequence: Synthetic coding sequence
  source 1..360: mol_type = other DNA
atgatgagcgagcacgacctggccgacgtggtgcagatcgccgtggaggatctatcccctgatcaccctgtggtcttggagaaccacgtcgtgaccgacgaggatgagccagccttaaaaagacagagactggaaattaactgtcaggacccgagtattaaatcctttctgtattcaatcaatcaaactatatgtcttaggctggattccatcgaggccaagcttcaagctctggaagccacctgcaagtctttggaggagaaactagatttagtcaccaataaacagcatagccctattcaggtgcccatggtggccggttcaccactaggagcaactcagacatgcaacaaagtgtag

SEQ ID NO: 23155 - DNA, 1401 bp, synthetic construct
  misc_feature 1..1401: note = Description of Artificial Sequence: Synthetic coding sequence
  source 1..1401: mol_type = other DNA
atgatgagcgagcacgacctggccgacgtggtgcagatcgccgtggaggatctctcaccggatcacccagtagttctagagaatcatgtggtgaccgatgaggacgagccagcccttaagagacagcgccttgaaattaactgccaggatccaagcattaaatcctttctgtactccataaatcagacaatctgcctgcgattggattccatcgaagctaagcttcaagctctcgaagctacttgcaagagtctggaggaaaaattagacttggtcaccaataaacagcatagtccaatccaggtcccaatggtggccgggagccctctgggcgcaacccagacatgtaacaaggtgaggtgcgctgtaccaggtcgacgtcaaaacaccatcgttgtgaaagtgccagggcaggaggactcgcaccatgaagacggcgagtccggttctgaggccagcgatagcgtaagttcctgtgggcaagcaggatcacaatccatagggtccaatgttaccctgataacgctgaacagcgaggaggattatcccaacggaacttggctgggcgatgaaaataatccagagatgcgcgtccgatgtgctatcattccctcagatatgttacacatatcaaccaactgcaggactgctgagaagatggctctgactttactcgattacctgtttcacagggaggtgcaagctgtatccaacctgtctgggcagggtaagcatggaaagaaacagctggatcctctgaccatctacggcattaggtgtcacctgttttataaattcggcatcacagaatccgactggtacagaattaagcaaagcatcgatagtaagtgtcgcactgcatggcgtaggaaacagaggggccagtccttggccgtcaagagctttagccggcgaacacccaatagttcgtcatactgtcctagcgagcctatgatgtcgaccccaccaccagcctctgagctaccacagccacagccgcagcctcaggctctgcactatgcactagcgaacgcccagcaggtgcagatccaccaaattggcgaagacgggcaggttcaggtaggacatctccacattgcccaggtgccccagggcgagcaagtgcagatcacacaagattcagaaggaaatctccagatccaccatgtgggtcaggatggacaggtcctgcagggtgctcagctcattgccgtggcaagcagtgatccagccgctgccggggtcgatggctctcccttacagggatccgatattcaggtgcagtacgtgcagttggcgcctgtgagtgatcacaccgctggcgctcagaccgccgaagccctacagcccacgctccaaccagaaatgcagctggaacacggtgcaatccagatccagtag

SEQ ID NO: 23156 - DNA, 753 bp, synthetic construct
  misc_feature 1..753: note = Description of Artificial Sequence: Synthetic coding sequence
  source 1..753: mol_type = other DNA
atgggcagccccgagcccacccagggcccccggctgagccccatcctaattccttactcaggtcgccgatataaggtaggccgcgctagcggcgccctgtgtcatcaggattccttgcctcctatcctggagctgggcctcacattcctgcgcgcctcggccggattttctgtgccaactagttctagtttcgctctgcctgagcccttgagatctttgtgtctgggcaatggcgagggtctgggactatccctgaccctgaccgtcttagcgtggatcttgggactgtcaggcacactgggtgctctcgtgttgttcatggttgctactgggattttccaagaggccctgtggcacctactgctcctgtctttcagtgtggaggctctaccttgcttcttcttcttcccttttttccttctctgtagatgtttgcgcgccgagttgcagatccagcagcggctggacggtactctctctctggatctgatgcgccttgaaagcgacggcgaaactgggtgtgcagccgaatctagcgttctgcagggcgcacagttaatcgcagtggccagtagcgatccggcagccgccggcgtagacggtagccctctgcaaggcagcgacattcaggtgcagtatgtccagctggcacctgtgtccgaccacaccgccggggcacaaacggcagaggctttgcaaccgaccctgcagcctgaaatgcagctcgagcacggggcaattcaaattcagtag

SEQ ID NO: 23157 - DNA, 1527 bp, synthetic construct
  misc_feature 1..1527: note = Description of Artificial Sequence: Synthetic coding sequence
  source 1..1527: mol_type = other DNA
atgatgagcgagcacgacctggccgacgtggtgcagatcgccgtggaggatctgagtccagaccatccggtggtcctggaaaaccatgttgtgacagacgaagacgaacctgctttgaaacgccagcgtcttgagatcaattgtcaggacccctcaatcaagtccttcctgtatagcatcaatcagactatttgtctccgcctcgactctatcgaagctaaactccaagcactggaggctacatgcaagagcttggaagagaaactggacctagtgaccaacaagcagcatagtccgatacaggtacctatggttgcaggctcccctctaggcgcgacccagacatgtaacaaggtcaggtgtgtggtgccgcagactactgtcatcctgaataacgacaggcagaatgccattgtggcaaaaatggaggaccccctcagcaatcgagccccggactccctcgaaaacgtgatctcaaacgccgtcccagggcgccggcaaaacacaatcgttgtgaaggtgccaggacaggaagacagtcaccatgaggatggtgaaagcggttctgaagcctctgacagcgtgagctcatgtggacaggcgggctcccagtcaatcggcagtaatgtgactctaatcacactcaatagcgaagaggattaccccaacggcacatggctgggcgatgagaacaaccccgagatgcgtgtccgctgcgctattatcccatccgatatgctgcacattagcacaaactgtcggactgccgaaaagatggcactcacactactggactatcttttccacagagaggtgcaggccgtgagtaacttgagcgggcaagggaagcatggcaaaaagcaactggacccactgaccatctatgggatcagatgccacttgttctataaatttggaataactgagagcgattggtaccgaatcaaacagtctatcgatagtaagtgccgaacagcctggagaaggaaacaacgcggtcagtctctcgcagtgaagtccttctcacggcgaacccccaacagtagctcttactgtccctccgagccaatgatgtctaccccaccgcccgcttcagaactaccccagccacaacctcagcctcaggctctccattacgccttggcaaacgcacaacaggtgcagattcatcaaattggtgaagacggacaggttcaggtgatccctcaagggcacctccacattgcccaggtgccccagggtgaacaggtccagattacccaggattcagaaggaaatctccagatacaccatgttggtcaagatggacaggtgttgcagggggcacagcttattgccgtggcttcgtccgatccagcagccgctggcgtggacgggagccccttacagggaagcgatatccaggtgcagtacgtccaattggcccctgtgtcagaccacacagccggcgctcagactgctgaagctcttcagcccacacttcagcccgagatgcagcttgaacatggtgctatacagatccaatag

SEQ ID NO: 23158 - DNA, 1476 bp, synthetic construct
  misc_feature 1..1476: note = Description of Artificial Sequence: Synthetic coding sequence
  source 1..1476: mol_type = other DNA
atgatgagcgagcacgacctggccgacgtggtgcagatcgccgtggaggacctgagtcccgaccatccagtcgtgcttgaaaaccatgtggtcaccgacgaggacgaacccgcgttaaagaggcagaggctcgagatcaattgccaagaccctagtatcaaatcttttctctacagtattaaccagacaatctgtctgagactggacagcatcgaagcaaagctccaggcactggaggcaacgtgcaaatcgctcgaggagaagctggatctggtcaccaataaacaacacagccccattcaggtccccatggtggcggggtctcccctaggcgcaactcaaacgtgcaataaggtcagatgcgcagtacctgggagaaggcagaataccatagtggtcaaagtgcccggtcaagaggatagccaccatgaggatggggaatccggatctgaagccagcgactcggtgtcgtcttgtgggcaggctggctcacaatctattggaagcaatgtaaccctgataacgctcaactctgaagaagactaccccaacggcacttggctcggggacgagaacaatcctgagatgcgcgtgcggtgcgctataatccccagcgacatgctgcatatctcgaccaattgccggacagctgagaagatggcccttactctattggactacctgttccacagagaagtgcaagccgtgagtaacctatccgggcagggtaagcacgggaaaaagcagctcgaccctctcacaatatatgggatcagatgccacctgttctataaattcgggattactgaatccgattggtataggatcaagcagtcaatcgactctaaatgccgtacagcatggagacgtaagcaacggggccaaagcttagcagtgaaatcattctctcgcaggacaccgaacagctcgtcttattgtccctccgagcctatgatgtcaaccccacctcccgcctctgagctgccgcagccgcagccgcagccccaggccctgcattacgccctggcaaacgcccagcaagtgcagatacaccagattggagaggatggccaagttcaagtaatcccacagggacacctgcatatcgcacaggttccacagggggaacaggtacagataacccaggactctgaaggcaacctccaaattcaccacgttggacaagatggacagctcctggaagccacccgaatcccttgcctgcttgctccaagcgttttcaaggcgagttccggccaggtcttacaaggcgcccaactgattgccgtggcctcatcggacccagccgctgccggcgtcgacgggagccctttacaggggagtgacattcaggtccagtatgtccagctggctccggtgtctgatcataccgcgggcgcacagactgccgaggcattgcaaccaacccttcagcccgaaatgcagctggaacacggcgcaatccagattcagtag

SEQ ID NO: 23159 - DNA, 3153 bp, synthetic construct
  misc_feature 1..3153: note = Description of Artificial Sequence: Synthetic coding sequence
  source 1..3153: mol_type = other DNA
atggccgccgtgaagaaggagggcggcgccctgagcgaggccatgtccctggaaggggacgagtgggaactgagcaaggagaacgtgcagcccctccgacagggaaggatcatgagtacgcttcagggtgcccttgcacaggagtctgcttgcaacaacactttgcagcagcagaaaagagcgtttgaatatgagattcgcttctacaccgggaacgacccactggatgtgtgggaccggtacatctcctggacagagcagaactatccccagggcggcaaggaaagtaacatgtccacattactggagcgcgcggtggaagcgctgcagggcgagaaaagatactacagtgaccccaggttcctcaatctctggctgaaactgggacggctctgcaacgagcctctcgacatgtattcctatctgcataatcagggcataggggtcagtcttgcacagttctacatctcatgggccgaggagtacgaggcaagagagaacttccgaaaggccgacgccatcttccaagaggggattcagcagaaggcggaacccctggaacgactgcagtctcaacatagacagttccaggcccgtgtgtccaggcaaaccctgctggcattggaaaaagaagaagaggaggaggtattcgaatcaagtgttcctcagcgttcaacactggcagagctaaaatccaaaggaaagaaaactgcaagggctcctattatccgggtcggcggcgccctgaaggcgccaagccaaaatcgtggcttgcaaaatccctttccacagcaaatgcagaataattcacggatcacagtatttgacgaaaacgctgatgaggcatccacggctgagctttccaagccaaccgtacaaccttggatcgcaccgcccatgcctcgcgcaaaagagaatgagctgcaagcaggaccctggaacaccggcaggtccctggagcatcggcctagaggcaacacagccagtttgatagcagtacccgcggttctacccagctttactccatatgtcgaagaaaccgcgaggcagcctgtgatgaccccttgcaagatcgaaccctcaattaaccatattctttccacaagaaagcctggaaaagaggaaggggaccctctgcagagagtgcagtcccatcagcaagcgagtgaggagaagaaagagaaaatgatgtactgcaaggagaaaatctatgccggtgtaggagagttcagtttcgaggagatacgtgcagaagtttttagaaagaagctcaaggaacagcgagaggccgagctgctgacctccgcagagaaaagggccgagatgcaaaagcaaattgaggaaatggagaagaagctgaaggagattcagactacccaacaggaacgcaccggggaccagcaagaagagacaatgccaaccaaggaaacaacaaaactgcagattgcctccgaatcgcagaagattccaggaatgacactgtcttccagtgtatgtcaggtcaattgttgcgcccgcgagactagcttggctgaaaatatctggcaagagcagccccatagcaaggggccgagcgttccattctctatattcgatgaatttctgttatcagaaaagaagaacaagtctccacccgccgatcctcctcgagttctcgcacagaggagacccctggcggtgctcaaaacctccgaatctattacatccaacgaagatgtctcccccgacgtgtgcgacgaattcaccggcatagagcccctttctgaagacgctataatcaccgggttccgcaatgtgaccatctgccctaaccccgaagatacgtgcgatttcgcgcgagctgcaaggttcgtatccactcccttccatgagattatgagcctgaaggatcttccctctgatccagagagactattacccgaagaggatctggacgtaaaaacgtcggaagatcaacagactgcctgcggaacaatctacagccaaaccctgagcataaaaaagctctctcctatcatcgaggactcacgggaggccactcattcatctgggttttctggaagctccgctagtgtggcgtccacctcatctattaaatgcctgcagatacccgaaaagctggaactgactaatgagacctctgagaatcctactcaatcgccctggtgttcccagtaccggaggcagttactcaagagcttgccagaattatccgctagtgccgagctctgcatcgaagaccggcctatgcctaaactggagatcgagaaggagatagagcttggaaacgaggactactgtatcaagcgggagtatctaatctgcgaggactacaaactcttctgggttgccccaaggaactctgctgagctgaccgttattaaagttagtagtcagcccgtgccttgggacttctatatcaacttgaaacttaaggaaaggttaaatgaggactttgaccatttctgctcatgctatcagtaccaagatggttgtattgtttggcaccagtacataaattgttttactctgcaggatttacttcagcattcagagtacattacccacgaaatcaccgttctcatcatctataatctgctgactatcgtggagatgctccacaaggccgagatcgtgcatggagacctctcccctaggtgtctgatcctgagaaacagaattcatgacccatacgactgcaacaaaaacaaccaagcccttaaaattgtcgactttagttacagcgtggacttgcgcgtacagctggacgtgttcaccctgtcgggtttccgtacagtccagattttggaagggcagaagatactggcgaattgttcttccccctatcaggtggacctttttggtatcgcagatctggcccacttactactgttcaaggagcatctgcaggtgttctgggacgggtctttctggaaactgtctcagaatatatctgaactgaaagatggggaactgtggaataagttcttcgttcgaattctcaatgctaacgacgaagctacagtgtctgtactgggagaacttgcggctgaaatgaatggcgtttttgacactacttttcaaagtcacctgaataaggccctttggaaggttggcaagcttacctccccaggggctctcctgttccagtag

SEQ ID NO: 23160 - DNA, 3195 bp, synthetic construct
  misc_feature 1..3195: note = Description of Artificial Sequence: Synthetic coding sequence
  source 1..3195: mol_type = other DNA
atggccgccgtgaagaaggagggcggcgccctgagcgaggccatgagccttgagggcgacgagtgggagctatccaaggagaatgtgcaacctttgagacagggaaggataatgagcactcttcagggcgccctcgcacaggaatcggcctgtaacaataccttacagcagcagaaaagagcgttcgagtacgagattcggttctataccgggaacgaccctttagatgtttgggatcgatgggtttttcttttccacaaagacaaccgcaacattaacagatatattagctggaccgagcagaactacccacaggggggaaaagagtcaaatatgtccacactgcttgagcgggctgtcgaggcactgcagggtgaaaagcgttattattccgaccccagatttcttaatctgtggttgaaattagggaggctttgcaacgagcctctggatatgtactcatacttgcataaccaggggataggggtcagccttgcccagttctacatctcttgggccgaggaatatgaagctcgcgagaactttcggaaagcagatgccattttccaggagggaattcagcagaaggcagagcctctggagaggttacaatcccaacatcgccagtttcaggcaagagtgtccagacagaccttgcttgcattggaaaaggaggaggaggaagaggtctttgagtctagtgtcccccaacgatcgaccctagccgaacttaagtcaaagggtaagaaaacggccagggccccaataatcagggtgggtggcgctttgaaagctccatcccaaaatcgtgggttgcagaatccattcccacagcagatgcagaacaactctagaatcaccgtatttgatgagaatgcagacgaggcctccacagcagagctgagcaaaccaaccgttcaaccatggatcgcacctcccatgcccagggctaaggaaaacgagcttcaagcggggccttggaacacaggtcggagtctggaacaccgaccccggggtaacacagccagcctgattgccgtgcccgcagttctgccctcattcacaccatatgttgaagaaacagcccgacagccagttatgacaccttgtaagattgaacctagtatcaaccatatactgtccacaaggaaacccgggaaggaggagggcgatcccctgcaacgcgtccagagtcaccaacaggcttcggaggaaaaaaaagagaaaatgatgtactgtaaggaaaaaatttacgcaggggtcggcgaatttagctttgaagagatccgggctgaggtcttccggaagaaattaaaagaacagcgcgaggcggagctgctcacctctgctgagaaacgggctgaaatgcaaaagcagatcgaggagatggagaaaaagctgaaggagatccagaccactcagcaggagcggaccggtgatcagcaggaggagaccatgcctaccaaggagacaacaaagctgcaaattgcttccgagtcccagaaaataccaggaatgaccctgtcttctagtgtgtgccaggtgaactgttgtgccagggaaacttctcttgccgaaaacatatggcaggaacagccgcactctaagggacctagcgtcccattctccatcttcgacgaattcctcttgtctgaaaagaaaaacaagagcccccctgcagatccacctcgagtcctcgctcagaggaggccgctggcagttctgaaaaccagcgagagtataacaagtaatgaggacgtgagccctgacgtttgcgatgaattcacaggaattgagcctctatcagaagatgcaatcatcaccggtttcagaaatgtcactatttgccccaaccctgaagatacgtgtgactttgccagagctgcgcgcttcgtgagcacacctttccacgaaataatgagcctgaaggacctcccctccgatcccgagaggctcctgcccgaggaggatttagatgttaagactagcgaagatcagcagacggcatgtggtaccatttactcacaaaccttgtccattaagaaactatcgccaattatagaggattctagagaggctacacatagcagcggcttttctgggtcttccgcctccgtcgccagcacatccagcattaaatgtttacagatccccgagaagttagaacttacaaacgaaacatccgagaatccaacccaaagcccctggtgcagtcagtatcgccgccagttgctgaagagcctcccggaattatcagcatctgccgagttgtgcattgaggatcgacctatgcccaaactcgagattgagaaggagatagagctcgggaacgaggattactgtatcaagagagagtacttaatatgtgaggactataagctattctgggttgctccccggaacagcgccgaactgactgttattaaagtcagttctcagcccgtgccctgggacttttacataaatctcaagctgaaagagcgactcaatgaggacttcgaccatttctgttcgtgttaccagtatcaggacgggtgcatcgtatggcaccagtacatcaactgtttcactttgcaggatctcctacagcactccgagtatatcactcatgagatcactgtactgatcatttataatctgctgaccattgtcgaaatgctgcacaaagccgaaatcgtccacggagaccttagcccaagatgtctaattttgagaaaccgaattcacgatccatatgattgcaacaagaataaccaggcccttaaaatcgtggattttagctactcagtggatctgagagtgcaattagacgtattcacactcagcggctttcggaccgtacagattttagaagggcagaaaatccttgccaactgctcctctccataccaagtggacctgttcggcatagctgacctcgcacacttgcttctatttaaggaacaccttcaagtcttttgggacggcagcttttggaagctgtctcaaaacatcagcgagctgaaggatggggagctgtggaacaaatttttcgttaggattcttaatgcaaacgatgaggcaacagtcagcgtcctgggcgagctggcggctgaaatgaatggagtgttcgacacgacctttcagtcccatctcaacaaagccctgtggaaagtcggcaagctaacaagcccaggggccctcctgttccaatag

SEQ ID NO: 23161 - DNA, 2802 bp, synthetic construct
  misc_feature 1..2802: note = Description of Artificial Sequence: Synthetic coding sequence
  source 1..2802: mol_type = other DNA
atggccgccgtgaagaaggagggcggcgccctgagcgaggccatgtctctggaaggggacgagtgggaactctccaaagagaacgttcaaccgttacgccaaggcaggattatgagtacactgcaaggagcattagcccaggagtccgcatgcaacaatacactccagcagcagaagcgtgcattcgaatacgaaatcagattctatacaggaaacgatccactggatgtctgggataggtacattagttggaccgagcagaattatccacagggaggcaaggagtcaaatatgagcaccctccttgaacgggccgtggaagccctccagggcgaaaacttttggaaggccgatgccatatttcaggaggggatccagcagaaggcagaacccttggaacggctccaatcgcagcatagacagtttcaggctagagtatcaagacagactctgctggccctggaaaaagaggaggaagaagaggtgtttgaatcctcagttccgcaacggagcactctggcagagttgaagagtaaagggaagaagactgccagggccccgatcatccgcgtgggcggggcgctgaaggcacctagccagaaccgcggacttcaaaacccctttccacagcagatgcaaaacaattcccgaataactgtcttcgacgagaacgctgatgaggcttcgacagccgaattgagcaagccaaccgtacagccctggatagcgccgcctatgccccgcgcgaaggagaacgaactacaggcgggcccctggaacaccggccgctcattggaacaccgtccacggggaaataccgcctcactgattgcggtccccgctgtcctaccttcctttacgccttatgtggaggagacggctaggcagccggttatgacgccatgtaagattgagccatcaattaaccacattctatccaccagaaaaccagggaaggaggagggagaccccctgcagcgggtacagagccatcagcaggcctccgaagagaaaaaagagaaaatgatgtactgtaaggagaaaatttatgccggggtcggcgagttttccttcgaggagatccgcgcagaagtgtttcgaaaaaagctaaaagaacagcgcgaagctgagctactgacatccgccgagaagcgagcagaaatgcagaagcagatcgaggagatggaaaagaagctaaaggagattcagacaacacagcaggaacgcactggagaccaacaggaggagactatgccaactaaagagaccactaaactgcagattgcgtcagagtctcaaaagatccccgggatgacgctcagcagcagtgtctgccaggtgaactgctgtgctcgtgagacgtccctggcagaaaacatctggcaggaacaacctcattccaaggtgagtttgagcctcggcccctcagtgcctttctcaatatttgacgaatttctcctgtcagagaaaaaaaataaatccccacccgccgatccaccaagggtcctggcccagcgacggcctcttgccgtcctgaaaaccagtgagagtatcacctcaaacgaggatgtctctcccgatgtctgcgacgagttcaccgggattgagcctctctccgaagacgcaatcattactggctttcgcaacgtcacgatatgccctaacccggaagataccagggaggcgacacactcttctggcttctctgggagctccgctagcgtggcatccacgagctccatcaaatgtcttcaaatccctgaaaaactcgagttgaccaacgagacatccgagaacccaacccaatcaccttggtgctctcagtaccggcggcaattgctcaaatctcttccagaactcagcgccagcgccgaactttgtatagaggaccgcccgatgcccaagctggaaattgagaaagagatcgaactcgggaacgaggattattgtatcaagagagagtatctgatctgtgaggactataaacttttttgggtcgccccacgcaattccgcagagcttacggtgattaaagtgagctctcaaccggtgccctgggacttttatataaatctgaagctgaaggaacggctgaacgaagattttgaccatttctgttcgtgctatcagtaccaggatggctgtattgtctggcatcagtacatcaactgttttactttgcaggacctgcttcagcatagtgagtatatcactcatgagattaccgttttgatcatatacaacctcctcacaattgtcgaaatgctgcacaaagcagaaatcgtgcatggcgacctctcaccacgctgcctgatcctccgcaaccgcattcacgacccttacgactgcaacaagaataaccaggctctcaagattgttgatttttcatatagcgttgacctgcgcgtccagctggacgttttcacactttcgggtttcaggacagtccaaatacttgagggacagaaaatactggcaaactgttcctcgccctatcaggttgatcttttcggaattgccgacttggctcatctgctcctgttcaaggaacacttgcaggtgttctgggatggaagcttttggaagctgtcacagaacatcagtgaactcaaggatggcgagctgtggaacaaattcttcgtgagaatcctaaacgcaaatgacgaggcaacagtgtctgtcctgggcgaactcgcggcagagatgaacggcgtgttcgatacaaccttccagtcccatctgaacaaggccctctggaaagtgggaaagctaacctcgcctggcgcactcctgttccagtag

SEQ ID NO: 23162 - DNA, 3393 bp, synthetic construct
  misc_feature 1..3393: note = Description of Artificial Sequence: Synthetic coding sequence
  source 1..3393: mol_type = other DNA
atgctggagatctgcctgaagctggtgggctgcaagagcaagaagggtctttcttcgtcaagctcctgctacctggaagaggctctacagcgccctgtggccagcgactttgagcctcaaggtttgagtgaggctgctcggtggaactcaaaagagaatttgctggccggaccgtcagagaacgaccctaacttgtttgtcgcactctacgatttcgtggcaagcggagataacacactttctattaccaaaggggagaagctgagggtcctgggatataaccacaatggggagtggtgtgaagctcagactaaaaacggacaggggtgggttccttctaattacatcacgccggtgaattcccttgaaaagcattcttggtaccatggccctgtttcacgcaatgcagccgagtatcttctgagtagcggcattaatggcagtttcctggtgagggagagcgagtcaagccccggacaaaggagtatctcccttcggtacgagggtagagtgtatcactaccgcattaatactgcaagcgatggcaagttgtatgtctccagtgagagccgcttcaatactttagccgagctggtccaccatcatagcaccgtggcggacgggttaattaccaccttgcactacccagcgccgaaaagaaataaaccaaccgtttacggagtttcaccaaattacgacaaatgggagatggagcggactgatattactatgaagcataagctgggtggcggtcagtatggagaagtgtatgaaggtgtttggaagaagtactcactgaccgtggctgtgaaaacattgaaggaggacaccatggaggtcgaagagttcctcaaagaagccgccgtcatgaaagaaattaagcatcctaacctcgtccagcttcttggcgtgtgtacgcgagaaccccctttctacatcataaccgagtttatgacctacggcaacttgttggactacttacgggaatgtaaccgccaggaagtgaacgcagtggtgcttctctatatggccacccagattagctcggctatggagtatctcgagaagaaaaacttcatccatcgagacctcgctgcccgcaattgcttagtgggcgagaatcaccttgtgaaggtcgccgactttggcctgtcacgtctgatgaccggagacacctatacggctcatgccggcgccaaatttccaataaaatggacagctccagaatccctagcatataacaagttcagcatcaagtcagacgtttgggccttcggcgtgctcctatgggagatagcaacatatggcatgtcaccctaccccggcattgacctcagtcaggtctacgagctcctggagaaagactataggatggaacggcctgaagggtgtcctgagaaagtgtatgagctgatgagggcttgctggcagtggaatccaagtgaccggccttctttcgctgaaattcaccaggcatttgaaacaatgtttcaggaatcttcgattagtgacgaggtggaaaaggaattgggcaaacaaggcgtgcgcggagcagttagcactcttctgcaggccccagaactccccacaaaaacaagaacaagcagacgggccgcagagcatcgggatactactgatgtccccgagatgccacacagtaaagggcagggggagagcgaccccctcgaccacgaacctgccgtttcccccctccttcccagaaaagaacgaggaccaccagagggaggcctgaatgaggatgagcgcctgctccctaaggataaaaaaaccaatctgtttagtgcgctgatcaaaaagaaaaagaaaactgctccaactccacctaaacggtcctcatcattcagggaaatggatggtcagcctgaaagacgaggagccggtgaagaggagggaagggacatcagcaacggggcactcgcattcaccccattggacactgctgatcccgccaaatctccaaaaccatccaatggcgcaggagtcccgaatggggccctgagggaaagtggcggaagtggcttcagatccccccacttatggaagaaaagttctaccctcacctcctcccgtctggctaccggggaggaagaggggggcgggtccagctctaaacgatttctcagatcttgctccgctagctgtgtacctcatggagcaaaggatactgagtggcgatccgtgaccctcccacgagacttgcagagcactggacggcagttcgacagttcgaccttcggcggtcataaatctgagaaaccagcactacctaggaaacgggcaggcgagaaccggtcagaccaggtgacacgggggactgtgacccctccaccaagactggtgaagaaaaatgaagaggccgctgacgaggtgtttaaggacatcatggaatcttcacctgggagcagcccgcctaacctaactccaaagccactgagaagacaggttactgttgcgcccgcttctgggctgcctcacaaagaagaagccgggaaggggtcagcgctcggtaccccggccgctgccgaacccgtaacccctacttcgaaggctggatctggagcccctggcggcacgtccaaaggtcccgcagaagaatcccgtgtgcgacggcataaacactcaagcgagtccccggggcgcgacaaaggcaagctcagccgtctgaagcctgcccctcctccacctccagctgcctcagctggtaaggccggcggtaaaccctcccagtctccatctcaagaagccgctggcgaagccgtgcttggcgcgaaaactaaagctactagcctagtggacgctgtgaattccgacgccgccaaaccaagccagccaggcgaaggattgaagaaacccgtgctgccagccacaccgaagcctcagtctgcgaaaccatccggtactcccatctctccagccccggtcccgtccacactaccctctgcaagctctgctctggccggggaccagccatctagtacggcatttatacctttgatttctacaagagtcagcctgcgcaaaaccaggcagcctccagaaaggattgctagtggggccatcaccaagggcgttgttctcgactctaccgaggccctttgcctggctatttcacgcaatagtgagcagatggcatcccatagtgcagtgctcgaagccggcaaaaatctctacactttctgtgtatcttatgttgactccatccagcaaatgaggaacaaattcgcctttcgggaagccattaacaagctcgagaacaacctgcgggaactgcagatttgtcccgccaccgcaggctccggacccgccgccacacaagacttctctaaacttttgagcagcgttaaggaaatttctgatatcgtgcaaagatag

SEQ ID NO: 23163 - DNA, 3450 bp, synthetic construct
  misc_feature 1..3450: note = Description of Artificial Sequence: Synthetic coding sequence
  source 1..3450: mol_type = other DNA
atgggccagcagcccggcaaggtgctgggcgaccagcggcggcccagtttacccgccctccattttataaaaggtgccggtaagaaggagtccagcagacatgggggaccacactgcaacgtttttgttgagcacgaagcactacaaagaccggtggccagtgattttgagccacaagggctgtcggaggcggcccggtggaactctaaagaaaacctgctggcggggccgtctgaaaatgatcccaatctcttcgtcgccctatacgatttcgttgcatctggagataacactctttctataaccaaaggggaaaaacttcgggtgttaggttacaatcacaatggtgagtggtgtgaggctcagaccaaaaacgggcagggatgggtgccctccaactacattacacccgtcaacagtttagagaaacattcttggtatcatggcccagtctctcggaacgctgctgagtaccttctctctagtggcatcaacggcagcttcctggtccgggaatctgagagtagcccaggacagcgttcaatatccttgcgatacgagggtcgagtttatcattataggatcaatactgcgagtgacggcaaactgtatgtgagcagcgagtccagattcaatacgctcgcggagttggtacaccatcatagtacagtggccgatggcctgatcactacattgcactatccagcccctaaacgcaacaagcccaccgtgtatggtgtttctcccaattacgataaatgggagatggagcgaaccgacataactatgaaacacaaactgggaggcgggcagtacggagaagtctatgagggtgtctggaagaaatactctctgactgttgcagtcaaaaccctaaaggaggataccatggaggtggaagagttcctgaaagaagccgcagttatgaaggaaatcaaacaccccaacctggtgcagctccttggagtctgcaccagggagccccccttctacataataaccgagtttatgacgtacgggaacttactcgactatctgagggagtgcaacaggcaagaggtgaacgctgttgtgctgctgtatatggcaactcagatcagctctgctatggaataccttgaaaaaaagaatttcatccaccgggatctcgccgcaaggaactgtctggtcggggagaatcatctggtgaaggtggccgactttgggctgtctcgacttatgactggagatacatatactgcccacgctggagctaaatttcccattaagtggacagccccagagtcattagcttataacaaattctctataaagagtgacgtttgggctttcggggtcctgctgtgggaaatcgccacttacggcatgagtccttatcctgggattgatctcagccaggtctatgagcttttagaaaaagactaccgcatggagagaccagagggctgtccagaaaaggtctatgagttaatgagggcgtgttggcagtggaacccctcagataggcctagcttcgccgaaattcaccaagccttcgagaccatgtttcaagaaagctccatcagcgatgaagtggagaaggagctggggaaacagggtgttcgcggagcagtgtctactcttcttcaagcacccgagcttccaacaaagaccagaacctcacggcgagccgccgagcacagagataccactgatgtgccggagatgcctcactctaagggccagggcgaatccgatccactggaccacgagccagccgtgtctcccttgctcccaaggaaggagaggggccctccagaaggaggcttgaatgaggatgaacgcctcctccccaaggataagaagaccaacctattttccgcactgatcaaaaaaaaaaaaaagaccgcccccacacccccaaagcgcagttctagcttcagggaaatggatggccagcccgagcgtagaggcgctggtgaggaggagggacgcgatatttcgaacggcgctctcgcctttactcctctggatacagcagatcctgctaaatcaccgaagccttctaatggcgccggcgtgcctaacggtgccctgagggagtccggcggtagtggcttcagaagcccacatctttggaaaaaatctagcaccctgacttcgtcacgccttgccacaggggaagaagagggaggagggagcagcagcaagcgcttcttacgctcctgctctgcatcctgtgtgccacacggtgcgaaggacacagaatggcggtccgtgactttacctagggacctccagtccactgggaggcagttcgatagctccaccttcggggggcacaagagcgagaaacctgccctgcctcggaagagagctggggaaaatcggtccgatcaggtgacccgcggtaccgtaacaccacccccccgcctggtcaaaaaaaacgaagaagccgctgacgaagtgtttaaagatatcatggagagctctcccggttccagtcctcctaatttaacccccaaacccctcaggaggcaggttactgtggcccccgcctctggcctgccacacaaagaggaagctggaaaaggctccgccctgggaacccctgccgcagccgagcccgttacacctacgtctaaggccggctctggtgctccaggcgggaccagcaaggggcccgcggaggagtcaagggtgagacggcacaagcactcaagtgagagcccaggcagagacaagggcaagctcagcaggttaaaaccggcccctcctccacctcctgcagcttcggctggaaaggcaggtggaaagccttcgcaatctccctcccaggaggcagctggcgaggctgttcttggggcaaagacaaaagctacatcccttgttgatgcggtgaatagcgacgctgccaaaccatcacagcctggcgagggtctaaagaaacccgtcctgccagctaccccaaagcctcagtccgccaagccatccgggactcctatatccccggctcctgtcccgtctactctgccttccgcctcttctgcactcgccggggatcagccctctagcactgccttcattcctctgatcagcacacgcgtgtcactccggaagacaagacaaccgccagaacgcatcgcttccggagcaataaccaaaggcgtggttcttgattcaaccgaggcgctatgtttggctatcagccggaattctgagcagatggctagccacagcgccgtgcttgaagctggcaagaacctgtacacattctgtgtgagttacgtggatagcatccagcagatgaggaataagttcgcattccgtgaagccatcaacaaactcgaaaacaatctgcgagagcttcaaatctgccccgctactgctggctcaggacctgctgccacccaggacttttccaagctactgtcgagcgtgaaggaaattagtgacatcgttcagagatag

SEQ ID NO: 23164 - DNA, 195 bp, synthetic construct
  misc_feature 1..195: note = Description of Artificial Sequence: Synthetic coding sequence
  source 1..195: mol_type = other DNA
atgggccagcagcccggcaaggtgctgggcgaccagcggcggcccagcctgcccgccctgcatttcattaaaggtgcaggaaagaaagagagttcacggcacggagggcctcactgcaacgtttttgtcgaacaggcgctccagaggccggttgcctctgactttgaaccacaggggttgtccgaagccgcatag

SEQ ID NO: 23165 - DNA, 486 bp, synthetic construct
  misc_feature 1..486: note = Description of Artificial Sequence: Synthetic coding sequence
  source 1..486: mol_type = other DNA
ggccggcccggccggagccgggcccggggcggcggcgagggcggctggagagggggcggaagggccggtcgcgctggccccgaacctggccctcgcgcggggcggggcgtacctgctcccgactgctggagaggtaaaatgctagagatctgcttgaaactggtaggctgcaaatctaagaagggattgagttccagtagttcttgctaccttgaagaggcacttcaaagacctgtggccagtgactttgaacctcagggtttgagcgaggccgcccgttggaattccaaggagaatctattggcaggtcctagcgagaatgatccaaatctcttcgtggccctgtatgatttcgtggcttccggcgacaatactctttcaatcacaaaaggcgagaaactccgcgttttgggttataatcataacggcgaatggtgtgaagcacagacgaagaacgggcaaggctgggtccctagtaactattag

SEQ ID NO: 23166 - DNA, 2838 bp, synthetic construct
  misc_feature 1..2838: note = Description of Artificial Sequence: Synthetic coding sequence
  source 1..2838: mol_type = other DNA
ctgcggctgctgcgggagcccctgcagcaccccggccgggtgggctcgagttccttcaatgggggacgtcgcgcccaccaccatgctcccctaagctcaccaaaggcccagcaggctcattgcctgtggtgtgtgccacaactgcgccaggtcggggatgggactcatggccatcatcatgaagcccaagggggcggacagtacggggaagtgtatgaaggagtgtggaagaaatacagcctgaccgtggctgtgaaaacactcaaagaggataccatggaagtggaagagttcttgaaagaggctgccgtcatgaaagagataaagcaccccaacctggtccaactgctcggagtgtgcactagggagccgcccttttacataattacagaatttatgacctacggcaaccttctcgactacctgcgcgagtgtaacagacaggaggtaaacgccgtcgtgctgctgtacatggccacccaaatttccagcgcaatggagtatttggaaaagaaaaacttcatccatagagacctagccgctcggaactgtctcgtgggcgaaaatcatctggtgaaagtagccgatttcggcctgagccgcctgatgaccggggacacctacactgctcacgcaggcgccaagttcccaattaagtggaccgcacctgaaagcctggcctacaataagttttctattaagagtgacgtatgggcatttggagtccttctctgggagatagcaacatacggcatgtctccctatcccggtatcgacctgtctcaggtctatgaacttttagagaaagactacagaatggaacggcccgaggggtgccccgagaaggtgtacgagctgatgcgggcatgttggcagtggaacccaagcgaccggccttctttcgctgagatccatcaggcctttgagactatgtttcaggaatcctccattagcgacgaagtggagaaggagctgggaaagcagggggtgcgcggggccgtctccactctcctgcaggcaccggaactgcctacaaagacaagaacttcgagaagagctgccgaacatcgtgacacaaccgacgtgcccgagatgccccactcgaaaggacagggagagtccgaccccctcgaccacgagcccgctgtgtcaccgctgctgccccggaaagagagggggccacctgagggggggctgaacgaggacgagaggctcctaccgaaagataaaaagacaaacctcttctccgctttgatcaagaagaaaaagaagaccgcgcccacacctcctaagcgctcttccagttttagagagatggatgggcagcccgaaaggcggggggcaggagaggaagagggcagggacataagcaacggggcccttgcattcacgccactggatacggctgatccagccaagagcccgaagccatccaacggtgccggtgtccccaatggtgcactgagagaaagcggaggctccggatttcgttctccccacctttggaaaaaatcctctactctgacgtccagtcgcctggctaccggcgaggaggaaggagggggttcctcttctaaacgctttctgaggagctgcagtgcatcctgtgtgccccatggcgccaaggatactgaatggcggagcgtgactctcccccgcgatctccagagtaccggccggcaatttgatagtagtaccttcggggggcataagagcgaaaagcctgccctgccacgtaagagagccggcgagaaccggtcagaccaggtcacacgggggacagtcaccccccccccacgactggttaaaaaaaacgaggaggcggcggatgaggtgtttaaagatatcatggaaagctctccgggatcgtcccctccaaatctgacccctaaacctcttaggcggcaggtgacggtcgcccccgcatctggactgcctcacaaggaagaggcgggaaaggggtctgccctggggaccccagcagccgctgagcccgtgactcccacaagtaaggccggttccggtgcccctgggggcacatctaaaggacccgcagaagagagcagggtccgccggcataagcacagtagcgagagtccaggaagagataagggaaagctcagccggctgaaacccgcccccccccccccgccagctgctagcgcggggaaggcgggtggcaagcccagtcagtctccgagtcaggaagccgcaggtgaggccgtgctgggtgccaagacaaaggccacttcccttgtcgatgcagtgaatagtgacgcagcgaaaccttctcagcccggcgagggtctgaaaaagcctgttctgccggcaactcctaaaccacaaagtgcaaagccgtcaggcacccccatctccccggctccagtgccaagcaccttgccctcagcttcctccgccctcgccggagaccagccaagctccacggccttcattccacttatcagcacgcgggtgtcgctgcgcaagacgcgacagccaccagagcgcatagcctccggtgccatcaccaagggcgtcgttctggactccacggaggccctttgtttagccatttccaggaattccgagcagatggcctcccacagcgccgtgcttgaggcagggaagaatctatacactttttgtgtgtcctacgtcgacagcatccagcagatgcgcaataagttcgcctttcgggaggctatcaacaaattggaaaacaatttgcgagagcttcagatctgccctgcaacagctggaagtggacctgccgcgacgcaagactttagtaaactcctgtctagcgttaaggaaatcagtgacatcgtccagcggtag

SEQ ID NO: 23167 - DNA, 2649 bp, synthetic construct
  misc_feature 1..2649: note = Description of Artificial Sequence: Synthetic coding sequence
  source 1..2649: mol_type = other DNA
atgggcccctggagccggagcctgagcgccctgctgctgctgctgcaggtgtcatcttggctctgtcaggagccagagccatgtcaccccggatttgacgcagagtcttataccttcaccgtcccccgcaggcacctggaacgagggagagtcctcggcagagtgaatttcgaagactgcacaggacgtcagagaactgcttatttcagcttggacacaagattcaaagtcggcacggacggtgtgattactgtgaagaggcctctccgattccacaacccccagatccactttctcgtctatgcttgggatagcacctatcgaaaattttcgaccaaagtgactttgaacaccgtggggcatcatcaccggccgcccccacaccaagcctccgtgtctgggatccaagctgagctcctgacttttcctaattcctccccagggttgaggcgccagaagagagactgggttattcctcctatctcgtgtcctgaaaatgaaaaggggccttttcctaagaacttagtgcagataaaatccaacaaggataaagagggaaaggtgttttactcgattactgggcagggagcagacaccccacctgtgggagtctttataatcgaaagagagaccggttggttgaaggtgacagaaccacttgatagagaaagaattgcgacatatacactattcagccatgctgtgagctctaatggtaacgccgtagaagacccaatggagattctgatcacagtgactgaccaaaacgacaataaaccagaattcacacaggaggttttcaaggggtcggtgatggaaggcgccctcccaggcactagtgttatggaggtgacggccacagacgccgatgatgacgtgaatacgtataatgctgcaatagcttacaccatcctgagccaagacccagagctccctgacaagaatatgtttactattaatagaaatacaggcgtcatttctgtcgtgaccactggcctcgacagagaaagcttccccacttacacgcttgtggtgcaggccgccgaccttcagggggagggtttgagcactaccgctaccgcagtaatcaccgtgacagataccaatgataacccacccatctttaatcccaccacttataaagggcaggtgccggaaaacgaagccaatgtggtgatcacaactctcaaggtgacagacgcagacgctccaaacacaccagcgtgggaggccgtttacacaattcttaacgacgatggagggcagttcgtggttaccacaaacccagtcaataacgatgggatacttaagaccgctaagggcctcgacttcgaggcaaagcagcagtacatcctccacgtggctgtgacaaacgtggttccattcgaagtgtcgcttaccacttctacagccacggtgaccgtggatgtactggacgtgaatgaggcacccatctttgttcccccggaaaaaagagttgaggtgagcgaggactttggtgttgggcaggaaattactagttacaccgcacaggagcccgacacattcatggaacagaaaataacttataggatatggagagatacagctaactggctagaaattaaccccgacacgggcgccatatcaacacgggcggagctagaccgggaagatttcgagcacgttaagaatagcacatatactgccttaatcatcgccaccgataatggaagcccagtcgccaccggtaccgggaccctgctgttgatactctccgatgttaacgacaacgcccctatacctgagccgcggaccatattcttctgtgagcggaatcccaagccgcaagttatcaacatcatcgacgcggacctgcccccaaatacatctcctttcactgcagagttgacccacggtgcatcagctaactggacaattcagtacaacgaccctacccaggagtccattatccttaagcctaagatggcacttgaagtcggtgattataagatcaacctcaagctcatggataaccaaaataaagaccaagtgacaaccctcgaggtgagcgtttgcgattgcgagggcgccgctggagtctgcagaaaagcccagccggtcgaggcagggctgcagatccccgctatcttgggtatcctcggcggcatcctggccttactgatccttatacttctgcttctcctattcctgagaagaagggccgtggtgaaggaacctcttctcccaccagaggacgatactagagataatgtgtattactatgatgaggaagggggtggcgaggaagatcaggactttgacctgtcccagctgcataggggactggacgctaggcctgaagtcacaaggaacgacgtcgccccaacactgatgagcgtgcccagataccttccacgacccgcaaatcccgacgaaatcggaaacttcatagacgagaatttgaaggctgccgacacagatccaactgcacctccttacgactccctgctggtcttcgactacgaggggtccgggtctgaggccgcatcactgtcatcacttaactcctcagagagcgacaaagatcaggattacgattacctgaatgaatgggggaatcgtttcaaaaaactcgcagacatgtacggaggtggggaggacgattag

SEQ ID NO: 23168 - DNA, 1944 bp, synthetic construct
  misc_feature 1..1944: note = Description of Artificial Sequence: Synthetic coding sequence
  source 1..1944: mol_type = other DNA
atgggcccctggagccggagcctgagcgccctgctgctgctgctgcaggtttctagctggctttgtcaggagcccgagccgtgtcaccccggatttgatgctgaatcctatacctttaccgtgcctaggagacacctggaacgtggaagggtactcggccgtgtgaatttcgaggactgcactggtaggcagaggacagcttacttctccctggacacgcgcttcaaggtaggcaccgatggcgtgattacagtgaagagacctctgagattccacaatccgcagatacactttttagtgtacgcgtgggattccacttaccgtaaattctctaccaaggtgactctcaacactgtcggccaccatcatagaccccctccccaccaggctagtgtgtcaggcattcaggccgaactgctcacctttccaaactcctcgccagggctgcgacggcaaaaacgcgactgggtgataccgccaatctcctgccccgagaacgaaaaaggcccttttcctaaaaacttggtgcaaattaagtcaaacaaagataaggagggcaaggtattttacagtattactggacagggggcagacactccacctgtcggggtgttcatcatcgaaagagagacgggctggttgaaggtcaccgagcctttggatcgcgagaggattgctacctataccttattcagccacgctgtgagtagcaatggtaatgccgtcgaggatcccatggaaatactgatcactgttacggaccagaacgacaacaaaccagagttcacgcaagaggtatttaagggctctgtaatggagggcgcactgccagggaccagcgtgatggaggtcacggctactgacgccgatgacgacgtcaacacctataacgccgccatagcttataccatcctgagtcaggatccagagctccccgacaaaaatatgttcacaataaatcggaacacaggggtgattagcgttgtaactacgggactcgaccgcgaaagtttccctacctacactctggtggtccaggcagccgaccttcagggtgaaggactgagcaccactgcgactgccgtgatcaccgtcacagacaccaatgacaatccacctattttcaaccccaccacctataagggccaggtcccagaaaatgaggccaacgtggtgatcacaaccctcaaagtgacagatgccgacgctcctaatacccctgcttgggaggcagtgtacacaatacttaacgacgatgggggacagttcgtcgtgacgacgaaccctgtcaataatgacgggatcctcaaaacagctaagggactggattttgaggcaaaacaacaatacatactgcacgtggccgtgaccaacgtggtcccttttgaagtctcattgaccacgtccaccgccacggtgacagtagacgtgcttgacgtaaatgaggccccaatcttcgttcctccagagaaaagagtggaggtatctgaggacttcggggtagggcaagagattacctcatataccgcccaagagccagataccttcatggagcaaaaaatcacatacaggatctggcgggacacagctaattggttggagattaatccagataccggggccatatctactcgcgccgagttggaccgcgaagacttcgaacatgtgaaaaattccacttataccgcgctgattattgctacagataatggttcccccgtcgctacgggtactggcaccctgctgcttattctgtcagatgtgaacgataacgcacccatccccgagccgagaacaatctttttttgcgagaggaatccaaaaccacaggtcattaatattatcgacgctgatctgcctccaaatctcgcctctcagtctatcgggataacagacatgtctcattgtacttgcccggccccccaactgcccgcaattttttag

SEQ ID NO: 23169 - DNA, 2703 bp, synthetic construct
  misc_feature 1..2703: note = Description of Artificial Sequence: Synthetic coding sequence
  source 1..2703: mol_type = other DNA
atgggcccctggagccggagcctgagcgccctgctgctgctgctgcaggtcagctcatggctgtgtcaagagccagaaccatgccaccccgggttcgacgccgaatcctacaccttcactgtcccccgacgccacctcgagcgcggcagagtcctgggccgggtgaacttcgaggactgcacaggtcggcagaggaccgcctatttttcgttggataccagatttaaagtcgggaccgatggagtcatcaccgtcaaaaggccgctgcgatttcacaatccccaaatccacttcctggtgtacgcctgggattccacatatagaaagttctcaactaaggtgaccttaaacacggtgggacatcaccacagaccgcccccccaccaagcttctgtttcagggatccaagcagaactcctcaccttccccaactcatctccagggctccggaggcaaaagagggactgggtgattcctcctattagttgtccggagaacgagaagggcccattccccaagaatctagtgcagattaagtcaaacaaagacaaggaaggcaaagtgttctattccataaccggccagggggctgataccccacccgtgggagtttttatcatcgagagagagaccggttggctcaaagttactgagcccctggaccgcgagcgtattgcaacttacacccttttcagccatgctgtttcctcgaacgggaacgctgtggaagaccctatggagattctcatcacagtcactgaccaaaacgataacaaaccagagtttacacaggaggtctttaaaggaagcgtgatggaaggggctctcccaggcaccagcgtgatggaagtaactgctaccgacgctgacgatgacgttaatacatataacgccgccatcgcctatacaatcttatctcaggaccccgagttgccagataaaaacatgtttaccattaaccgaaatactggagtgatttccgtcgtgactaccggtctcgatcgcgagagtttccctacgtatacgctagtcgtgcaggccgctgatctacagggggaggggctgtccactactgcaacagccgtcatcacagtcactgacacgaatgataaccccccaatatttaatccaacgacctacaaagggcaggtccctgagaacgaggccaacgtggtgatcactacattgaaggtgactgacgctgatgctcctaacacccctgcgtgggaagctgtttacacgatcctgaatgacgatggcgggcaatttgtagtgactaccaatcctgtgaataatgatggaattttgaagacggccaagctcgccagatgccgcaactggcacccccattcgtgttcctacccttgtcccctgggtctggactttgaggccaagcaacagtacattctgcacgtagcagtgacaaatgtcgtcccttttgaagtctcactgacaaccagcactgccaccgtcacagtggatgtgctggatgtgaacgaagcccctattttcgtgccacctgaaaaacgtgtggaggtgagtgaagacttcggcgttgggcaggagattactagttatacagctcaggagcccgacacctttatggagcaaaagataacctatcgtatttggcgcgatactgcgaactggcttgaaatcaacccagacaccggcgctatctctactagagccgaattggaccgggaagacttcgagcacgtcaaaaattctacctataccgcactcattattgccactgacaacggaagccccgtggctaccgggacaggaacgttgcttctcatcttgtccgatgtaaacgacaacgccccaattcctgaacctcggacgattttcttttgtgagcgtaacccaaagcctcaggtaatcaatataatagatgccgacttacccccaaatactagcccattcaccgcagagcttacacacggggccagcgccaactggactatccagtataacgatcctacacaggagtccatcatcctaaagcccaagatggcacttgaggtgggtgactacaaaataaacttgaaacttatggataaccagaataaagatcaagttaccactctcgaggtttccgtttgtgactgcgaaggagccgccggtgtttgtagaaaggcgcagccggtagaggccggtctccaaatccccgcgatattaggaatcctcgggggcattctcgccctgctgatcctcatcctcttattgttattgttccttcgccgcagagctgtcgtgaaggaacccctgcttcccccagaagacgacacaagggacaacgtgtactattatgacgaagaaggaggaggagaagaggaccaggattttgacttgtctcaattgcacaggggcctcgacgcgcgtcccgaagtgactcggaacgacgtggccccaacactcatgtccgtcccacgctacctgcctaggccagccaatcctgacgagatcggcaatttcattgatgaaaacctgaaagccgcagacactgacccgacagcacccccctacgacagcctgctagttttcgattacgaggggtctggaagcgaggccgcttcactctcctcactgaattccagtgaatccgacaaggatcaggactacgattatctgaatgagtggggaaatcggttcaaaaagctcgcggacatgtacggagggggcgaagacgattag

SEQ ID NO: 23170 - DNA, 2466 bp, synthetic construct
  misc_feature 1..2466: note = Description of Artificial Sequence: Synthetic coding sequence
  source 1..2466: mol_type = other DNA
atgggcccctggagccggagcctgagcgccctgctgctgctgctgcaggtcagttcctggctgtgccaagaacccgagccgtgtcaccccggctttgatgccgagtcttatactttcaccgtgcccagaagacacctcgagcgagggcgagtactgggaagagtcaactttgaagattgtaccggtaggcagaggaccgcctatttcagcttagacacacgattcaaagttggcacagatggcgtgatcacagtgaaacggccactccgattccataaccctcaaatccactttctggtgtatgcttgggacagtacttaccgcaaatttagcaccaaggtcaccctaaacactgtgggtcatcatcatcgccccccaccccatcaggcctcagttagcggtatacaggctgaactcctcacattcccaaatagtagccctggtctgaggaggcagaaacgcgactgggtgattcctccaatcagctgtccggaaaacgagaaaggtccctttccgaagaatttagtgcagattaaaagtaataaggataaagaaggcaaagtattctatagcattacgggacagggcgcagatacacctcccgttggcgtctttattatcgagagggagacaggctggctgaaagtgaccgaaccactcgaccgggagaggatcgcgacatacaccctgttttctcatgctgtgagctcgaacggaaacgccgtcgaagaccccatggaaatcctgattaccgtgacagatcagaacgacaacaagcccgagttcacccaggaggtcttcaagggatccgtgatggaaggggcattgcccgggacaagcgtaatggaggtgaccgctacagatgctgacgatgacgtcaatacatataatgccgcaatcgcttatacaatcctctcccaggacccagagttgccagataaaaacatgtttaccataaatcgcaacaccggcgtaatttccgttgtgaccacaggccttgaccgcgaaagtttcccaacttacacgctcgtagtgcaggccgctgatctccaaggggagggcctgagcaccacggccacagcagttataacagtcacggataccaatgacaatccgcccatttttaatccaaccactggcctcgactttgaggctaagcagcagtatattctgcatgtggctgtcactaacgtagtgccatttgaggtctcactgactacgtccacagcaaccgtgactgttgatgtactggacgtgaatgaagcaccaatctttgtgcctcccgagaaaagagtagaagtgagcgaagattttggcgtgggtcaggagatcactagctacacggctcaggagcccgacactttcatggaacagaagataacttatcgaatctggcgagacactgcaaattggctggagataaacccagatactggcgctatttccacacgggctgaattagaccgggaagacttcgagcacgtgaaaaactccacatacactgccctgattattgcaaccgataacggaagcccagttgccacaggcaccggcacattgctgctcattctctccgacgtgaatgataatgccccaattccagagccaaggaccatcttcttctgcgaaaggaacccgaagccacaggtgatcaacattattgatgccgacctaccacctaacacaagcccgttcactgctgaattgacccacggtgctagtgccaactggacaatacagtacaacgatcccacccaggaaagcattatactgaagcccaagatggcccttgaggtcggcgactataaaattaatctcaagctgatggacaaccagaacaaggaccaggtaaccaccctcgaagtgagtgtctgcgactgtgagggagcagcgggtgtttgccggaaagcacaacctgtcgaggcgggtctgcagattccagccatccttggcattctaggaggtatcttggctctccttatcctgatcctcttactgctactctttctcagaagaagagccgtcgtaaaggagccccttttgccgcccgaggatgatacacgtgataatgtttactattacgatgaagagggggggggcgaagaggatcaagacttcgacctgtcacagttacacagaggcctggacgctcgcccggaggtcacacgtaacgacgtggctcctacacttatgtctgtcccccgatatctgcccagaccagccaatccagacgaaattggcaactttatcgacgagaacctgaaggccgcagacaccgacccgactgcgcctccatatgacagtttactcgtcttcgactacgagggcagcggaagcgaggcagcatctctgagctctctaaactcttctgagtccgacaaggatcaggactacgactacctgaacgagtggggcaaccgcttcaaaaagctggcagacatgtatggggggggagaggatgattag

SEQ ID NO: 23171 - DNA, 2391 bp, synthetic construct
  misc_feature 1..2391: note = Description of Artificial Sequence: Synthetic coding sequence
  source 1..2391: mol_type = other DNA
atgaaggagaactactgcctgcaggccgccctggtgtgcctgggcatgttgtgtcacagtcacgcatttgcccctgaacgcagaggtcatctgaggccctccttccacgggcatcatgagaaaggaaaggaggggcaggtgctacagcgctccaaaaggggatgggtatggaatcagtttttcgtaattgaagagtacacaggacctgatcctgtgctggtgggacgtctacactcagatattgattcaggcgatggcaatatcaagtatattctgagcggagaaggcgccgggacaattttcgtgatcgatgacaaatctggcaatatccacgctaccaagacccttgaccgagaggagcgcgctcagtatacccttatggctcaggcggttgacagggacacaaaccggcctcttgagccaccttctgagttcatcgtgaaggtgcaggacatcaatgataatccgcctgaatttttgcatgagacttatcatgctaatgttcctgagagatctaatgtcggcacttccgtgatccaagtgactgcaagcgacgccgacgatccaacttatggcaacagcgccaagttagtctattcaattttagaggggcaaccctactttagtgtcgaagctcaaaccggaatcatacggacagctttgcctaatatggaccgtgaagctaaagaggaataccatgtggtgattcaggccaaggacatgggcgggcacatgggtgggctctccggaactactaaagtgactatcactctgacagacgtgaatgacaacccgccaaaatttccccagtcagtctatcagatgagtgtcagcgaggcagccgtgcctggagaagaagtcggaagagtgaaggcgaaagaccctgatattggggagaacgggttagtcacctataatatcgtagacggggacgggatggaaagttttgaaattacgacagattatgagacacaggagggtgtgatcaaactcaagaagccagttgactttgagactaaacgagcatacagtcttaaagtcgaggccgctaacgtgcatatcgaccccaagttcatcagtaacggccccttcaaagacacggtgaccgtcaaaatttccgtcgaagatgcagacgagccaccaatgttcctggccccaagttatatccacgaagtacaagaaaatgccgctgctggcactgtcgtgggacgcgtccacgcaaaggatccagacgccgctaacagcccgattagatacagcattgaccggcacaccgatcttgaccgtttttttactatcaatcctgaggacgggtttatcaaaaccacgaaacctcttgatagggaggaaacagcctggctcaacatcaccgtgtttgccgccgagatccacaacaggcatcaagaggccaaagtccctgtggctatccgggtactggatgttaatgataacgctccaaaattcgctgccccatacgaaggatttatctgtgagtccgaccagaccaagccgttgtccaatcagcccattgtgaccatatccgcagatgacaaagatgacaccgccaacggcccccggttcatcttttcacttcctccggaaatcattcataatcctaatttcacggtgcgggataatcgagataatacggcaggtgtgtacgccagaagaggaggattcagcagacagaaacaagatctgtacctgctgcctatcgtgatttcggatggagggattccaccgatgtcaagcacgaacaccctgacaataaaagtctgcggatgtgacgtcaatggggcactgctttcgtgtaatgcagaagcttatattctaaacgccggtctaagtaccggcgcgctgattgctatcttggcatgcatcgtgatcctgctggtaattgttgttttgtttgttacattgcgacggcagaaaaaggaacctctcatcgtgtttgaggaggaggatgtccgggagaatatcatcacttacgacgatgaaggaggtggagaggaagacaccgaggctttcgacatcgcaactctccagaacccagatgggataaatggttttattccccgaaaagatattaaacctgaatatcagtatatgccacgccctggcttgcgccctgcccctaactctgtggatgtagacgatttcatcaatactagaatacaggaggctgacaatgatcctactgcccccccatatgactcaattcaaatctatggctatgagggcagggggtcagttgctggaagccttagctctcttgagtcggctaccactgactctgacctggactacgactacctgcaaaactggggcccgaggttcaagaaactggctgacttgtacggctcaaaagatacctttgatgatgatagttag

SEQ ID NO: 23172 - DNA, 2082 bp, synthetic construct
  misc_feature 1..2082: note = Description of Artificial Sequence: Synthetic coding sequence
  source 1..2082: mol_type = other DNA
atgaaggagaactactgcctgcaggccgccctggtgtgcctgggcatgctatgccacagccacgcattcgcaccggagcgcaggggtcacctcagaccatcctttcacgggcaccacgaaaagggaaaggaaggacaggtcctccaacgctcaaaaagggggtgggtctggaaccagttcttcgtcattgaagagtataccggcccggatccagtcttagtcggccgccttcatagcgacattgacagcggtgacggtaacataaagtatattctgtcgggtgaaggtgcgggcaccatcttcgtcatagacgacaaatcgggtaatatccacgcaactaagactctagaccgggaagaaagagctcaatacactcttatggcccaggccgtggaccgcgataccaatcggcccctagagccaccctccgagttcatcgtgaaggtacaggatatcaacgataaccctcccgaatttctacacgaaacataccacgccaatgttcccgagcgtagcaacgtcggaaccagtgtaattcaggtcactgcgtctgatgccgatgatcctacctacggcaatagtgcaaaactcgtttacagcatactcgaggggcaaccttacttttctgtggaagcacagacagggatcatacgcactgcgttaccgaatatggatagagaggctaaagaagaatatcatgtggtaattcaagccaaggacatgggaggtcacatgggcggcctctcagggaccaccaaagtcaccatcaccctgaccgatgttaatgataatcctcccaaattcccacagagcgtctaccagatgagcgtctccgaggccgcggttcccggggaagaagtgggccgcgtgaaggccaaagaccccgacattggggagaatggcttggtgacatacaatatcgtggatggagacggtatggaatcatttgagattactacggactatgagacccaggagggcgtaattaagcttaaaaagcccgtggattttgaaaccaagcgtgcatacagcctgaaagtggaagccgctaatgttcacattgatcctaaattcattagcaatggtccatttaaggatactgtgaccgtcaaaattagcgttgaagatgccgatgagcctcccatgttcttggccccttcttatatccatgaagttcaggagaacgcagcggctgggacagtggttggcagggtccacgctaaggatcctgacgctgcaaacagcccgatccgttatagcatcgacagacacaccgacttagacagattctttactatcaatcctgaagacggattcatcaaaaccacgaaacctcttgaccgcgaagaaaccgcatggctgaatataactgtgtttgcagccgagatccataataggcaccaggaagccaaggtgcctgtcgccatcagggtgctcgacgtcaatgataatgcaccaaaattcgccgccccctacgagggctttatttgcgagagcgaccaaaccaaaccgctgtccaatcaacctattgtgactatctccgccgacgacaaggatgacaccgccaacggcccacgattcatcttttctctccctcccgagattatacataaccctaactttactgtgagggacaatcgcgataatacagccggcgtatatgcaagacggggaggcttctctcgccagaagcaggacctgtacctgctgccaattgttatatccgacgggggcatcccacccatgagttcaaccaacacgctcaccatcaaagtctgtggctgtgacgttaatggagccctgctgagctgtaatgccgaggcatatatactcaatgctggcctgtcaaccggagcgctgattgcgatcctcgcatgtatcgtgattctccttggctgtccatcactcatggaacccccaagtccacgcgaagatatgagactgctctacctagggttccagctcatgcttttctcctacgtaaaggtgaaccgccgcttctgtctccttggagtcttcattaaactgcccttcctctatgtggtggcaaccgagtccccaacgaccctgacttctctgtag

SEQ ID NO: 23173 - DNA, 516 bp, synthetic construct
  misc_feature 1..516: note = Description of Artificial Sequence: Synthetic coding sequence
  source 1..516: mol_type = other DNA
atgaaggagaactactgcctgcaggccgccctggtgtgcctgggcatgctgtgtcacagccatgccttcgccccagagagacgcgggcatctcagaccctccttccatggacatcatgagaaggggaaggaggggcaggttctacaacgctctaaaagaggctgggtctggaatcagtttttcgtcattgaggagtacaccggaccggatccagtgctcgtcggacgcttgcactctgacattgattcaggtgatggcaacattaagtatatactgagcggcgagggcgccggaaccatctttgtgattgatgacaagagcggaaacatccacgcaaccaagacactagacagagaggaacgggcccagtacacactaatggcacaggccgtggatagagatacgaacaggaatagcttatccagatcccgcacgctgatgacaaccttaagaagctcttgtacacgcccgattatgccaacatgcttgcgcgggcccatgtgggtacggacatag

SEQ ID NO: 23174 - DNA, 2340 bp, synthetic construct
  misc_feature 1..2340: note = Description of Artificial Sequence: Synthetic coding sequence
  source 1..2340: mol_type = other DNA
atgggccccggcctggccgcccggcggctgcggccccccagccgggctccagaaattactgtttttagtgctcagcggccatgtgacatacctagttgctgccatctcctgagtgatcagtcagatgggtggtccgtcctacagaagctagcagctagtatccagtgggtcaagaagctgcactctgatattgattctggtgacggtaatattaaatacatccttagtggagaaggagctgggaccatcttcgtcatcgatgacaaaagtggcaacatccacgccaccaaaacactggatagggaagaacgggcccaatacacgctaatggcgcaggccgtggaccgcgatacaaaccgaccactcgagccacccagcgaatttattgtcaaggtgcaggacataaatgacaacccccctgaattcttacatgagacttaccatgcgaacgtgcccgaaagaagcaacgtaggcacctcggtgatccaggtgaccgcctcagacgccgacgacccgacgtacggtaatagtgctaagctagtctactcaatcctcgaggggcagccttactttagcgtagaagcgcagacgggcattatcaggacagccttgcctaatatggaccgggaggctaaggaggagtaccacgtggtgatccaggcgaaagatatgggtggccacatgggtggccttagtggaacaacaaaagtcactattaccctgacagatgtaaatgataacccccccaaatttccccagtctgtgtaccagatgagtgtgtctgaggcagcggtccccggggaagaagtcgggcgggtcaaggctaaggaccccgacatcggggagaatgggctcgttacatacaatattgtggacggcgatggcatggagagcttcgaaatcactactgattacgaaacccaggaaggcgttattaagttgaaaaagccagtggacttcgagacaaagcgcgcttactccctgaaggtggaggctgcgaacgtccacatagatccaaaatttattagtaatggaccttttaaagataccgtcacagtaaaaatctccgtcgaagacgcggatgagccacctatgtttcttgcaccatcctatatacatgaggtacaggagaacgcagcagcagggaccgtggtcggacgggtacacgcgaaggatccagatgcagcaaattcccctattaggtattccattgatcgccataccgatctggaccgatttttcaccataaacccggaagatggcttcataaagaccaccaagcctttggatagggaggagaccgcatggctcaacatcaccgtgtttgccgccgaaatccataaccggcaccaagaagctaaggtgcctgtcgccatccgcgtgctagatgtgaatgataacgcccccaaatttgcagccccatatgaaggatttatctgcgaatctgaccaaacgaagcccctgtctaaccagcccatcgttactatttcagcagacgacaaggacgacactgctaacgggcccaggtttattttctccctgcctcctgagattattcataatccaaacttcaccgtgcgtgataacagggacaacacggcgggggtgtatgctcgacgcggaggcttcagtcgccagaaacaggacctttacctccttcctatagtgatatctgatggtggaatccctcccatgtctagcaccaacacactgactattaaagtctgtggctgtgacgttaacggggcactgctgtcttgcaacgccgaagcctacatactgaacgccggactgtccacaggcgcgctgattgcaatcctggcttgcatcgtgatcttgctagttatcgtcgtgctgttcgtcactttaaggcgacaaaagaaagaaccccttatcgtttttgaggaagaggatgtgcgggagaatataatcacatacgacgatgagggtgggggggaagaagataccgaagctttcgatattgctactctccaaaaccctgatgggattaatggttttatcccaaggaaagatattaaacctgagtatcagtacatgccaagacccggcctgcggccagctcccaattcagtcgatgtggacgatttcattaacacacggatccaggaggctgacaacgatcccactgcacctccttatgacagcatacagatttacgggtatgaaggccggggctcggttgctggatccctatcatcactggaaagcgccacaactgattcagatttggactatgattatctgcagaactggggtcccagatttaaaaagctggcagatctctatggttccaaagacaccttcgatgacgactcttag

SEQ ID NO: 23175 - DNA, 528 bp, synthetic construct
  misc_feature 1..528: note = Description of Artificial Sequence: Synthetic coding sequence
  source 1..528: mol_type = other DNA
atgcagccccggacccccctggtgctgtgcgtgctgctgagccaggtgctgctgctgacatctgccgaggatctcgactgcactcccggcttccagcagaaggttttccacataaaccagcccgctgagttcattgaagaccagtcaattctgaacctgacgttctctgattgcaagggcaatgacaagctccgctacgaagtgagtagcccatactttaaggtgaattcagacggtggtttggtcgccctgcgcaacatcacagccgtagggaagaccttgttcgtgcacgcccgtacaccccatgctgaagatatggcagagctggtgattgtggggggaaaggatatccagggatctctgcaggatatttttaaattcgctaggacgtcaccagtcccaagacaaaaaaggtccatcgtcgtctctccaatcctgattcctgaaaaccagcgccagcctttcccacgcgacgtcggcaagatgaagatctggcaggtgctgtgtctggctaggtggctgacatag

SEQ ID NO: 23176 - DNA, 2142 bp, synthetic construct
  misc_feature 1..2142: note = Description of Artificial Sequence: Synthetic coding sequence
  source 1..2142: mol_type = other DNA
atgcagccccggacccccctggtgctgtgcgtgctgctgagccaggtactcctacttactagtgcagaggacctggattgtacgccaggctttcagcaaaaggtctttcatattaatcagcctgccgaattcatcgaggatcaatctatcctgaatctgaccttctccgattgcaaggggaacgacaagcttaggtacgaggtatcctctccctactttaaagttaattccgacggcggccttgtggccctgagaaatatcactgccgttggcaaaaccctgttcgtacacgcccgaaccccccacgctgaggacatggccgagcttgtcatcgtgggcggcaaggacatacaggggtccctgcaagatatcttcaagtttgcccggaccagcccagtgcccagacagaagcgtagcattgtggtgagccccatcctgatcccagaaaaccagcgccaacctttccctagagatgtgggcaaggtggtggacagcgaccgccccgagaggtccaagtttcgactgacgggaaagggagtggaccaggagcccaaggggatattccggattaacgagaacacaggctccgtctctgtcacgcgaacgctggatcgagaggtcattgccgtgtaccaactcttcgtggagactactgacgtgaatggtaaaactctggagggccccgtccccctcgaagtgatcgtaatcgatcagaacgacaacaggcccattttccgagagggcccttacattggccacgtgatggagggcagtcccactggaactacggtgatgcgcatgaccgcgttcgatgcagatgaccccgcaacagacaacgctctgctgagatacaacatcaggcagcaaacacctgataagcctagtccaaacatgttctacatagaccctgagaaaggggatatcgtgaccgtggtttctccagcactcctggacagggaaacactcgagaacccaaagtatgaactcattatcgaggctcaggacatggctggcctggatgttggcctcaccggaaccgccaccgcaactatcatgattgacgataagaatgatcatagcccaaagtttacaaagaaggagtttcaggctacagtcgaggagggtgctgtgggcgtcattgttaatttgacggtggaggataaagacgatccaacaaccggggcctggagagctgcctacactattatcaacggcaaccccgggcaatcctttgaaatccacacaaatccgcaaactaatgagggaatgctgtctgttgttaagcccctggactatgagatatctgccttccacacactgcttatcaaagtggagaacgaggatcccttagtacccgatgtgagttatggtccttctagcacagcaacggttcatataactgtgctagatgtcaatgaggggccagttttctatccggatcctatgatggtaacccgtcaggaagacctatccgttggctcagtgttgctgactgtcaatgccaccgatcctgattccctgcaacatcagacaatcaggtattccgtgtataaagacccggccggatggctgaacattaaccctatcaatggcaccgtggataccacagccgtgctggaccgtgagagcccattcgttgataattcggtatatactgccctgttccttgcaatcgacagtggtaacccgccagcaactggcactgggactctgctaatcactctagaggatgtgaacgacaacgcccccttcatctaccccaccgttgctgaggtgtgtgacgatgctaagaatctgagcgtggtgattcttggcgcctcggataaagatctgcatcccaatacagacccatttaaatttgaaattcacaaacaggcagtcccagataaggtgtggaaaatcagtaaaatcaataacacccatgccttggtctcactgctgcaaaatctcaacaaggctaactacaacctgcccataatggtgaccgattcaggaaaacccccaatgactaatataacggacctgagggtgcaggtgtgctcgtgccgaaactctaaagttgattgcaacgcagccggggcactccggttctctcttccatctgtgctactgcttagtctattttctcttgcctgtctctag

SEQ ID NO: 23177 - DNA, 2283 bp, synthetic construct
  misc_feature 1..2283: note = Description of Artificial Sequence: Synthetic coding sequence
  source 1..2283: mol_type = other DNA
atgaagaccccccccggcgccagcagccggaccaagtgcagccgggagctgagaagtttctgcgcatttagttgcccaagggcgaaacagcccacctgcactgcttggtttcctcagcaagaacacccatcggagaacgggccacagatgccagggcgcgatcccccagcggcctctactatgcaagtactgttgctgacctccgcagaggacctggattgtacacctgggttccaacagaaggtgtttcacattaaccagcctgcggaattcattgaggatcagtcgatcctgaacctgacattcagtgactgcaagggaaatgataaactccgttacgaagtgagcagcccatattttaaagtcaattctgatggagggctcgttgcattaaggaacatcacagctgttggcaagaccctgtttgtccacgccaggacaccccatgcagaggatatggcagagttagtgatagttgggggcaaagacatacagggaagtctccaggacatattcaagttcgcaaggaccagccctgtgccccggcagaaacgaagtatcgtcgtgtcaccaattctcatcccagagaaccagcgacagcctttcccccgcgacgtcgggaaggtggtggattccgaccgcccagagcggagcaagtttcggcttaccggcaaaggtgtcgatcaggaaccaaaggggatttttcggattaatgagaacactggatccgtatctgtcacccggacccttgatcgagaagtaattgccgtgtaccagctctttgtggaaacaaccgacgtcaatggaaaaacgttggagggtcccgtgcccttagaagttatcgtcatagaccaaaacgacaaccgtcccattttcagagaaggaccttatatcggacacgtgatggagggtagtcctactggcaccaccgttatgcgaatgactgcatttgatgctgacgatcctgccacagacaatgctcttcttcgatacaatatcaggcagcagactcctgataaaccatcccccaatatgttctacatcgaccccgaaaagggcgatattgtgactgtcgtcagccctgctttactagaccgggagaccctggaaaaccctaagtacgaactgataatagaggcccaagatatggcaggcctggatgtaggcttgacaggaaccgccacagcaacaatcatgatagatgataagaatgatcactccccaaagttcaccaaaaaggaatttcaggctacagtggaggaaggcgccgtgggagtgattgtgaatctgaccgtggaggataaagacgatcccacgacgggcgcctggcgagcagcctatacaataatcaatggtaatcctggccagtcttttgaaatccacacaaatccacaaaccaacgaaggcatgctgtctgtggtgaagcctctggactacgagatctcagccttccatacccttctgataaaggtggagaatgaagatccattagttcccgatgtttcttacggaccatcctccaccgccacggtgcatataaccgttctcgatgtcaatgagggcccggtgttttaccccgacccaatgatggtaaccagacaggaggatctgtcagttggttcagtcttgctgacagttaacgctactgatccagatagcttgcaacaccagaccattcgatattcggtgtacaaggacccagccggctggctgaatattaaccctattaacggtactgttgacactaccgccgtgttagatcgtgagtctccttttgttgacaactctgtgtacactgctctctttctggcaatcgactccgggaaccctcctgccaccggcaccgggacacttctaattacgctagaagacgttaacgacaatgctccctttatctatccaaccgtcgctgaagtctgcgacgatgctaagaacctgtccgttgtcatccttggcgccagcgacaaggatctccacccaaacaccgatcctttcaagttcgagatccataagcaggcagttcccgacaaagtgtggaagattagcaaaatcaacaatacgcacgctctggtgtctttactccaaaacctgaacaaagccaactacaaccttcctatcatggttacagacagcgggaaaccccctatgaccaacatcaccgatttgagggtccaggtgtgctcctgccggaattccaaagtggactgtaatgctgctggcgctctaagattttctctgccttccgtcctgctcttatcccttttttcccttgcatgtaagtag

SEQ ID NO: 23178 - DNA, 2142 bp, synthetic construct
  misc_feature 1..2142: note = Description of Artificial Sequence: Synthetic coding sequence
  source 1..2142: mol_type = other DNA
atgcagccccggacccccctggtgctgtgcgtgctgctgagccaggtcctcttgttaacgagtgcagaggacctcgattgcacaccaggatttcagcagaaggtctttcacatcaatcaacccgcagaattcatagaggatcaaagcattctaaatctgactttcagcgactgtaaaggcaacgataagctgcgttatgaagtcagttctccctatttcaaggttaactcagatggtggacttgtcgctcttcgcaacataaccgctgtcggcaaaaccctgtttgtgcacgccaggacgccccatgctgaagacatggctgaactggttatcgtgggaggaaaagatatccaggggagcctccaggacatcttcaaattcgcgaggactagcccagtcccccgacagaaaagaagcatcgttgtatctcctatacttatccccgagaaccagagacagccctttccccgggacgtcggcaaggtcgtcgatagcgatcggccagagcggtccaagtttagacttacaggcaaaggcgtggaccaggaacctaagggtatctttaggattaacgagaacaccggttccgtgtctgtcactcgcaccctcgatagggaggtgattgcggtgtaccaattgtttgtggagacaactgacgtgaacggcaaaaccctggagggcccggtccccctcgaggttatagtgatagatcagaatgacaacaggccgattttccgcgaaggcccatacattggccatgtcatggagggaagtcccactgggacaaccgtgatgaggatgactgcctttgatgccgacgatccagctacagacaacgccctgttacggtacaatataaggcagcagacccctgacaaacctagccctaatatgttctacattgatccagagaaaggtgacatcgtcacagtggtgagccctgccctgttggacagagagacactagagaatccgaagtacgagctgattatcgaggcccaagacatggccggcctggacgtgggcctaaccgggacagccactgccaccattatgatagatgacaagaatgatcactctcctaagttcacaaagaaggagttccaggccaccgtagaggagggcgctgttggcgtgattgttaatctgactgttgaagacaaagacgatcctacaaccggtgcttggcgtgctgcctataccattattaatggcaatccgggtcagtctttcgagattcatactaatccacagaccaacgagggcatgctgtccgtggtgaagccactggattatgaaatctcagcttttcacaccttattgatcaaagtggaaaatgaagatcccctagtgcccgacgttagttatgggccttcctcaaccgctactgttcatatcaccgtgctggacgtgaatgaggggccggtcttctaccctgatcctatgatggtgaccagacaggaagacctctctgtggggtcagtcctccttacagtgaacgcaacagacccggatagcctccaacatcagaccatccgctactccgtgtacaaggaccctgccggatggttgaacattaaccccatcaacggcactgtcgacacgaccgctgttcttgaccgggagtcaccatttgtggacaactctgtatatacagccctgtttctggccatcgactctggaaaccctcccgccacgggcaccggcaccctgctaatcacactcgaggacgtcaacgacaatgcaccattcatctatcctacagttgctgaggtttgtgatgacgccaaaaatctcagcgtcgtcatcctcggggctagtgacaaggatctccatccaaatacggacccattcaagtttgagatacataaacaggcggtaccagacaaggtgtggaagatatccaaaataaataatacgcatgcactcgtgtctctgttgcagaatctaaataaagccaactacaatctgcctatcatggttactgattctggcaagcctcccatgaccaacatcacagacctgagagtgcaagtttgcagttgtagaaatagcaaggtggattgcaacgcagccggtgccctgcggttttcgttaccatcagtcctgctgctgagcctgttctcgctcgcatgtaagtag

SEQ ID NO: 23179 - DNA, 573 bp, synthetic construct
  misc_feature 1..573: note = Description of Artificial Sequence: Synthetic coding sequence
  source 1..573: mol_type = other DNA
atgcagccccggacccccctggtgctgtgcgtgctgctgagccaggtactgttgctgacgtccgccgaagatctggattgcacccctggctttcagcagaaggtctttcacatcaatcagcctgccgagttcatcgaagatcagagcattctcaacctaacgttttctgactgcaaagggaatgataagctgcgctacgaggtgtcttctccctactttaaagtcaacagcgatggcggattggtagctttacggaacattactgcagtgggtaagaccctattcgttcacgctcgaacgcctcacgccgaagacatggccgaattggtcattgtggggggaaaagatatccagggctccctgcaggacatcttcaagttcgcgcggacatctccagtgcccagacagaagcggagcattgttgtctccccaatccttattccagagaatcagcggcagccttttccaagagacgttgggaaacggacccacaaccccatcaatagcgagcttctgcttaatgagggaattacggcagatcttaacccttgcatcaccatcctggccatatag

SEQ ID NO: 23180 - DNA, 528 bp, synthetic construct
  misc_feature 1..528: note = Description of Artificial Sequence: Synthetic coding sequence
  source 1..528: mol_type = other DNA
atgcagccccggacccccctggtgctgtgcgtgctgctgagccaggtgttattgctcacgtcagccgaagacctcgattgcactccaggattccagcagaaggtgttccacattaaccaaccagccgagttcatcgaggaccagtcaatcctaaacctcactttcagcgactgtaaagggaatgataagttaaggtacgaggtcagttcaccatacttcaaggtcaactcagatggcgggctggtagctctccggaatattaccgcagtgggtaagactctgttcgtgcatgccagaacacctcatgccgaggacatggccgagctggttattgtcgggggcaaggatatccagggctctctgcaggatatcttcaaattcgccaggacttcccctgtgccaagacagaaacgcagcatcgtggtcagccccatcctgataccagagaatcagcggcagccctttcctcgggatgtagggaagatgaaaatctggcaggtgctttgcctggccaggtggttgacctag

SEQ ID NO: 23181 - DNA, 2025 bp, synthetic construct
  misc_feature 1..2025: note = Description of Artificial Sequence: Synthetic coding sequence
  source 1..2025: mol_type = other DNA
atgcagccccggacccccctggtgctgtgcgtgctgctgagccaggttctactgctaactagcgcagaggacctggactgcacaccagggtttcagcagaaggtgtttcatattaatcaacccgctgaatttattgaggaccagtccattctcaacctgacatttagcgattgtaagggcaacgataagcttaggtacgaggtttcttcaccatacttcaaagtcaattccgatggaggactggtcgcactgagaaatataactgcagtgggcaaaaccttattcgtgcacgcgagaactcctcatgctgaagatatggctgaactagtcatcgttggcggaaaagacattcaggggtcgctccaggtagttgattctgaccgtccggagcgcagcaagtttagactcaccggaaaaggggtcgaccaagaaccgaaggggatctttagaatcaacgagaatactggatccgtgtccgtgacccgcactctagatcgggaggtgatcgctgtgtaccagctattcgtagagacaaccgatgtgaacggcaagacattggagggaccagttcccctggaggtgatcgtgatcgaccagaacgataacagacccatttttagagaaggcccctacatcgggcatgtgatggagggtagtcctactgggacgactgttatgcgaatgaccgcattcgacgcagacgaccctgctacagataacgctctattaaggtacaatattcgacagcagactcccgataagccgagtccgaacatgttttatattgatcccgagaagggcgacatcgtgacagtggtgtccccggccctcttagatcgcgaaacactcgagaatcccaaatacgagctgataatcgaagctcaggacatggcagggctagacgtgggccttacaggaaccgcgactgcgacaatcatgatagatgacaaaaacgatcactccccaaaattcactaagaaagagttccaagccacggtcgaggagggcgctgttggtgtgatagtcaacctgacggtagaggataaggatgacccaactaccggcgcctggcgcgccgcgtacaccattataaacggaaatcctggccaatcattcgagatccatactaatccacagacaaatgaaggcatgctgtcagtggtgaagcctcttgactacgagatttccgccttccataccctcctcataaaagtggagaacgaggaccccttggtgcctgatgtgagttatggtccctccagcacagcaacagtgcatatcaccgttctagacgtcaacgagggccctgtgttctaccctgatcctatgatggttacgcggcaggaagacttgtctgtcggctcagtcctactcactgtgaatgcaacggatcctgattctctgcagcaccagaccatccggtactctgtttacaaagatccagctggatggctgaatatcaatcctatcaacggcacagtggatacaaccgccgtcctggacagagaaagcccttttgtggataacagcgtatacactgccttgtttcttgcgattgatagcggcaatccccctgccacgggaacgggtacgctattgattacattggaagatgtgaacgacaatgcacccttcatatatcccaccgttgcagaagtgtgcgatgacgctaagaatctgagtgtggttatcttaggcgctagcgacaaggatcttcaccccaacacagacccctttaaattcgagatccataagcaggctgtcccagataaggtttggaaaatcagtaaaattaataacacccatgctctcgtcagtctcctccaaaacctgaacaaagcaaactataatcttcctatcatggtgacagactctggtaaaccgcctatgaccaacatcaccgacctgcgtgtgcaggtctgttcttgtagaaatagcaaggtggactgcaatgccgcgggggctttacgcttttctctgccctcagtgcttctgctgtccctgttttctctggcttgcaagtag

SEQ ID NO: 23182 - DNA, 1248 bp, synthetic construct
  misc_feature 1..1248: note = Description of Artificial Sequence: Synthetic coding sequence
  source 1..1248: mol_type = other DNA
atgcagccccggacccccctggtgctgtgcgtgctgctgagccaggtcgctctcctggatcgcgagacgctcgaaaaccctaaatatgagctaattatcgaggcacaggacatggctggccttgatgttggtctaacaggaactgccactgctactatcatgattgacgacaagaatgatcatagtccaaaatttaccaagaaagagtttcaagccacagttgaggagggggcagttggtgttatcgtcaatttaactgtggaagacaaggatgatccaaccaccggtgcatggagagccgcatacacgatcataaatggtaaccctgggcagtcgtttgaaatccataccaatccccagaccaatgagggaatgttgtccgtcgtgaagcctctggactacgaaatttccgcattccacaccctcttgataaaagttgagaacgaggaccctcttgttcccgacgtgtcctatggcccctcatctactgccactgtgcacatcacagtgctcgatgttaacgaggggccggtattttacccagatcccatgatggtgacacgtcaggaggacttgtctgtagggagtgtgctgctcaccgtaaacgcgacagaccccgactcgctgcagcaccaaacgatacgctactcagtctacaaagaccctgcaggctggctgaacatcaatcctatcaacgggaccgttgacactacagcggtgctcgatcgggagagcccgttcgtggataactcagtatatacagcactctttttggccatagatagcgggaatcctcctgccaccggcacaggaaccctgctgataaccctggaagatgtgaatgacaacgcccccttcatctacccaactgtcgccgaagtttgcgacgatgctaaaaatctctcagtagttatcctcggggcctctgacaaagatctgcatcccaatacggatcccttcaagttcgagatccataagcaggctgttccagataaggtgtggaaaatttccaaaattaataatacccacgccctagtgtcccttctccaaaatctcaataaggcaaactacaacctaccaattatggtgactgacagcggcaaacctcctatgactaacatcactgacctccgggtgcaggtctgctcttgccgaaattcaaaagtggactgtaatgcagccggagcgctgcggtttagcctgcccagtgtcctgctgctgtccctgtttagcctggcttgcaaatag

SEQ ID NO: 23183 - DNA, 819 bp, synthetic construct
  misc_feature 1..819: note = Description of Artificial Sequence: Synthetic coding sequence
  source 1..819: mol_type = other DNA
atgcagccccggacccccctggtgctgtgcgtgctgctgagccaggttcttctcctcacatccgccgaggaccttgattgcacacctggctttcagcagaaggttttccacattaatcagccagccgagttcatagaagaggatttgtcggtaggtagcgtgctgctgactgtcaacgctacagaccccgactccctgcagcaccagacaatacgctacagtgtttacaaggatcccgccgggtggttaaatatcaacccgataaacggcaccgtggatactactgcagtgctcgacagagaaagcccgtttgttgataactccgtgtatactgctctcttcctagccattgacagcggaaaccccccggcaacaggtaccggtactctcctcatcactttggaagatgtcaatgacaacgccccgttcatttacccgacagtggccgaggtttgtgacgacgccaagaacctttctgttgtgattctcggggcaagcgacaaggacctgcaccccaatactgaccccttcaaattcgaaatacacaaacaggcagtaccagacaaggtgtggaaaatttctaaaatcaataatactcacgctctggtgtcgctccttcagaacttgaacaaagcgaactataacttgcccattatggtaacagactcgggcaaaccccccatgacaaatattaccgacttgcgcgttcaggtctgtagctgccgcaactcgaaggtggattgcaatgctgctggggctctcaggttttccctcccctctgtcctgttgctcagcctcttttccctggcctgtaagtag

SEQ ID NO: 23184 - DNA, 1212 bp, synthetic construct
  misc_feature 1..1212: note = Description of Artificial Sequence: Synthetic coding sequence
  source 1..1212: mol_type = other DNA
gtggtgagccccgccctgctggaccgggagaccctggagaaccccaaatatgagctgattatcgaagcacaggatatggctggcctagatgtcgggctcacgggcaccgcaacagccactatcatgatcgacgataaaaatgatcactctcccaaattcactaagaaagagtttcaggccaccgtagaagagggtgccgtcggtgtgattgtgaatctgaccgtggaggataaggacgaccccaccactggagcctggcgtgcggcctacacaatcataaacggaaacccggggcagtcgtttgaaattcatacaaacccccagaccaatgaaggaatgctgtctgtcgtgaaaccactcgattatgaaatatccgccttccatacgctactgatcaaggtcgagaatgaagatcccctggtgcctgatgtctcctacggcccttccagtaccgctactgtgcatattactgtccttgatgttaatgagggccctgtattctacccggaccccatgatggtcacccggcaggaagatctctctgttggcagcgtgctcctgacagtgaacgctacggatcccgatagcctgcagcatcaaaccatccgctattccgtctataaggaccctgccgggtggctgaacattaacccaatcaacggcaccgttgatactacagctgtgcttgacagggagtcaccctttgttgataacagcgtttacactgcgctattcctggctattgacagtgggaacccgcccgccacggggactggaacgctgctcatcactttagaagatgtgaacgataacgcgcctttcatctatcccacagtggccgaggtctgcgacgatgcaaagaacctgagcgtggtgatcctgggagccagcgacaaagaccttcaccccaacaccgatccttttaagttcgaaattcacaagcaggcagtccctgataaggtctggaagatttcaaaaattaacaatacgcacgctttggtgagcttgcttcaaaatttgaataaagccaactacaatctgcccattatggttaccgactcaggcaaaccacctatgactaatatcaccgacctgcgtgtccaggtgtgttcatgtagaaattctaaagtcgattgtaatgccgcaggagccctccgattttcactcccatcagttcttcttctgtcactgttttccctagcatgcctgtag

SEQ ID NO: 23185 - DNA, 2721 bp, synthetic construct
  misc_feature 1..2721: note = Description of Artificial Sequence: Synthetic coding sequence
  source 1..2721: mol_type = other DNA
atgtgccggatcgccggcgccctgcggaccctgctgcccctgctggcagcccttttgcaggcttcagtggaagcttccggtgagatagccctctgcaagacgggcttccccgaagacgtttactcggccgttctatccaaggatgtacacgaaggacaaccactgctcaatgtcaaatttagtaactgtaacgggaaacgtaaggttcagtatgagagttcggaacccgcggacttcaaagtcgatgaagatgggatggtatacgctgtgaggagctttcccctgtcgtctgagcacgcaaaatttctgatttatgcccaggataaggaaactcaagagaagtggcaggttgctgtcaaactttctctaaaacccaccctgaccgaagagtcagtgaaagagtccgccgaagtagaagaaattgtgttcccaagacagttctcaaagcacagcgggcatctgcaacgccaaaaacgcgattgggtgatccctcctattaacttgcccgagaattcccgaggccccttcccgcaggagctcgtcagaatacgatccgatcgcgataagaatctctcactcaggtatagtgtgacagggcctggcgccgaccaacctcctaccgggatattcattattaaccctatttccggtcagctctccgtaacaaagccactggatagagagcagattgcccgcttccacctgagggcccatgcagtggacattaacggaaatcaggtggagaacccaattgatatcgtcattaacgttatcgacatgaatgataaccgccctgagttcctgcatcaggtttggaatggcacagttcctgaagggagtaaacctggtacatacgtaatgaccgtgactgccatcgacgccgacgacccaaacgccctgaacgggatgctgcggtatagaattgtgagccaggcgccctccacgccctcgccaaatatgtttacaattaacaatgagaccggggatatcattaccgtggcagcaggtctcgatcgcgaaaaagtgcaacaatacaccctcatcattcaggccacggacatggagggaaatcctacctatggccttagtaatacggcgacagctgtcatcaccgtcacagacgtgaatgacaatccgcctgagttcaccgccatgactttttatggagaagtgccagagaaccgcgtggacatcattgtggctaatcttacggtgaccgacaaggaccagcctcataccccagcttggaacgcagtttaccgcatcagcggtggagatcccaccggaaggtttgcgatccagactgatcccaattcgaatgatggacttgtcacagtcgttaaaccaatagattttgagaccaatcggatgtttgtcttgactgtagctgccgaaaatcaggtcccacttgctaaaggaatccagcaccctccccaatccaccgctactgtctccgtaacggtaattgatgtgaacgagaatccgtacttcgccccaaaccctaagataattaggcaagaggaaggtctgcacgcagggaccatgctgacaacatttactgcccaggatcccgaccggtatatgcaacagaatattaggtacaccaagctatctgaccccgcaaattggctgaaaattgatcccgtcaatggacagattaccactatagctgtgctggaccgcgagagccctaatgtgaagaacaatatatataacgcgacttttctggctagtgataatggcattccacctatgtctggaactggcactttacagatttaccttctcgacatcaacgataatgccccgcaggtattacctcaggaggctgaaacctgcgaaacaccagatcctaattccatcaacatcacagcactcgactatgatattgatcccaatgccggcccatttgctttcgacctgcctcttagtcctgttaccataaaaaggaactggaccataacccgattgaacggtgacttcgcccagttaaaccttaaaataaagtttctggaagcaggcatttacgaagtccccatcataatcactgacagcggtaatccccccaaaagcaacatttctatcctgcgtgtgaaggtctgtcagtgtgactctaatggtgactgtaccgacgtggaccgcatcgttggtgctggactgggaactggcgccattatcgccattctgctgtgcattattatattactcattttggttcttatgttcgttgtatggatgaaacggcgggacaaggagaggcaagccaaacaactgcttattgacccagaagacgacgtgcgtgacaacatacttaaatacgatgaagagggagggggggaggaagatcaagattacgatctttctcagctccaacaacccgacactgttgaaccggatgctattaagccagtgggcatcaggagaatggacgaaaggcccattcacgccgagccgcagtacccagtcagatcagcggctcctcaccccggcgatattggtgactttataaatgaagggttgaaagctgccgataatgacccaacagcacctccgtacgactccttgcttgtattcgactatgaggggagcggatctactgcgggcagcctgagctctcttaactcttcatcttcgggtggcgagcaagattatgactaccttaatgactggggccctcgcttcaagaagctcgctgacatgtatggtgggggtgatgattag

SEQ ID NO: 23186 - DNA, 2628 bp, synthetic construct
  misc_feature 1..2628: note = Description of Artificial Sequence: Synthetic coding sequence
  source 1..2628: mol_type = other DNA
atgttcctgctgcggcggtacgtgtgcatcttcaccgagaagctgaagaaccaagcggagctgtacgttttcttgtcagtgaagttctcgaattgcaatggaaagcggaaagttcaatacgaaagtagtgaacctgctgattttaaggttgatgaagatggaatggtatacgctgtccgttccttccctctctcaagcgagcacgcaaaatttttgatctatgcgcaagataaggaaacgcaggagaagtggcaagtggctgtgaagttgtcgcttaagcccactcttactgaagagtccgtcaaggaatccgcggaggtggaagaaatcgtttttcctaggcagttctcaaaacacagcggccacctgcagagacaaaaaagggactgggtgatcccaccaattaacttgcccgagaactctaggggtcctttcccacaggagctggtgcggatacgctcggacagggataagaacttgtcattacggtattcagtgaccggccctggtgccgatcagccccccactggcatatttataatcaaccctatcagcggtcagctgtcagtgaccaagcctctagaccgagaacagattgcacgctttcaccttcgcgcacacgccgttgatataaacggcaaccaggtcgagaacccgattgacatcgttatcaacgtgatcgatatgaatgacaatcggccagaattcctccaccaggtgtggaatgggactgtgccagagggcagcaaacccggaacctacgtgatgaccgtgaccgctatagatgctgatgatcctaacgccttaaatggcatgctcagatatcggatagtgagtcaggctcccagcacgccttcacccaacatgttcacaatcaataatgaaacgggggacatcataaccgttgccgccggattagaccgagaaaaagtgcagcagtacactctgataatccaggctaccgacatggaagggaaccccacttacggtctctctaacacggctaccgcagtgataacagtcaccgatgtgaacgataacccaccggaatttacagcgatgactttttacggagaagtacctgagaatcgcgtggatattattgtagccaatcttactgttaccgacaaagaccagccccacacacctgcctggaatgcagtgtacaggatcagcggcggtgaccctactggaagatttgcaatacagactgaccccaactccaacgatgggctggtgactgtcgtgaaacccattgactttgagacaaaccgtatgttcgtcctgactgtcgcagctgaaaatcaggtcccgctcgccaagggaatacagcaccccccccaaagcaccgcaaccgtcagtgtgaccgtgatcgacgttaacgagaacccttacttcgcgcctaatcccaagattatcagacaagaggagggtctgcatgccggcactatgctcaccacgttcacagcacaggacccagatcggtacatgcagcagaacatcaggtatacaaaactgtctgatcccgcaaattggctgaagatagatcccgtcaatggtcagataacaacaattgcagtgctggacagggagtctccaaatgttaaaaacaacatctacaatgctacttttcttgcaagcgacaacgggatcccacctatgagtggaacaggaacactgcagatctatctgttagatattaacgataacgccccccaggttctgccacaagaggccgagacttgcgagacaccggacccaaactctatcaatataacggccctggattatgatatcgatccgaatgcgggccccttcgccttcgacttaccactgagcccagttaccatcaagcgcaactggacaatcacacgcctgaacggggacttcgcacagcttaacttaaagataaagttcctagaggcaggaatttacgaggtccctataatcatcactgatagtgggaatccccccaaaagcaatattagcattctgagagtaaaggtatgccagtgcgactccaacggcgattgtaccgacgtcgaccgaatcgtcggtgcaggacttgggacgggcgccataatcgctatccttttatgcataattattctactcatcttagttctgatgttcgtcgtgtggatgaaaaggagggataaggaacgacaggccaagcaacttcttatcgatcccgaggatgacgtcagggacaacatcctgaagtacgatgaggaaggaggtggagaggaggatcaagactacgacctgtcacagctccagcagcctgatacagtggaacccgatgcaatcaaaccagtcggcatccgccgcatggacgagaggccaatccacgcggagccccagtatcctgtacgctctgcggcacctcatcctggagatatcggggattttataaacgaggggcttaaggccgccgataatgacccaacagcacccccatacgatagcctgttagtgttcgactacgaaggcagcggtagcaccgcaggatccctgagcagcctcaattcctcgagctcaggcggcgagcaggattatgactacctgaatgactggggtcctaggttcaagaaattagctgatatgtacggcgggggcgatgactag

SEQ ID NO: 23187 - DNA, 2355 bp, synthetic construct
  misc_feature 1..2355: note = Description of Artificial Sequence: Synthetic coding sequence
  source 1..2355: mol_type = other DNA
atgcagcggctgatgatgctgctggccaccagcggcgcctgcctgggcctgctagccgtagcagctgtcgccgccgccggcgccaatcccgcacaacgggatacccatagtttgcttcccacccaccgcagacagaaacgggactggatatggaatcaaatgcacatcgatgaggaaaaaaatacgagcctcccgcatcacgtcggtaaaataaaatccagtgtgagtaggaaaaatgctaagtatctcttaaagggagagtatgttggtaaggtcttccgcgtggacgcggaaaccggcgacgtttttgccatcgaacggctcgaccgggagaatatcagtgagtaccatctgaccgccgtgattgttgataaggataccggagaaaacctcgagacaccctcatcattcacaattaaggtgcacgacgttaacgacaattggccagtatttacccatagactgtttaacgctagcgttcccgaatcaagcgccgttggtaccagtgtaattagcgtgacggccgtagacgccgatgatcccaccgttggggaccacgcttctgtcatgtatcaaatcctgaagggcaaggaatatttcgctatagacaatagcggacgaatcattaccattaccaagtcactcgatcgcgaaaaacaagctcgttacgagattgttgtcgaggcccgagatgcccagggtttgagaggcgactctggcacagctaccgtgctggtaactcttcaagacattaatgataactttccatttttcactcagactaagtatactttcgtggtccccgaagatactcgcgtcgggacaagcgtcgggtcattgttcgtggaggatcctgatgaaccccagaataggatgaccaaatactcaatcttacgcggcgactatcaagatgccttcaccattgagacaaacccggcccacaacgaggggatcattaagccgatgaaacccttggattatgaatacatccagcagtattccttcatcgtcgaggctacagatccaacaattgacctcagatacatgagtccgccagcaggaaacagggcgcaggtgattattaatattaccgatgttgacgaacctcctatctttcagcaacctttctatcatttccagttgaaagagaaccaaaaaaaaccactgatcggtactgtgcttgccatggacccggacgctgcacgtcactctattggctattctatccggcggacaagcgataaagggcagttttttcgcgtaaccaagaaaggcgatatctacaacgagaaggagctggaccgcgaggtttacccttggtacaaccttaccgtagaggccaaagagcttgacagtacgggcacgccaacagggaaggagtctatcgtacaggttcacatcgaggtcttagacgaaaatgacaatgcccccgagttcgccaagccttaccagccgaaggtttgcgaaaatgcggtccacgggcagctggtcctgcagatcagtgcaatagacaaggatataactcctcgcaatgtgaagtttaagttcatcttgaatactgagaataatttcacactcactgacaaccatgacaatacagccaacattaccgtgaaatacgggcagttcgacagagagcatacaaaagtccattttctcccggtggtgatctcagacaatggcatgcccagccgcaccggaacatccacactgaccgtagccgtgtgcaagtgtaacgagcagggggaattcacattttgtgaggatatggctgcccaggtgggcgtgtcaatccaggccgtggtagccattttgctttgtattctgacaataacggtcattactctgcttatcttcctgaggcgccgcctgaggaaacaggcccgcgcgcatgggaaaagcgtaccggaaatacacgaacagttagtcacctatgacgaggagggaggaggcgaaatggatacaacctcctatgatgtgtccgtcctcaactccgtgcggaggggcggcgccaagccccctcgtccggcattagacgcaagacccagcttatacgcacaggtccagaagccacctagacacgcccctggggcccacggaggacctggggagatggctgccatgatcgaggtgaagaaggacgaggcagatcatgacggagatggcccaccttatgatacactgcacatttatggatacgaagggtccgagtcaatcgctgaaagcctttctagcctaggaacggactcttccgactcggacgtagattatgattttctgaacgattggggacctagattcaagatgcttgctgagctatacgggtcagacccgcgagaagagctcctttattag

SEQ ID NO: 23188 - DNA, 2010 bp, synthetic construct
  misc_feature 1..2010: note = Description of Artificial Sequence: Synthetic coding sequence
  source 1..2010: mol_type = other DNA
atgcagcggctgatgatgctgctggccaccagcggcgcctgcctgggcttactggctgttgccgctgtggctgcagcaggcgctaacccagcccaacgggacacgcatagcctgctccctacccacagacggcagaaacgagactggatctggaaccagatgcatattgacgaagaaaaaaacacttccctgccacatcatgttggaaaaattaaaagttccgtgtcacgcaagaatgctaaatatctgttaaagggcgagtatgtcggcaaggtttttcgtgtggacgcagagaccggcgatgtgtttgccatcgaaaggttggaccgcgagaatatttcagagtaccacctgacagccgtaatcgtcgacaaagacactggagagaatctggagactccctcatccttcactattaaagtgcacgacgtaaacgacaactggccggtgtttactcaccggctgtttaatgcttctgtgcccgaaagctccgccgttggaactagtgttatatctgtgaccgctgtggacgctgatgacccaactgtcggcgaccacgcaagtgtgatgtaccagatcctgaaagggaaagagtatttcgccatcgacaacagcggaaggattatcaccattacaaaatcactggatcgggaaaagcaagctcggtatgagatagtggttgaggctcgagatgcacaggggctccggggagactccgggacagccacagtgctcgtgaccctgcaagacatcaatgataacttcccattcttcacacagactaaatataccttcgtcgttcccgaagatacccgggtcggcaccagcgtcggctctctgtttgtggaagatcccgacgaaccgcagaatagaatgacaaagtactcgatcctgaggggagactatcaggatgcctttaccatagagacgaatccggcccacaatgaaggtattattaaaccgatgaaaccattggactatgagtatatccagcagtactccttcatcgtcgaagccaccgatcccaccatcgacctcaggtacatgtctcctcccgccggaaatagagctcaggtgattatcaatattacggatgtggacgagccacccatcttccaacagccattttaccattttcagctggtcctgcagatctctgcgatcgataaggatatcaccccccggaatgtcaagtttaaatttatacttaatacggagaacaactttactttaaccgacaatcacgacaacacggctaacattactgttaagtacggccagtttgatagggaacacaccaaagttcatttcctgccagttgtgataagcgataacgggatgccctccagaacaggtaccagcaccctaacggttgcggtgtgcaagtgcaacgaacagggggaattcactttctgcgaggatatggcagctcaagttggagtgtctattcaggccgtcgtggcaatccttctgtgcattctcactattacggtcataacgctattaatttttttgcggaggcgcttgagaaaacaagcccgcgcccacggaaagagcgttcctgagatacatgagcaattagtcacatacgatgaagagggtgggggcgagatggacacaacttcgtatgatgtctccgtcctgaatagcgttcggcggggaggcgcaaagccgccccgtcccgcattagatgccagaccttccctttatgcccaggtgcagaagcccccccgtcacgcgcctggcgctcacggtggcccgggtgagatggcggccatgatcgaggttaaaaaagacgaggcagaccatgacggggacggccctccctacgatacattgcacatctacggttacgaaggtagcgagagtatcgcagagtcattgagcagtctgggtaccgattcttcggatagtgatgttgattacgatttcctcaatgactggggccccagattcaaaatgttagccgaattatacggcagcgacccacgcgaagaattgctctactag

SEQ ID NO: 23189 - DNA, 672 bp, synthetic construct
  misc_feature 1..672: note = Description of Artificial Sequence: Synthetic coding sequence
  source 1..672: mol_type = other DNA
atgcccagccggaccggcaccagcaccctgaccgtggccgtgtgcaaatgcaacgagcaaggtgagtttactttctgtgaagatatggctgcgcaggtgggggtgtccatccaggccgtcgtagctatcctcctgtgcatcttgaccattaccgtgattacattgctaattttcttgaggcgccgcctgcggaaacaagcaagggcccacgggaagagcgtccccgaaatccatgaacagctcgtcacctatgacgaggagggcggcggtgaaatggatactaccagctacgatgtgagtgtcctcaactccgttcggagaggcggagccaagccccccagacctgcattggacgcccggcccagcctgtacgcccaagtccagaaacctcctcgacatgcccccggagctcatggcggccccggagaaatggcagcaatgatagaggtgaaaaaggatgaggctgaccacgatggagacggacccccctacgacacgctccatatctacggatatgaggggtcggaatcaatagcagagtccctctcttctctgggcaccgactcaagtgactcagatgttgactatgatttcttgaacgactggggtcctcgcttcaaaatgctggctgaactgtatggttccgacccccgggaagaactgctgtactag

SEQ ID NO: 23190 - DNA, 1578 bp, synthetic construct
  misc_feature 1..1578: note = Description of Artificial Sequence: Synthetic coding sequence
  source 1..1578: mol_type = other DNA
atgcccagcacctgcagcaaggagaacatgtgggcccggagcagcggcagcatgcagaggcaggagacttgttcaccgctgcgggctcaaaaccgaatgacaaagtactctatcctaaggggtgattatcaggacgctttcaccatagaaacaaaccccgcgcacaacgaaggcatcataaagcccatgaagccactggattatgagtacatccagcagtactcgtttatcgtggaagccacggaccctacaatcgacttaagatacatgagcccacctgctggtaatcgggcacaggtgatcataaacatcacggatgttgacgaaccaccaatcttccagcagccattttatcattttcagctgaaagagaatcagaagaaacccttgatcggaactgtccttgccatggaccctgacgctgctaggcatagtatcggatatagcattcggcgaacaagcgataaagggcagttctttagagtgacaaagaagggtgacatttacaacgaaaaggagctcgatcgggaggtgtatccatggtataatctcaccgttgaagctaaagaacttgactccactggcacaccgacaggaaaagagtccattgtgcaggtgcacatcgaggtgttggatgagaatgataacgcccccgaatttgcaaagccatatcagcctaaggtatgcgaaaacgccgtgcacggacagctggtgcttcagatcagcgcaattgataaagacatcacccctagaaatgtgaagtttaaatttatcttgaatacggaaaataattttaccctgaccgataatcacgacaacacggccaatataaccgtaaagtacgggcaattcgatagggaacatactaaggtacactttttacctgtggttattagcgataatgggatgcccagcaggaccggcacctcaacactgaccgtggccgtatgcaagtgcaacgaacagggggagttcactttctgcgaagacatggccgctcaggtgggagtgagcatccaggccgtcgtggcgatccttctgtgtatccttaccatcaccgtgatcacgctactaatttttctgcgccgaagattgagaaagcaggcacgcgcccacggtaagagtgtgcctgaaatacatgagcagctggtgacatatgatgaagaagggggcggggaaatggacactaccagctacgatgttagtgtgttaaactctgtgcggcgaggaggagctaaacctcctaggccagccctggatgcccgtccaagcctttatgctcaagttcaaaaaccaccaaggcatgcccctggagcgcatggtgggccaggcgagatggctgctatgattgaagtaaagaaggacgaggctgaccatgacggggatggcccgccctatgacactctgcacatatacgggtacgaggggtctgagagcattgctgaaagcttatcaagtctgggcacggactcttctgattctgatgtagactacgactttctcaatgattggggccctagattcaaaatgctggcggagctgtacgggtcagatcccagagaggaactgctttactag

SEQ ID NO: 23191 - DNA, 2373 bp, synthetic construct
  misc_feature 1..2373: note = Description of Artificial Sequence: Synthetic coding sequence
  source 1..2373: mol_type = other DNA
atgcggacctaccggtacttcctgctgctgttctgggtgggccagccctaccctaccctgagcacacctttaagcaaacgcacatctgggttcccggcaaaaaagcgggcattagaactgagcggaaactccaaaaacgaactaaatcgctctaaacgctcttggatgtggaatcagttctttctcctggaggagtacactggatcagactaccagtatgttggcaagctccattccgatcaggatcgcggtgatgggagcctaaaatatattttgagtggagacggggccggcgacctgttcatcataaacgagaacacaggggacatccaagcaaccaaacggctagacagagaagagaaaccagtttacattctgagagcacaagctatcaacagacgtactgggcggcccgtagagccggagagcgaatttataattaagattcatgatattaacgacaacgaacccatctttacgaaagaggtctatacagcaaccgtgccagagatgagtgacgtaggaacattcgtggtgcaggtcacagccacggacgccgacgatccaacctatggcaacagcgctaaagttgtctattccattttacagggacaaccctatttcagcgtggagagcgaaactggtatcatcaagacagccctgctaaacatggacagggagaacagggagcagtatcaggtggtgattcaggccaaagatatgggtgggcagatgggcggcctgtctggcactaccactgtgaacataactctaactgacgtcaacgataatccacctcggtttccccagagcacctaccagtttaagacaccagagagttctcctccgggtacacccattggccgaattaaggcttcagatgctgacgtgggtgaaaacgcagagatagaatactccatcactgatggcgagggattggatatgttcgatgttatcaccgatcaggaaacacaggaggggattatcaccgtgaagaagctcctcgattttgaaaagaagaaggtctacaccctcaaagtggaggcgagcaacccatatgtagaaccccgatttctttacctgggccctttcaaagatagcgcaacagtgaggatcgtggtggaagatgtcgatgaaccccccgtgttttcaaaactcgcgtacatactacagattagggaagacgctcagattaatacgactataggctctgtcactgcccaggaccccgacgctgcaaggaatcctgtcaagtatagtgtggaccgacacactgatatggataggatttttaacatcgattcaggtaatggctctatcttcacaagtaagctgctggacagagagacgctgctgtggcacaatatcaccgtgatcgcaaccgaaataaataatcccaaacagagcagccgggtccccctgtacattaaggtgctcgacgttaacgataacgctcccgagtttgcagagttttatgagacattcgtttgtgagaaggcaaaagctgaccagctcatccaaactctgcatgcggtggacaaggatgacccctatagtggccaccagtttagcttcagcctcgcccccgaggccgcatccgggagcaacttcactattcaggacaacaaggataatacagcagggatattgacgaggaaaaacgggtacaataggcacgaaatgtctacatacctgctgccagttgtgataagcgacaacgactacccagtgcagagcagtactggtaccgtgactgttcgcgtttgcgcatgcgaccaccacggaaatatgcagagctgccacgctgaagccttgatccatccaacaggcctgtcgacgggtgcccttgttgctattctgttgtgtatagtcatccttctggtgaccgtagtcctcttcgctgccctgcggcgacagcgcaaaaaagagcccttaatcatatcaaaggaggatataagggataacatcgtctcttacaatgatgaagggggaggtgaagaggatacccaggctttcgatatcggcacgttacggaatccagaggcaatcgaggacaataaacttcgtcgcgacatcgtgcctgaggccctctttctgccccgacgtaccccgactgcgcgcgacaacactgacgtgagggacttcattaaccagagactaaaggagaacgacaccgatcctacagctccgccctacgatagcctggcgacatatgcctatgaaggcactggatctgtagccgatagcctgtcctccctggaatccgtgaccacggatgccgatcaagactatgattatctttctgactggggtcctcggttcaaaaagctcgcggacatgtatggcggcgttgactcagataaggactcttag

SEQ ID NO: 23192 - DNA, 576 bp, synthetic construct
  misc_feature 1..576: note = Description of Artificial Sequence: Synthetic coding sequence
  source 1..576: mol_type = other DNA
atgggcggcagcggcagccggctgagcaaggagctgctggccgagtaccaggacctcactttcttaaccaaacaggaaattctgttagcgcaccgcaggttttgtgagctgttgccacaggaacagcggagcgtcgagagttcactgcgcgcccaggtcccctttgagcagatcctgtctttaccagagttaaaggccaacccatttaaagagcgtatctgcagagtctttagcacatcaccagcaaaagactcgctcagcttcgaagattttctcgacctccttagtgtttttagcgacactgccacccccgatattaagtcccactatgccttccggattttcgattttgacgacgatggtaccctcaatcgggaggatctgtcacgcctggtgaattgcttgacaggtgagggagaggacaccaggctgagtgcctccgagatgaagcagctcatagataatatactagaagaatctgacatcgaccgcgacggaacaatcaacctatccgaattccagcacgtaatttctcgcagtcccgatttcgcctcctccttcaagatagtgttgtag

SEQ ID NO: 23193 - DNA, 237 bp, synthetic construct
  misc_feature 1..237: note = Description of Artificial Sequence: Synthetic coding sequence
  source 1..237: mol_type = other DNA
atgagcgaggtgctgccctacggcgacgagaagctgagcccctacggggacggcggcgacgtaggccaaatcttctcatgccggctccaagacacaaataacttcttcggcgccgggcagaataaacgcccccccaagctggggcagatcggtaggtccaaacgtgtcgtgattgaggacgataggatcgatgacgttctgaaaaacatgaccgataaggccccacctggggtctag

SEQ ID NO: 23194 - DNA, 1563 bp, synthetic construct
  misc_feature 1..1563: note = Description of Artificial Sequence: Synthetic coding sequence
  source 1..1563: mol_type = other DNA
atggagggcggccccgccgtgtgctgccaggacccccgggccgagctggtggaaagggtcgcggcaattgatgttacacacctggaagaggcggatggtggacctgagcctacgaggaatggtgtcgacccaccacctcgggcacgggccgcgtcagtgatccccggctccacgtctaggttgctgcctgccaggcccagcctttccgccaggaaactgtccctgcaggagcggccggccggaagttacctggaggcccaggccgggccgtatgccacagggccggcctctcacatcagtccccgtgcatggaggcgacctaccatcgaatcacaccacgtcgccatatccgacgctgaagactgtgtgcagctcaatcagtataaactgcagtctgaaattgggaagggggcctacggcgtagtgcgcctggcatataatgagtccgaggaccggcactatgcgatgaaagtgctctctaagaaaaaattgcttaagcagtacggattcccccgtaggccaccaccaaggggcagccaggctgcccagggcgggcccgcaaaacagcttctgcccctcgaacgagtgtaccaggaaatcgctattctcaaaaaattggatcacgtcaatgtagtcaagttgatagaagtactggacgaccccgctgaggataatctgtacttagcccttcagaatcaggcacagaatatacagctggactccaccaacatcgcaaaacctcacagcctgctgcccagtgaacagcaggattcgggctccacatgggcggccaggagcgtgttcgatctactgagaaagggaccagtgatggaggtgccctgtgacaaaccattttcagaagagcaggccagactctaccttagggatgtgatactaggtctcgagtacctccattgccagaagattgtccatcgagacatcaaaccgtcgaatcttctcctgggagacgacgggcacgtgaaaattgctgatttcggtgtgagcaaccaattcgaaggcaacgatgctcagctgtcatctaccgcgggcactcccgcatttatggcccctgaggctatttctgatagtgggcagtcatttagtgggaaggccctggacgtgtgggccaccggggtgacgctgtattgtttcgtgtacggaaaatgccctttcatcgacgacttcatcctggccctacatcggaagattaagaacgaacctgtggtatttcccgaggaacccgagatatcagaggagctgaaagatttaattttgaagatgctggataaaaaccctgaaaccaggattggggtgccagatattaagctacacccctgggttactaaaaatggtgaagaaccgctgccatcagaagaagagcactgctcagtagttgaggttaccgaggaagaggtcaagaatagtgtccgcctcatcccttcatggactaccgtcatcctggtaaaatctatgctcaggaagcgatctttcggcaacccctttgagccacaggctcgacgcgaggaacgcagtatgagcgcaccaggaaacctcttagtctag

SEQ ID NO: 23195 - DNA, 1518 bp, synthetic construct
  misc_feature 1..1518: note = Description of Artificial Sequence: Synthetic coding sequence
  source 1..1518: mol_type = other DNA
atggagggcggccccgccgtgtgctgccaggacccccgggccgagctggttgaacgggtggccgcgatcgacgttactcacctggaagaagcggatggcggccccgagcctacccggaacggggtcgacccaccgccgagagcgcgagctgcatccgttatcccagggagtacaagccgtctgctcccggctaggccttcgttgagcgctagaaagctgtccctgcaggagcggcccgccggatcttatctcgaggcccaggcaggaccatacgctacgggcccggcctcacacatatcaccgcgagcatggcgcagaccaacaatcgagtcacatcacgtggcgatcagcgacgccgaggactgcgtccagctgaatcagtataaacttcagagcgagatcggtaagggcgcttatggggtggtgcgcttagcctataacgagtctgaggatcggcattatgcaatgaaagtgctatccaagaagaagctgcttaagcagtacggcttccctcgcagacctcctcccaggggctctcaggccgcccaggggggccctgccaagcaactgttgccactggaaagagtgtatcaagaaattgccatcttgaaaaagttggaccatgtgaacgtggtcaaactgatcgaagtactggatgatccagctgaggataatctgtatctggtgtttgacttgctgaggaaaggtcctgtcatggaagtcccttgtgataagccattctcggaggagcaagctcgcctgtacctaagggacgtaatactcggtctggagtacctccactgtcagaaaatagtacatagggacatcaagccctccaaccttttacttggcgatgatggacacgtaaagattgccgattttggcgtctccaaccagttcgaggggaatgatgcgcaactctccagcacagcgggaaccccagcttttatggccccggaagcaatttctgattcaggccaaagtttctccgggaaagcactggatgtctgggccactggcgttacactgtactgctttgtctatgggaagtgtccgttcatagatgacttcatcttggcactccatcggaaaatcaaaaacgagccggtcgtgtttcctgaagagccggagatctccgaggagctgaaagacctcatacttaagatgctggataaaaatcccgagacacgtataggagtcccagatattaagctgcacccttgggtgacaaagaacggtgaagagccgttaccatcagaggaagagcactgttcagtggttgaggtgacagaggaagaagtgaagaattctgttcgcctgatcccaagttggaccactgtgattttagttaaatccatgttgagaaaaaggtcctttgggaacccctttgagcctcaggctcggagggaggagagatccatgagcgcaccaggaaacctgctggtgaaggaaggcttcggtgaagggggtaagagcccagagcttccaggagtacaggaggacgaggcagcctcttag

SEQ ID NO: 23196 - DNA, 1599 bp, synthetic construct
  misc_feature 1..1599: note = Description of Artificial Sequence: Synthetic coding sequence
  source 1..1599: mol_type = other DNA
atgcagttcggcaagctgtggtgcggctgcagcggcgagttccccactcgcctacggcgaaggaccccactgacagaggcgatggaaggcggcccagcagtgtgttgccaagatccaagagcagagctggtggagagagtcgccgcaatcgacgtgacccatttagaagaagcagatggcggccctgagccaacccgcaacggggtcgaccccccacccagagcccgggcagcctccgtgattccaggctccacctctcggctcctgcccgcgagaccaagtcttagcgcgcggaaactttcgctgcaggaacgcccagccggttcatacttggaggcgcaggccggaccatacgcaacaggacccgcaagtcacataagtccgagagcctggcggaggcctaccattgagagccatcacgtggccatctccgacgccgaagattgcgtccagctcaatcagtacaaactgcagtcagagataggaaaaggcgcctatggagtcgtccgcctggcatacaacgagtccgaggatcgacattatgccatgaaggtcctctctaaaaagaagttactgaaacaatatggttttccccgccggccccctccgagggggagtcaggccgcacagggaggaccagcaaagcagctgctaccccttgaaagggtatatcaggaaatcgcaatccttaagaaactggaccatgtgaatgtggtgaaactaattgaggttctagatgaccccgccgaggacaatctctacctcgtttttgatctgcttaggaaagggcccgttatggaggtgccctgcgataaacccttctcggaagagcaggcccgtttgtacttgcgcgacgtgatactgggactggaatacctccactgccaaaagatcgtgcacagagatatcaaaccgtccaacctgctgcttggtgacgacgggcatgtcaaaatagccgacttcggcgtaagcaaccaatttgaaggcaacgacgctcagctaagttcaacagctggcacacccgcattcatggcccccgaggcaatcagcgattctggccagtctttttccgggaaggcactggatgtatgggccacgggcgttactttgtactgttttgtttacggcaaatgtccattcattgacgattttatcctggctctgcatcgcaagattaaaaatgagcccgtggtgtttcccgaggagcctgaaatttccgaggagctgaaggacctcatcctgaagatgttggataaaaatccagagacacgcatcggagtgcccgatattaaactgcacccatgggtcaccaaaaatggcgaagaaccactgcctagcgaagaagaacactgcagcgttgtcgaggtgaccgaggaggaggttaaaaacagtgtgaggctgattccctcctggactacggttatactcgttaagtccatgctacgaaaaaggtccttcggcaacccctttgagcctcaagcccgccgcgaagagagatcaatgtcggcacctgggaacctgctggtgaaggagggttttggggaaggcgggaaaagtccagagttgccgggggtgcaagaggacgaagccgcaagttag

SEQ ID NO: 23197 - DNA, 1632 bp, synthetic construct
  misc_feature 1..1632: note = Description of Artificial Sequence: Synthetic coding sequence
  source 1..1632: mol_type = other DNA
atggagggcggccccgccgtgtgctgccaggacccccgggccgagctcgtggagagggtcgccgcgatcgacgtgacacatctggaggaagcggacggaggccccgagcctacccgcaatggcgtggaccctcctcctcgggcgcgtgcagcatctgtgatccctggttccaccagccgattacttcctgcccggcccagcctgtctgcacggaagctgagcctacaggaacgacctgccggctcgtacctggaagcacaggccggtccctacgcaacaggtcccgccagccacatctccccgagagcatggcgccggcccacaatcgaatcccatcacgtggccattagcgatgccgaggactgcgtgcagctgaatcagtacaagctccagagcgaaatcggcaaaggagcatacggcgtcgtacgcctggcctacaacgagtcggaggaccgccattacgccatgaaagttctaagcaaaaagaaactgctgaaacaatatgggttcccgcgacgtccaccgccccgaggatctcaggctgcccagggcggccccgcgaaacagttattacccctcgagcgggtataccaggagatcgcaattctcaagaagctcgaccacgtcaacgttgttaagcttatcgaggtgctggacgatcctgctgaagacaacctctacctcgcactccagaaccaggctcagaacattcagttggattctactaacatcgctaaaccgcatagtctcttgccctcggagcaacaggattctggttctacgtgggccgcgcggtctgtttttgatctgctgagaaaaggcccagtaatggaggtaccatgtgataaaccctttagcgaggagcaggcacgactgtacctgcgggatgtcatcctggggctggaataccttcattgccagaagatcgtgcatagggatattaaaccttcaaatttactgctgggggatgacgggcacgtgaaaatcgctgacttcggagtgagcaaccagttcgaggggaatgacgctcagctgagcagtactgcaggcacacctgcgtttatggctccagaagccatatcagactctggacaatcatttagcggcaaggcactggatgtgtgggcaaccggcgtgaccttatattgctttgtttacggaaagtgcccgttcatcgatgacttcatccttgcattgcatagaaaaatcaaaaatgagcccgtggtgtttccggaagagccagagatctcggaagaattaaaagaccttattctaaaaatgctggataaaaaccccgagaccaggattggcgtgccagatattaagcttcacccatgggttaccaagaacggcgaggagcccctacccagcgaggaggaacattgcagcgtggtcgaggttactgaggaggaggttaagaactctgtccggcttataccaagctggaccaccgtgattctggtgaaaagcatgttacggaagcggtcctttggaaatccctttgagcctcaggcgagacgggaggagcgctctatgagcgcaccgggaaacttactggtcaaggaaggctttggcgaagggggcaagtcacccgagttacccggcgttcaggaagatgaggcggcatcatag

SEQ ID NO: 23198 - DNA, 1695 bp, synthetic construct
  misc_feature 1..1695: note = Description of Artificial Sequence: Synthetic coding sequence
  source 1..1695: mol_type = other DNA
atggacgacttcgagcggcggcgggagctgcggcggcagaagcgggaagaaatgaggctcgaagcagaacgcatcgcctaccaaaggaacgacgatgacgaggaggaagccgctcgggagaggaggcgccgcgcaaggcaggaaagacttcgtcagaagcaagaagaggaatctttgggccaagtgacagaccaggtcgaggttaatgcccagaattccgttccagatgaggaagcgaagactactaccaccaatacccaggtggaaggagatgatgaagccgcctttctcgagaggttagctcggcgggaggagcggcggcagaagcgattgcaggaagctttagaacgccagaaagaatttgaccccaccataacggatgcgagcctgtcactgcctagccggaggatgcagaacgacacggccgagaacgaaacaacagagaaagaagagaagtctgaatcaaggcaggaacggtacgagattgaggagacggaaacagtgaccaaaagctaccagaaaaacgattggagggacgccgaggagaacaagaaggaggataaagaaaaggaggaggaggaagaggagaagccaaagcgtggatctatcggggagaatcagggtgaggagaaaggcacgaaagtgcaggccaagagagagaagctgcaagaggataagcccacatttaaaaaagaagaaataaaggatgaaaagataaagaaggacaaagaacccaaggaagaggtgaagtcctttatggataggaagaaaggttttactgaagtgaaatcccagaacggcgagttcatgacccacaaactcaaacacaccgagaacactttcagtagaccagggggacgcgcttcagtggacactaaagaggcggagggagctccacaagtggaagccggaaaaaggctcgaagaactgagaaggcggcgaggtgagaccgagagtgaggagtttgagaagcttaaacagaagcagcaggaagccgctctggagctcgaggaacttaagaagaaacgtgaagagcgtaggaaagtgctcgaggaggaggagcagcgcaggaagcaagaggaagccgacaggaagctgagagaggaggaagaaaaacgacggttgaaggaggagatcgagaggagacgcgcagaggctgcggaaaaacggcagaagatgccggaagacggcctcagtgatgacaagaagccatttaagtgctttacgcctaaggggagctctctgaagatcgaggaaagagctgagtttttgaataaatccgtgcagaagtcgtctggcgtcaaatctacacatcaggctgccatcgtcagtaaaatagattcaaggctggaacaatacactagcgccatcgaagggaccaagtcggcaaagcccacgaaacctgcggcgtcggacctgcccgttccagcagagggtgtgagaaacattaagtctatgtgggaaaagggcaacgtcttctccagtcctactgcagcggggacacccaacaaggagaccgccggtctcaaggtgggcgtgtcttcccgcatcaacgagtggttgacgaagaccccagacggtaacaagtctcccgccccaaaaccctctgacctgcgccccggggatgtcagcagtaaaagaaacctgtgggagaaacagtccgtggataaggttacctctcccacaaaagtgtag

SEQ ID NO: 23199 - DNA, 2382 bp, synthetic construct
  misc_feature 1..2382: note = Description of Artificial Sequence: Synthetic coding sequence
  source 1..2382: mol_type = other DNA
atggacgacttcgagcggcggcgggagctgcggcggcagaagcgggaagagatgcgcttagaagcagaacggattgcataccagagaaacgacgacgacgaggaagaggcggcccgggagaggcggcggagggcgcgccaagagcgattgcggcagaaacaggaagaggaaagtttaggtcaggtgacggaccaggtggaagtgaatgcccagaactcggtccccgacgaggaggcaaagacaactacaacaaatacacaagttgagggggacgatgaagcagccttcctggaacgcctagccagacgcgaggaacgtcgccagaagcggctgcaggaggcgctggagaggcaaaaggaattcgaccctaccattacagacgcctccctgtctctgccttcacgccgcatgcagaatgataccgctgagaatgagacaaccgagaaagaggagaaatcagaatctagacaggagcggtatgaaattgaagagacagaaaccgtaaccaagtcatatcagaagaacgactggcgggatgccgaagagaataaaaaggaggataaggagaaagaggaagaagaagaggagaaaccaaaaagggggtccattggcgagaaccaagtggaggtgatggtggaagaaaagacaacagaatcccaagaggaaacagtagttatgtcactcaagaatggccagatcagctctgaggagcccaaacaagaagaggaacgggaacagggcagtgacgaaattagccaccacgagaaaatggaggaagaagacaaggagagagcagaagccgaacgcgctagacttgaggccgaggagcgagagaggattaaggccgaacaggataagaagatcgcggacgagagagcccggatcgaggccgaagagaaggcagcagctcaggagcgtgaacgacgtgaggctgaagaacgtgagaggatgagggaggaggagaagagggccgccgaagagcggcagaggattaaagaagaggagaagcgcgcagccgaggagaggcagaggattaaagaggaggaaaagcgggctgccgaggaaagacagcgtattaaggaggaggaaaagcgcgccgccgaggaaagacagcgtgccagagctgaggaggaggaaaaggccaaagtagaagagcagaagcggaataagcaactggaggaaaaaaagcacgcgatgcaagaaaccaaaattaaaggagaaaaggtcgagcagaaaatcgaggggaaatgggtgaacgaaaaaaaggctcaggaggataagctccagacagccgtgctgaagaaacaaggtgaggagaaaggtaccaaggtccaggctaagcgggagaaactgcaagaagacaagcctacgtttaaaaaggaagagattaaagacgagaagattaagaaggataaggaaccgaaagaagaagtgaaatcatttatggatagaaaaaaaggattcaccgaggtcaagagtcagaatggagaatttatgacccataagctgaagcacaccgagaacaccttctctagacctggaggacgggcaagtgttgacacaaaagaggctgaaggcgccccacaggtggaggcaggaaaaagacttgaagagctgcggagaagacgtggcgaaactgaatccgaggagtttgagaagctaaaacaaaagcagcaggaggctgccctagaacttgaggagctgaagaaaaaacgtgaggagcgccggaaagtgctcgaggaggaggagcagaggaggaaacaagaagaggctgatcgcaagctgcgggaggaggaggaaaaacggagattgaaagaagaaattgagcggcggcgggctgaggcagctgaaaaaagacagaagatgcctgaggacggcctatccgatgataagaagccttttaagtgttttactccaaaggggagtagtctgaaaattgaggagcgggccgagtttctaaacaagagcgttcagaaatcttccggggtgaagtctactcatcaggcagccatcgtttctaaaatcgattcccgcctcgagcagtatactagcgccatcgaaggcactaaatcagcgaagcccaccaagccggccgctagcgacctgcctgtgcccgccgagggcgtacgaaatataaaatccatgtgggagaaagggaacgtttttagttcgcccactgcagctggtacacccaataaggagactgctggactgaaggtaggggtcagtagtcggataaatgagtggctcaccaaaactccggatggtaataagtcccccgcaccgaaaccaagcgacctgcgcccaggagatgtgagttctaaacggaatctgtgggaaaaacaatctgttgacaaagtgacgagtcccaccaaagtgtag

SEQ ID NO: 23200 - DNA, 1617 bp, synthetic construct
  misc_feature 1..1617: note = Description of Artificial Sequence: Synthetic coding sequence
  source 1..1617: mol_type = other DNA
atggacgacttcgagcggcggcgggagctgcggcggcagaagcgggaagaaatgcggctcgaagctgagcggattgcctaccaaaggaatgatgacgacgaagaagaagctgctagagagagaaggagaagggccagacaggagaggctgaggcagaagcaggaagaggaatccttaggccaggtgacagatcaggtggaagtgaacgcacagaactctgtaccggatgaggaagcaaagacaaccaccactaatacccaggtagagggggatgatgaagccgcatttctcgagcggctggcaaggagagaagagagacgacagaaacgcctgcaagaggccctggagaggcagaaggagtttgatccaaccataacagacgcttcactctctcttccaagcagacgaatgcaaaatgacactgcagagaatgagactactgaaaaagaagaaaagtcagaatcgaggcaagagcgatacgaaatcgaggagacagaaacagtgacaaaaagttaccaaaagaatgactggagggacgcagaagagaacaagaaggaggataaggagaaagaggaagaggaagaagagaagccaaaaaggggtagcatcggggagaatcagatcaaagacgagaaaataaaaaaggataaggaacccaaggaagaggtgaagagctttatggaccgtaagaaaggctttaccgaagtgaagagccagaacggcgaatttatgacgcacaagctgaagcacaccgagaacacctttagtagaccaggaggccgggcctctgtggacaccaaggaggcagagggggccccccaggtggaagccggtaaacgactcgaggagctgcggcgtcgtaggggagaaaccgagtctgaagaattcgagaagcttaagcaaaagcagcaggaggccgccctcgagttggaggaacttaagaaaaagcgggaggaacggcgcaaggtactcgaggaggaggagcaaagaaggaaacaggaggaggcagacagaaagctgagggaagaggaggaaaagcgcaggttgaaagaggaaatagagcgaagacgtgcggaggcagcagaaaaaagacagaagatgcctgaggatggcttgagcgatgataaaaaacccttcaagtgctttactccaaaaggctctagtttaaaaatcgaagagagggctgaattcctgaataaaagcgtccagaagtcatccggggtgaagtctactcatcaggctgctatagtgtctaagattgacagtagactggaacagtatactagtgcaatcgaagggaccaagtcggctaaacctaccaaacctgcagcttctgacttgcccgtccctgccgaaggtgtgcggaatatcaaaagcatgtgggagaaggggaacgtattctcaagcccaacagccgcagggactcctaataaggagactgctggcctgaaagtcggggtatcttctcggatcaacgagtggcttacaaagactccagatggcaacaaatcccctgcaccaaagccatctgatctgaggcctggggacgtgtcgagcaagcgaaatctttgggaaaagcagagcgtcgataaagttacaagcccaacgaaagtgtag

SEQ ID NO: 23201 - DNA, 1677 bp, synthetic construct
  misc_feature 1..1677: note = Description of Artificial Sequence: Synthetic coding sequence
  source 1..1677: mol_type = other DNA
atgctgggcggcagcggcagccacggccggcggagcctggccgccctcagccaaattgcctatcagaggaatgacgacgacgaagaagaagctgctagggagcgaaggcgccgggctcgtcaggaacgcttaaggcaaaaacaggaagaggagagtcttggccaggttactgaccaagtagaagtgaacgctcagaatagtgtcccagacgaagaagccaagactaccaccaccaacacccaggtcgagggagacgacgaggctgcttttctcgagcgtcttgctaggagggaggagagacgtcaaaaacgccttcaggaagctctggagcggcaaaaagagttcgacccgaccataacagatgctagtttgagcctgccctccagacgtatgcagaatgataccgccgagaatgaaacaaccgagaaggaggaaaaaagcgagtctaggcaggaaagatatgagatcgaggaaacggagacagtgaccaagtcataccagaagaatgattggagggatgcagaggaaaacaagaaggaggataaggagaaggaggaagaagaggaggagaagcccaagcgcggatccattggcgagaaccagggagaagagaaggggaccaaagtgcaggcaaaacgggagaagttacaggaggacaagcccaccttcaagaaagaagaaattaaagatgagaaaatcaagaaagacaaagaaccgaaggaagaggttaaatcatttatggacagaaaaaagggcttcaccgaggttaaaagccagaacggggaatttatgacacacaaactgaagcatacagaaaataccttcagtcggccagggggaagggcctccgtggacactaaagaggcagaaggggccccccaggttgaagcagggaagcgcctcgaggagctgcgtcgcagacgcggtgagacagaaagcgaagaattcgaaaagttaaagcaaaagcagcaggaggccgccctggaattagaagagctgaaaaaaaaaagggaagagcgtaggaaggtgctggaagaagaagagcaaagacgaaagcaggaagaagccgataggaaactgagggaagaggaggagaaacgcaggcttaaagaagaaatcgagagacgtcgagcagaagcggccgagaagagacagaaaatgcctgaagacggtctttccgatgataaaaaaccttttaagtgctttacacctaagggtagctctctgaagatcgaagagcgggccgaattcctgaataaatcagtgcaaaaaagtagtggcgtgaaatctactcaccaggctgccatcgtcagtaagatcgattcaaggctcgagcaatacactagcgctattgaaggcacaaagtcagcaaaacctacaaagcccgctgcctcagacttgcccgtacccgccgagggcgtccggaacatcaagtctatgtgggagaaaggcaacgttttttcaagccctacagccgcagggacgccgaataaggagacggccggtttgaaggtgggcgtgtcgtccaggattaatgagtggctgactaagacccccgatggaaacaaatccccagcgcccaagccttctgatctgcgaccaggcgatgtatccagcaaaagaaatctgtgggagaagcagtcggtggataaggtcacttcccccacaaaggtgtag

SEQ ID NO: 23202 - DNA, 1617 bp, synthetic construct
  misc_feature 1..1617: note = Description of Artificial Sequence: Synthetic coding sequence
  source 1..1617: mol_type = other DNA
atggacgacttcgagcggcggcgggagctgcggcggcagaagcgggaggagatgaggctggaagcagagcggatagcctatcagagaaacgacgacgatgaggaggaggccgctcgcgagcggcgccgacgggcccgccaagagcgcctgcgtcagaaacaggaggaggagtccctgggacaggtgacagatcaggtggaagtgaatgctcagaacagcgttccagatgaagaagcaaagaccacaaccaccaatacgcaggtggaaggcgacgatgaggcagcttttttggagaggctggctagacgcgaagagcgtcgacagaagcgtttgcaggaggctttagagcgtcagaaagagtttgacccaaccattactgatgcctcactgagccttcctagccggcgaatgcagaacgacaccgctgaaaacgaaaccaccgagaaggaggaaaaaagcgaatcccgccaagagcgatacgagatcgaagagaccgagaccgtcaccaagagttatcaaaaaaacgactggagggatgcggaagagaataaaaaagaggacaaagaaaaggaagaagaagaagaggaaaaacctaagcgagggtccattggggagaaccagattaaggacgagaagattaagaaggacaaggagcctaaagaagaggtcaaaagtttcatggataggaagaagggctttaccgaggtgaaatctcagaacggcgagttcatgacacataagcttaagcatacagagaataccttctcgcgccctggcggccgcgcctctgtggatactaaggaagccgaaggagccccacaggtggaagctgggaagagactcgaagagttgcgaagaaggagaggagagacagagtctgaggagtttgaaaaattgaaacagaaacagcaggaggccgcactagaactggaggaacttaagaagaaaagggaggagaggcggaaggtcctggaagaagaagagcaacgacgtaaacaggaggaagccgataggaagctgcgcgaggaagaagaaaaacgacgcctgaaagaggagatagagagacgccgtgctgaagctgcagagaaacgacagaagatgccggaggacggcttaagtgatgacaagaaacccttcaagtgcttcactccaaagggctctagtctaaagatcgaggaaagggctgagttcctgaacaaatccgtgcagaaaagtagtggcgtcaagtctacccatcaagctgcaattgtctctaaaatcgacagtcgcttggagcagtacactagcgctattgaggggactaagagcgctaaaccaacaaagccagcggcctcggacctacccgtgcccgccgaaggagtcagaaacattaaaagcatgtgggaaaaaggtaacgtcttctcaagccctactgccgccggtacaccaaacaaggagacggcaggtttaaaggtcggcgtgtctagtcgaatcaacgaatggcttaccaaaacacccgacggcaataaatcacctgcgcccaaaccttctgatttgcggcccggtgatgtttccagcaagaggaacctgtgggagaaacagtctgttgataaggtgacctccccaaccaaggtgtag

SEQ ID NO: 23203 - DNA, 1692 bp, synthetic construct
  misc_feature 1..1692: note = Description of Artificial Sequence: Synthetic coding sequence
  source 1..1692: mol_type = other DNA
atggacgacttcgagcggcggcgggagctgcggcggcagaagcgggaggagatgcgtctagaggccgaaaggattgcatatcagcgcaacgatgacgatgaggaggaagctgcacgggaaagaagacgcagagccagacaggagcgtctgcgtcagaaacaggaggaagagtccctgggccaagtcacagatcaggtggaagtgaatgcccaaaactccgtccccgatgaggaagctaaaactaccacaaccaatacccaggtcgagggcgacgacgaagctgcattccttgagagacttgcccgccgagaggagagaagacagaaacgattacaagaagctttggagcgccagaaagagtttgaccccaccatcacagatgcctccctgtcgcttccttcacggaggatgcagaacgacaccgcggaaaatgaaacgactgaaaaggaggagaagtcagagtctcggcaagaaaggtacgagattgaggagactgaaacggtcacaaagtcctaccagaaaaatgattggcgcgacgccgaagagaataagaaagaggacaaggaaaaggaggaggaggaggaggagaagccaaagcgcggtagtataggggagaaccagggggaggaaaagggcaccaaagtccaggccaaaagagagaagttacaggaagacaaacccaccttcaaaaaggaagagatcaaagacgaaaaaattaagaaggacaaagagccgaaagaggaggtgaagtcctttatggatcgaaaaaagggttttacagaggttaagagccagaatggagaatttatgacgcataagctcaaacatacagagaatacgtttagtcgccctggtggccgcgccagcgttgatacgaaagaagcagaaggtgcccctcaggtcgaggcaggcaagcgcttggaggaactgcgccgtaggcggggcgagaccgagtccgaagaattcgagaaactcaagcagaaacagcaggaagcagctctcgaactagaggaactgaaaaagaaaagagaggaaaggcgcaaggtgctcgaagaggaggagcaacgcagaaaacaagaggaggccgacagaaaactcagggaggaggaagagaagagacgcctgaaagaggaaattgagcggagacgggcggaagccgcggaaaagcgccaaaaaatgccggaggacggcctgtcggacgataagaaaccattcaaatgctttacacctaaaggaagtagtctaaaaatcgaagagagagcagaatttcttaataagtccgtgcagaaatcaggcgtcaagagcactcaccaagcagcaattgtgtctaagatagattctcggttagaacagtatacctcagcgatcgagggtactaaatccgcaaagccgacaaagccagccgcttccgatttgcccgtacctgcagagggagtaagaaacatcaaaagtatgtgggagaagggaaacgttttttcctcccccaccgcagccggtacaccgaataaggaaactgccggtttgaaagtgggcgtgtcatcccgcatcaacgagtggctgaccaaaacaccagatggcaataaatcccctgcacccaagcctagcgatctgaggcccggtgacgtgtcaagcaagagaaacttatgggaaaagcagagcgttgacaaggtcacctctccaacaaaagtgtag

SEQ ID NO: 23204 - DNA, 1599 bp, synthetic construct
  misc_feature 1..1599: note = Description of Artificial Sequence: Synthetic coding sequence
  source 1..1599: mol_type = other DNA
atgctgggcggcagcggcagccacggccggcggagcctggccgccctgagccagatcgcttaccagagaaacgatgacgacgaggaggaagctgccagagaacgccggagaagagctcgccaggagaggctgagacagaaacaagaagaagagagtctgggtcaggtcaccgaccaggttgaggtgaacgcacagaactctgtccctgacgaagaggcaaagaccacgacaactaacactcaggtcgaaggcgatgatgaagcagcttttcttgagcgactggcgaggcgggaggaacggaggcagaaacgactgcaggaagctttggagaggcagaaggaattcgatccaaccattaccgacgctagcctctccttaccttccagacgaatgcaaaatgacaccgctgagaacgagacgaccgagaaggaagagaagagcgaatccagacaagagagatatgaaattgaggagactgagaccgtgactaagagctatcaaaaaaacgattggcgagacgctgaggagaacaaaaaagaggacaaggaaaaagaggaggaagaggaagagaaacccaaacgagggtcaattggagaaaaccagattaaagacgaaaaaataaagaaggataaagaaccaaaagaagaggtgaagagctttatggacagaaaaaagggcttcaccgaggtaaaaagtcagaatggagagtttatgactcataagttgaaacacaccgaaaacacattttcgcgcccgggtggtcgggcctcagttgatactaaggaggccgagggagcaccccaggttgaagcggggaagcggctcgaggaattgagaaggcgcaggggggagacagaatctgaagagttcgagaagctcaagcagaagcagcaggaggctgccttggaactggaagaactaaaaaagaaaagggaagaacgacgaaaagtattggaggaagaggagcagcgccgtaagcaagaagaggctgatcggaagctgcgggaggaagaagaaaagaggagacttaaggaagagatcgagagacggcgcgccgaagcagcagaaaaaaggcagaagatgccagaggatggcttgtctgatgataagaagccctttaaatgctttacgccgaaaggcagttctttaaaaattgaagagagggctgagttcctaaacaaatctgtccagaagtcttcaggagttaaatccactcatcaagccgctatcgtgagcaagatcgattcgagactggaacagtatacctcagctatcgagggaacaaagtctgccaagcctactaaaccagcagcatctgacttgccagtgcctgctgagggtgtccggaatatcaagagcatgtgggaaaaaggaaacgtcttctcgtctcccaccgctgctggcactccaaataaagagactgccgggctgaaggttggcgttagctcgaggattaatgagtggcttaccaagaccccagatggcaataaatcacccgctcctaagccaagtgatctgcggcccggcgacgtaagcagtaaaaggaatctgtgggagaagcagagcgtggataaggtgacgagtcctacaaaagtctag

SEQ ID NO: 23205 - DNA, 528 bp, synthetic construct
  misc_feature 1..528: note = Description of Artificial Sequence: Synthetic coding sequence
  source 1..528: mol_type = other DNA
atgcccgaggacggcctgagcgacgacaagaagcccttcaagtgcttcacgcctaaaggatcatctcttaagatagaggagagagccgaatttcttaacaagtccgttcagaagtcaggtgtaaagtccacccaccaggccgccatcgtaagcaagattgactccaggcttgaacaatacacatccgccatcgagggaactaagtctgcgaagcccaccaaacctgcagcgagtgatctaccagttcccgcagaaggcgtcagaaacattaaaagtatgtgggagaaaggtaacgttttctcatctcccactgcagccgggacacctaataaggagacagctgggcttaaggtcggagtgagctctaggattaacgaatggcttacgaagacccccgatggaaacaaatctcctgctccaaaaccatccctcacgttttgttcctctctgttcggactttggctgatcggcaacctgctgttgcttccttcgtttctgcccctacttccagagtgggtgtttctgtag

SEQ ID NO: 23206 - DNA, 219 bp, synthetic construct
  misc_feature 1..219: note = Description of Artificial Sequence: Synthetic coding sequence
  source 1..219: mol_type = other DNA
atggacgacttcgagcggcggcgggagctgcggcggcagaagcgggaggaaatgcgccttgaggccgagcggatcgcctatcagaggaatgacgacgacgaggaggaagccgcacgtgagcgacgtcgtagggcccgccaggaacgactcagacagaaacaggaggaagagtctctgggtcaggtaactgatcaagtcgaggtcaacgcccagaactag

SEQ ID NO: 23207 - DNA, 1380 bp, synthetic construct
  misc_feature 1..1380: note = Description of Artificial Sequence: Synthetic coding sequence
  source 1..1380: mol_type = other DNA
atggacgacttcgagcggcggcgggagctgcggcggcagaagcgggaggaaatgcgactggaagccgagcgaattgcttaccaacggaacgatgacgacgaagaggaggctgcacgggaaagacggcgtcgggctaggcaagagcggctcagacagaagcaggaggaggaaagtctgggccaggtcacagaccaggttgaagtcaatgcccagaatagcgttcccgatgaggaggccaagaccacaactaccaatactcaggttgagggggacgatgaagcagcgttcctagaacggttggctcgtcgcgaagaaaggaggcaaaaacgccttcaagaggccctggagaggcaaaaggaattcgatcctaccattaccgatgcttccctttcattgccatctagacgcatgcagaatgatactgccgagaatgagacaactgaaaaggaggaaaaaagcgagtctaggcaggagagatatgagatagaggagacagagaccgttacaaaaagttaccagaagaacgactggagggacgcggaggagaacaagaaggaggacaaagagaaagaagaggaggaagaggagaaacctaagagaggatcaattggcgaaaaccagattaaagacgagaaaatcaaaaaagataaagaaccaaaggaagaagtcaaatctttcatggaccgtaagaagggtttcactgaagtcaaaagccaaaacggggaatttatgacacataagctgaagcacacagaaaataccttcagcagacccggagggagggccagtgtggacacaaaggaggctgagggagcccctcaggttgaagctggaaagcgtctggaggagctgcggaggcggaggggggagactgagtccgaggagttcgagaagcttaaacaaaaacagcaggaagctgcccttgagctcgaggagctgaaaaagaagagggaggaacggagaaaagtgttagaggaggaggagcagcgcagaaaacaggaggaggctgaccggaaactccgggaggaggaagaaaaacgccggcttaaggaggaaatcgaaagacggagggccgaggccgctgagaagcgccagaaaatgccagaagatggacttagtgacgacaaaaagcctttcaagtgtttcactcctaaaggatctagcctcaagattgaagagcgagcagagtttctgaataagagtgtgcagaagagcagtggagtcaaatcaacccaccaggctgcaattgtctctaagattgacagccgactggagcagtatacaagcgccattgagggaaccaagtcagctaagcccacgaaaccagcagcctctgacttacctgtacccgccgagggagtccgcaatattaaatcttag

SEQ ID NO: 23208 - DNA, 219 bp, synthetic construct
  misc_feature 1..219: note = Description of Artificial Sequence: Synthetic coding sequence
  source 1..219: mol_type = other DNA
atggacgacttcgagcggcggcgggagctgcggcggcagaagcgggaggagatgaggcttgaagccgaacgaattgcctaccaaaggaatgacgacgacgaagaggaagcggctagagagagacgaagacgcgcaagacaggagagactgagacagaagcaggaggaggagtcgttaggacaagtgaccgatcaggtagaggtaaatgcccagaattag

SEQ ID NO: 23209 - DNA, 1632 bp, synthetic construct
  misc_feature 1..1632: note = Description of Artificial Sequence: Synthetic coding sequence
  source 1..1632: mol_type = other DNA
atgaccagctacatgaaggtggaccggcagtggaacgccgagatcttggagcttattctcggtactgggcagttgtcaacgggccagatcgcttatcagcgaaacgatgacgacgaggaggaggccgcacgcgaaagaaggcgacgagccaggcaggagcgcctgagacagaagcaggaagaggagtctctggggcaggtcacagaccaggttgaagtgaacgctcaaaacagcgtccctgacgaggaggccaaaaccaccaccacaaacacccaggttgaaggagatgacgaggcagccttcttagaaaggcttgccagaagagaagagagacgacagaaacggcttcaggaagccctcgaaagacaaaaagagtttgacccgaccatcacagacgcaagcctgagcttgcccagccgtaggatgcagaacgatactgcggagaacgagaccacagaaaaggaagagaagagcgaatctagacaagaacgttacgaaattgaggaaactgagactgttaccaagagttatcagaagaacgactggcgcgatgctgaggagaacaagaaagaggacaaggagaaagaagaagaagaggaggaaaagcctaaacgaggatcaattggcgaaaaccagattaaagacgaaaaaattaaaaaggataaggagcccaaagaggaagtgaaatccttcatggatagaaagaagggttttactgaggtgaaatctcagaatggagaatttatgacccacaaactgaagcataccgagaacacgttttcaaggccaggcggacgagctagtgttgatactaaggaagctgagggtgcaccacaagtggaggccggaaaacggctggaagagctgcggcgacggagaggagagacggagtcagaggagttcgaaaaactcaaacaaaagcagcaggaggctgcattggaactggaagagctgaagaagaagagggaagagcggagaaaagtgttggaagaagaagagcagcgacggaagcaagaggaagcggaccgaaagctgagggaagaggaggagaagaggcgcttaaaagaagaaatagagcgacgtcgggcggaggccgccgaaaagcggcagaaaatgcccgaggacggcttatccgacgataagaaacccttcaagtgttttactccaaaaggttcatctctgaagatcgaggagcgggcagagtttctgaataagtcagtgcaaaaatcatctggagtgaaatctacgcaccaagctgcgatcgtaagtaaaatcgactccagactcgaacaatacacatcagccattgaagggacgaagtcagccaaacccacgaaaccagcagcttccgatctaccagttcccgctgagggggtccggaatatcaaatctatgtgggagaagggtaacgtgttctcatcaccaaccgccgcagggacgcccaataaagagactgccggcctgaaggtgggagtctcctctaggatcaacgagtggctcactaaaacgcccgatggtaataagagcccagctcccaaaccgagcgaccttcggccaggcgacgtcagctcaaagagaaacctttgggagaaacaatcagtcgacaaggtcacaagtcctaccaaagtctag

SEQ ID NO: 23210 - DNA, 3975 bp, synthetic construct
  misc_feature 1..3975: note = Description of Artificial Sequence: Synthetic coding sequence
  source 1..3975: mol_type = other DNA
atggccgacagcctgtacaacatccggctgctgcgggagttcagcaatgagtacttgaacaagtgtttttacttgaccctcgaagacatgctttatgctcccctggtacttaaacccaacgtgatggtgtttattgctgaactgttttggtggttcgagaatgtgaaaccagattttgtgcaaccaagggacgtgcaggaactcaaagatgccaaaacagtcttacatcaaaagagctctcgaccaccggttcccatcagtaatgccacaaagcggtcatttctaggcagtccagctgccggaactttagctgaactgcaaccccccgtgcagcttcccgctgagggctgtcaccggcactacctgcatcccgaggagcctgagtatctgggcaagggtaccgccgctttttctccttcccacccactgctcccattgcggcaaaagcagcagaagagcatccagggcgaagatattccagatcaacggcacaggtctaactctctgaccagagtcgacggacagccgcgtggcgcagccatagcttggccagaaaaaaagactaggccagcttcgcagcccaccccattcgcgctgcaccacgcagcttcatgtgaagtggacccttcctccggagacagcatcagtctcgcaaggtcaatctctaaggactccctggcgtcaaacatcgtgaatctcacaccacagaatcagccgcacccaaccgccacgaagagtcacggaaaaagcttgctttccaacgtctccatagaagacgaggaggaagagttagtggctattgttcgggccgatgtagtacctcagcaagcagaccccgagtttccccgtgccagccctagggccttggggctgaccgccaacgcccgttcccctcaaggacagctcgatacatctgagtcaaagccagactctttctttttggagcctctgatgccagcagtcttgaagcccgccaaggagaaacaggttataactaaggaagacgagcgcggtgagggcaggcccaggtccattgtcagcaggaggcctagcgaagggcctcagccgttggtccggagaaagatgacaggtagtagagacctgaaccgaacctttaccccaataccgtgttctgaattccctatgggcatcgaccccactgagaccggaccactcagcgtggagaccgccggtgaggtctgcggagggccccttgcgttgggcggattcgatcctttcccacaggggccttctaccgacggcttttttctgcacgtgggccgagccgatgaggataccgaggggcgactctacgtgtcttgttctaagtctcccaattcccacgatagcgaaccttggactttgctgaggcaggactctgatagtgacgtggtggacatcgaggaggcagaacatgatttcatgggggaggctcatccagtcgtgttcagtagatatattggagaggaggagagtgccaagctgcaggaagacatgaaggtcaaggaacatgaagataaggacgatgctagcggccggagcagcccatgcctgtcaaccgcctcacaaatgagcagcgtgtccatggctagtggttccgtcaaaatgacttccttcgccgaacgaaaactgcagcggctgaatagttgtgagactaaaagctcaactagttccagccagaagaccacgcccgacgcaagtgagtcgtgtccggctccactgactacctggaggcagaagcgagagcaatccccatctcaacatggtaaagatccagcatccctgttagcttctgaactggtccagctgcacatgcagctggaagaaaagcgccgtgctattgaggcacagaaaaagaaaatggaggcgctctccgcacgccagcggctcaagctgggcaaagcggcttttctgcacgtggtaaaaaaaggaaaggccgaagcagcaccaccactacgtcctgaacacttcgcaaaagaatattcgcagcataatggggaagattgtggcgatgccgtgtctaaaacagaagatttcctcgtgaaagaggaacagcgcgaggaactgcttcacgaaccacaggacgtcgacaaggaaagcttggctttcgcacaacagcacaaagccaaagaccccgtcgctctccacgagcttgagcgaaataaggtaatttctgccgccctactcgaagataccgtcggcgaagtggttgatgtgaacgaatgcgatctgtccatcgagaagttgaacgagacaatcagcacactgcaacaagcgatcctgaagatttcccagcaacaagagcagctcctgatgaaatctccaacagtacccgtaccagggagcaaaaataatagccaggaccacaaggtaaaggcacccgttcatttcgttgagcctttatcccccactggggtggccgggcaccgcaaagctccccggctgggccagggcaggaattcacgctccggtagacctgccgaactgaaagtgccgaaggaccgtccccaaggatcctcaagaagtaagacacccacaccatctgtggagactctaccccacctcaggccttttcccgcctcatcccacccccgtacaccaactgaccccggcttggacagcgcactcgagccatctggagacccccacggcaagtgtctgttcgatagttaccggctgcacgatgaatctaatcagcggacactgacactctcctcatccaaggacgctaacatcctgtctgagcagatgtctctgaaggaggtgctggacgcctcagtgaaagaagttggttcaagttcttccgacgtgtcaggtaaggaatctgtgcctgtggaagagcccctccggtcacgcgcatccctaatcgaggttgatctgtctgatctgaaggcccctgatgaggacggagagttggtctctttggacggatccgccgatttggtctctgaaggcgaccaaaaaccgggcgttggtttctttttcaaggatgagcagaaggccgaagatgagcttgccaagaaaagagctgccttcctgctgaaacagcagagaaaggccgaggaagccagagttcgcaaacagcaactggaggccgaggtggaactgaagagagatgaagcccggcgcaaagccgaggaggacagggttagaaaagaggaagaaaaggcgagaagagaattgatcaagcaggaatacctgcggcgcaaacagcagcaaattctggaagagcaggggctgggtaagcccaagtctaaaccgaagaagccgcggcccaagtccgtccaccgcgaggagtcctgcagtgactccggcacaaagtgctccagcacaccagacaatctctctcggacccagtcaggaagctcattgtcactagcttccgctgctacgactgagcctgaaagcgtgcacagcgggggaacacccagtcagagagtggaatctatggaggccctcccaatcctgtctagaaacccatctcggagcactgatagggactgggagacggcctccgccgctagtagtcttgcgtcggtagccgagtatacaggccctaaacttttcaaggagccgtctagcaagtccaataagccaatcatccataacgcaatcagtcattgttgcctggccggaaaggtaaatgagcctcacaagaattctatcctcgaggagcttgagaagtgcgatgccaaccattatatcattctgttcagggatgccgggtgtcagttccgggcgctgtattgctactatcccgacaccgaagagatctataagctcaccggcaccggcccaaaaaacatcacaaagaagatgatcgacaaattgtacaagtactcctccgatcgtaagcaattcaatctgatacccgccaaaaccatgagtgtgtcagtagacgctctgaccattcataaccacctatggcaacccaagagaccagctgtgcctaaaaaagctcagacacgcaaatag

SEQ ID NO: 23211 - DNA, 4809 bp, synthetic construct
  misc_feature 1..4809: note = Description of Artificial Sequence: Synthetic coding sequence
  source 1..4809: mol_type = other DNA
atggtggacgccagcggccgggccgccgccgagggctggcggaagatggaagccccacctgacggcgctgccgacctggtgcctctggatagatatgacgcagccagggcaaagatagcggcgaacctccagtggatatgtgccaaggcttatgggcgtgacaatattcctgaagatctgagagatcctttctacgtggatcagtatgagcaggagcacataaaacctcctgtaatcaagttactgcttagctccgaattgtactgtcgggtctgctcgctaattctgaagggcgaccaagtggcggccctgcagggccaccagtccgtgatacaggcattatcacgcaagggtatctatgtcatggagtccgacgacaccccagtcaccgaatcagatctcagccgtgccccaattaaaatgagcgcacatatggccatggtggatgcattgatgatggcgtataccgtagagatgattagcatagaaaaggtggttgcctcagttaagcggttttccacctttagcgctagtaaggaacttccatatgatctggaggacgcaatggtcttctggattaacaaggtgaatcttaaaatgcgtgagatcaccgagaaggaagtgaaattgaaacagcagctgctggaaagtcccgcccatcaaaaggtgcgataccggcgggagcatttgagcgctaggcagtccccctacttccctctcctcgaagatcttatgcgcgacgggtcagatggagcagcattgctcgccgttatccactattactgtcctgaacagatgaagctggacgacatctgccttaaggaggtgacctctatggctgactcattatataatattcggttgctgcgcgagttctccaacgaatacctgaataaatgcttttatttaacattagaggatatgctttatgcaccacttgtattaaaaccaaacgtaatggtatttatcgccgaattattctggtggttcgaaaatgtaaagcctgattttgttcaaccacgagacgttcaagagctaaaggacgctaaaactgtcctccatcagaaaagctccaggccccctgtccctatttcgaacgctacaaagcggtccttcctcggctccccagcggcagggactctcgccgaactgcaacccccagtgcagctgccagctgaaggctgccatagacactacctgcacccggaagagcccgagtacctgggtaaaggcactgccgccttcagcccttctcacccactgcttccgctgaggcagaaacagcagaagagcatccagggcgaagatattccggaccagcggcaccgatcaaactccctgaccagagtcgacgggcagcctcggggcgctgcaattgcatggcccgagaaaaaaactaggccagcatcccagccgaccccctttgcactgcatcacgcggcctcatgtgaggtagatccatccagtggcgatagtattagtttggctagatcaattagcaaggattctttggcctctaacattgttaacttgactcctcagaatcagccgcatccaacagccactaagtcgcacggcaagagcctcctttcaaacgtatcgatcgaagatgaggaggaggagctagttgctatcgtgagagccgatgtcgtgcctcaacaggccgacccagaatttccgcgtgccagtcctagggccttaggattgacagctaacgcccgaagtccacagggccagctcgacacaagtgaaagtaaacctgatagcttctttcttgaaccgcttatgccagccgttctgaagccggctaaggagaaacaggtgattactaaagaggacgaaagaggggaaggccggccgcggtccatcgtgagtcgaagaccatcggaaggaccacagccactcgtccggaggaagatgaccggatcccgcgatcttaacagaacattcaccccaattccatgcagtgaatttcctatgggtattgaccctacggaaacaggaccactgtccgtcgaaaccgccggagaagtgtgtggcggacccttggcactgggaggctttgaccctttcccccaaggcccctccactgacggatttttcctgcacgtcggccgagccgacgaggacaccgagggacgcctgtatgtgagctgttctaagtccccaaacagccacgacagtgagccatggacgctacttagacaagatagcgactcagatgtggtggatattgaagaagctgagcacgactttatgggggaagctcaccccgttgtgttttcccgctacatcggggaggaagagagcgccaagctccaagaagacatgaaggtcaaggaacacgaggataaggacgacgcctcgggtagatcctctccatgcctgtcgacggcatctcaaatgagttcagtgtctatggccagtggcagcgtcaagatgacatccttcgccgaaagaaaattacagagactgaactcctgcgagactaagtccagtaccagttcatctcagaagactacccctgacgccagcgagtcatgcccggcaccactcactacctggaggcagaagcgcgagcaatctcctagtcaacacggcaaggatcctgcctcactcctggcgtcggaactggtacagctgcatatgcagttggaggagaagaggcgggcaatcgaggctcagaaaaaaaaaatggaggcactgtcagctaggcagagactgaagctgggcaaagctgcctttttgcacgtggtaaaaaagggcaaggctgaagcagctccccccctgaggccggagcactttgccaaggaatactctcagcataacggagaggactgcggcgatgccgtctccaaaaccgaggacttcctcgtgaaagaggagcagcgagaggaactgctccacgagcctcaagatgtagacaaggaatctctcgctttcgctcagcaacataaagcaaaagatcccgtggctctccatgagctcgagagaaacaaagttatctcagcagctctgctggaggacacagttggtgaggtggtcgacgtaaacgaatgtgacctgtcaattgagaaactgaatgaaacaatttccacccttcaacaggcaattctcaaaatctcgcaacagcaggagcagctactgatgaagtcccccaccgtccccgtacctggcagtaagaataattctcaggatcacaaggtgaaagcacccgtgcacttcgtagagccattatctcccaccggagtggctggccatcgcaaagctccacgcctcggtcagggaaggaactctagatctgggcggcccgccgagttgaaggttcccaaggaccgccctcaaggcagttctcgttctaaaacacctacaccaagcgtggagactttaccgcacctgcgcccgtttccagcaagctcacaccctagaactcctacagatccaggcttagattctgctttggagccatcgggagacccccacggaaaatgtctattcgactcatatcgcctgcacgacgagagcaatcaaagaacacttacactgtcatccagtaaggatgctaacatactgtctgaacaaatgtcacttaaagaagtgttagatgcctccgttaaggaggtggggtcgtctagcagcgacgtctcgggcaaggagtcggtgcctgtggaggagcctctaagaagcagggccagcctgatcgaggtggatttaagcgacttaaaggccccagacgaggacggcgagctcgtttctctcgacggatccgccgacctggtaagtgagggcgaccagaagccgggcgtcggattcttctttaaagacgaacagaaagccgaggacgagctggcaaagaagagggccgctttcctgctcaaacagcagcgcaaggctgaagaggcccgagtccggaagcagcagttagaggccgaggtcgagcttaaacgggacgaggcacggcgaaaggccgaggaggatagggtgcgtaaggaagaagaaaaggctcgtcgtgagttaatcaagcaagagtatctcaggcggaaacagcagcagatcctggaggagcagggactggggaagcccaaatcaaagccgaaaaaaccaaggcctaagtcagttcacagggaggagtcctgttctgacagcggcacaaaatgcagttcaacccccgataatctttcccgcacccagagcggttcctccttgagcctggcctcagcggccaccaccgagccagaatccgtccatagtggtggcacccccagtcagcgggtcgaatctatggaggcactgccaatcctgagtcggaatccctctagatctacagatcgggattgggaaaccgcctctgcagcatctagcctggcgtctgtcgctgaatataccggcccaaagctgttcaaggagccaagcagcaagagtaataagcccattatccacaatgccatttcgcactgctgcctggcggggaaggtgaacgagccccacaagaatagtattctcgaggaactagaaaagtgtgatgcaaatcattacataatcctctttcgtgatgccgggtgtcagtttcgcgcactgtactgttattacccagatactgaggagatctacaagctcacgggcacaggacccaaaaatatcacaaaaaagatgatagacaaactttataagtattcctcggaccggaagcaattcaacttgattcccgctaagactatgtccgttagcgtggatgcactcactattcataatcatctctggcaacctaagcggcccgccgtacctaagaaagcgcaaactagaaagtag

SEQ ID NO: 23212 - DNA, 4842 bp, synthetic construct
  misc_feature 1..4842: note = Description of Artificial Sequence: Synthetic coding sequence
  source 1..4842: mol_type = other DNA
atggtggacgccagcggccgggccgccgccgagggctggcggaagatggaagctccccctgacggcgctgctgacttggtgccactggatcgctatgatgctgccagagctaagatcgcagcgaacctccagtggatctgtgctaaagcctatggccgtgacaacataccagaggacttgcgggatccgttctacgtagaccagtacgagcaggaacacataaaacctcccgtgatcaagctcctcctgagctctgaactctattgcagggtgtgcagcttaattttgaagggagaccaagtggctgccctgcaaggacaccagtcagtcatccaggccctgtctcgcaagggcatttacgttatggaatctgacgacactcctgtgacagaatcggatcttagccgagccccaattaaaatgtcagcccatatggcaatggtggatgccctgatgatggcctacaccgttgaaatgataagcatagaaaaggttgtggccagcgttaagcgattttcaactttctcagcctccaaagagctcccatacgacctcgaggacgctatggttttctggatcaacaaagttaaccttaaaatgcgggagattactgagaaagaagtgaaactgaagcagcagcttctggagtctcccgcacaccagaaatcacctagcaagtggtattggaagctcgtgcctgtgagatacaggcgcgaacaccttagcgctcggcaaagtccatactttcccctgctcgaggatttgatgagagatggctcggacggagccgcgttgctcgcggtgatacattactactgccctgaacaaatgaaactggatgacatctgtctgaaggaggtcacatcaatggctgactctctatacaacatcaggctcctgcgggagttctccaatgagtacctgaacaaatgcttctacctcacactcgaggatatgctgtatgctccgttggtgctgaaaccgaacgtcatggtctttattgcagaacttttttggtggttcgaaaacgtcaaacccgatttcgtgcaacctcgcgacgtgcaagagctgaaggatgctaaaacggtgcttcatcagaaaagcagcaggccccctgtgccaatttctaacgccacaaagagaagtttcctcggtagtcccgccgccggtactcttgcggagctgcagcctcccgtccagctgcccgctgagggctgccatagacactacctacaccccgaagaaccagagtatctcggcaaaggaaccgcagcctttagcccctcccacccactgctgcccctaagacagaaacaacaaaaatcaatccaaggagaggatatacctgaccagaggcacaggtcaaattcgttgactagagttgacggccaaccccgtggggccgccattgcttggccagagaaaaagacaagacccgcttcccaacccacaccatttgctctccaccatgcagccagttgtgaagtagatccttccagtggggattcaatctcactggcccggagcatcagtaaagactcactcgcaagcaacatagtcaatctgaccccgcagaatcaaccacatcctactgccacaaaatcacatggcaagtccctgctcagcaacgtttctatcgaagatgaggaggaagaattagtggcaatcgtccgcgcagacgttgtcccccagcaggctgaccctgaatttccacgcgcttccccacgcgctttaggccttacagccaatgctagaagcccccagggacagttggacacatcagagagcaagccagattcatttttcctggaaccattaatgcctgccgtgctgaaaccagctaaagaaaagcaggtgataactaaggaggacgagcggggagagggtcgacctagatcaattgtttcccgtagacctagcgaaggtccacagcctctggtgcgcagaaaaatgaccggctccagggacttgaatcgaactttcacgcctatcccatgttccgaatttcccatggggattgacccgacagagactgggccactgagtgttgaaacagctggcgaagtttgcggcggcccgctggcgctggggggcttcgatccctttccccagggccctagcactgatggatttttcctgcacgttgggcgcgccgacgaagataccgaggggcggttgtatgtgtcttgctctaaaagccccaactcccacgactccgaaccctggacactgttgcgacaggactctgactcagacgtggtggacatcgaagaagctgagcatgactttatgggcgaagcgcatcccgttgtgttctcccggtacatcggcgaggaggagagtgcgaagcttcaggaagacatgaaggtgaaggagcatgaggacaaggacgatgcgtctggtcggagtagtccctgcctatccaccgcttcacagatgtcatccgtcagtatggcctccggaagtgtgaaaatgacctcgtttgccgaaagaaaactgcagcgacttaatagttgcgagactaaatcctccactagctcctctcaaaagacaacccctgacgccagtgaaagttgccccgctcctctcactacctggcggcagaagcgcgagcagtctccttcacagcacggcaaagatcccgccagtctgctggccagcgagctcgtacaactgcatatgcagttggaagagaaaagacgggccatagaggcacaaaaaaagaaaatggaggcactgagtgcccgacagcggctcaagctcggcaaagccgcattcctgcacgtggttaagaagggaaaggccgaagctgcccctcccctgcgtccagaacattttgcaaaggaatacagccagcacaatggagaggattgtggcgatgccgtgagcaagaccgaagacttccttgtgaaggaggagcagcgagaagagctgctgcatgaacctcaggatgtggataaagaaagcctagccttcgcacagcagcacaaggcgaaggacccagtggccctccacgagctggagcggaacaaagtgatttcagctgcattgctggaggacacagtaggggaggtggtcgacgttaacgaatgtgacttaagtattgagaagttgaacgagacgatcagcacgctacaacaggctatcctcaagatctcgcaacagcaggagcaactgctgatgaaaagcccaaccgttccggtgccaggatccaaaaataatagtcaggaccataaagttaaggccccagtgcacttcgtagagccactttcccccaccggtgtggccggccaccggaaagcaccccggcttgggcagggtcgaaactcgagatcagggcgacccgccgagctgaaggtgcctaaggataggccccaggggagctcccggtcaaagacacccaccccctccgtcgagacattgccacacctccggcctttcccagcatcttctcaccctagaacacctactgaccccggcttagactccgccctggagccatccggcgacccccatggtaagtgcctttttgattcctacagactccatgatgagtcaaatcagcggactctgactctctcgagctcaaaggacgcaaacatactctcagagcagatgtccctcaaagaagtgctcgatgcgtccgttaaagaagtgggcagttcctcctcagatgtgagtggaaaagagtccgtgccggtggaggaaccacttcggagccgcgccagcctgatcgaagtcgacctgtctgatctcaaggcacctgacgaggatggagagctcgtgagccttgatggctctgccgatctggtatcagagggcgaccaaaagcctggagttggctttttcttcaaggacgaacagaaggccgaggacgagctggctaagaaacgtgcggctttcctcctcaaacaacagaggaaggccgaagaggctcgggttaggaagcagcagctggaggcggaagtagagctcaaacgcgatgaagcacgccgcaaggctgaggaagacagagtgcgcaaggaggaagaaaaggccagaagagagctaattaaacaagagtatctgagacggaaacagcagcagatcctggaggaacaaggcctgggcaagccaaaatccaagccgaagaaaccacggccaaaaagtgtacatagggaggagtcctgtagcgattctggcaccaagtgttccagcacacctgacaacctcagtcggacccagtcgggcagtagcctcagtctggcttccgcagcaacaactgaacctgagagcgttcatagcggcgggactcctagccaacgcgtcgagtctatggaagctctcccaattctctccaggaatccctctagaagcactgaccgcgactgggaaaccgccagcgccgcctcctcactggctagcgtagcagaatatacgggcccaaagttgtttaaggaacctagcagcaaatctaataagcctattatacataatgccataagccattgttgtctggctggcaaggtgaatgagccacataagaattctatcctcgaggagctcgaaaagtgtgatgccaaccactacataatactgttccgggacgcaggctgtcaattccgagccctttactgttactaccctgataccgaagaaatatataagcttacaggaacggggcctaaaaatatcaccaagaagatgatcgataagttgtacaaatacagctccgacagaaaacaattcaaccttataccagccaaaacaatgtcagtctccgtggatgcacttacaatccacaatcacctatggcagccaaaaaggcctgctgtgcctaaaaaagcacagactcgcaaatag

SEQ ID NO: 23213 - DNA, 1983 bp, synthetic construct
  misc_feature 1..1983: note = Description of Artificial Sequence: Synthetic coding sequence
  source 1..1983: mol_type = other DNA
atgcggatgcccagcagcacctgggcccggatcatgagcagctgcgggtgtgacgcatgtagagtaggaccaagctcagttatgcgacccagcccccggtacccaagagcctgggtgacacggacctgggttcccatcccccctcgaccgatggccagctccggcagtgtgccaagggactgctggcttctggccgctatcgcctccctgactctcaacgacaccctgctgcacagggttgtgcctcacggccagtctttccagaacgggtatgcaggcatttttcacttccagctgtggcagttcggggagtgggtggacgtagtcgttgacgacctccttccaattaaagacggcaagctggtattcgttcattcagctgagggtaacgagttctggtccgcccttcttgagaaggcgtatgcaaaagtcaacggttcctacgaagccctgagtgggggatctactagtgaaggattcgaggacttcaccggaggcgtcactgagtggtacgaactgcgaaaggccccttctgacctgtaccagattatccttaaggccctggagagagggtccctcctcggatgttccatagacattagtagtgtgttggacatggaggcaattacttttaaaaagctagtgaagggccacgcctactccgtcaccggagctaagcaggtaaactaccggggacaggtggtctccctcattcgaatgcgtaatccatggggcgaggtggaatggacaggcgcatggagcgatagttcgtcagagtggaacaacgtcgacccgtatgagcgtgaccagctccgcgtcaaaatggaagacggggaattctggatgtcattcagagacttcatgcgagagtttactaggctagagatatgtaacctgaccccagacgctcttaaaagtcgaaccatcaggaagtggaatacgaccctgtatgaaggcacttggcggcgcggctccaccgccggcggttgtaggaattaccctgccacattttgggtaaacccgcagttcaagattcgtcttgacgagaccgacgatcctgacgactacggcgatcgagaatctggttgttcttttgttttggccttgatgcagaagcatcgaagacgtgagcgcagattcggcagagacatggagacaatcggatttgcggtatacgaagtgccaccggaacttgtggggcagcccgccgtccacctgaaacgggacttcttcctcgctaatgccagtagggccagatccgaacaatttatcaatttacgtgaagtttctacaagattccgactaccaccgggcgagtatgttgtagttccaagcacattcgagcctaacaaggaaggcgattttgtgctcagattttttagcgagaaaagtgcgggaaccgttgagctcgacgatcaaattcaggccaatctgccagacgaacaggttctttccgaagaagagatcgatgagaacttcaaagctctgtttcgccaactggcaggcgaagatatggaaatctctgtcaaggaacttcgaacaattctgaacaggatcatatcaaaacacaaagacctccggacaaagggctttagcctggaaagctgcaggtccatggtgaacctgatggacagagacgggaacggtaagctcgggttggtagagttcaatatcttatggaatcgaatccggaactatctgtcaatcttccgcaagtttgacctggataagagcgggtctatgagcgcctacgaaatgcggatggctatcgagtccgcaggcttcaagctgaacaagaagctttacgagcttatcatcaccaggtacagcgaacccgacttggcagtggattttgataactttgtttgctgcctcgtgaggcttgagactatgtttcgttttttcaaaaccctcgatactgatttagacggggtggtcacttttgatttgtttaaatggctgcagctcaccatgtttgcctag

SEQ ID NO: 23214 - DNA, 2145 bp, synthetic construct
  misc_feature 1..2145: note = Description of Artificial Sequence: Synthetic coding sequence
  source 1..2145: mol_type = other DNA
atgagcgaggagatcatcacccccgtgtactgcaccggcgtgagcgcacaagtacagaagcagcgagctagagaattaggtctcggccgccacgaaaacgccatcaaatatttgggccaagactacgagcagcttagggtgaggtgcttgcaatcaggaactctgttccgtgatgaggcctttcctccagtgccccagagccttggctacaaggatctgggacccaactccagcaaaacatacgggattaagtggaaaagaccgactgagttgctgagcaacccacagtttatagtcgatggagccactcggactgatatctgccaaggagccctcggcgactgttggttgctggcggcaatcgccagcttgacgctgaacgacacccttcttcatcgggtcgtgcctcacggtcagtcattccagaacggctacgctgggatatttcacttccagttatggcagttcggagaatgggtcgatgtggtcgtggacgacctcctccccatcaaggatggaaaacttgtgtttgtgcactcggcagagggtaatgagttttggtccgccttgctcgagaaagcctacgcaaaagtcaacggctcctatgaagccctaagtggcggctcaacatccgaaggatttgaagattttaccggcggtgtcaccgaatggtatgaactgcgaaaagccccgtctgacctttatcagataattctcaaggccctggagcggggctccctgctaggatgcagtattgacattagttccgtgcttgatatggaggctatcaccttcaaaaaactggtcaagggccacgcctactctgtgactggtgccaagcaggtgaactatcgcggacaggtcgtgagtttaattcgcatgcggaatccttggggtgaggttgaatggactggcgcctggagcgactcctcctccgagtggaataacgttgacccatatgagcgcgatcagcttcgggtgaagatggaagatggcgagttctggatgagcttcagagacttcatgcgagagttcacaagactagagatttgtaatctgacccccgacgccttaaagagtagaaccatccggaagtggaataccacgctttacgaagggacgtggcgacggggctcaaccgcaggtggctgccggaattatcctgctaccttctgggtgaatcctcaatttaagattaggctcgacgagaccgacgatcccgatgactatggtgaccgagaaagcggatgcagcttcgttctcgccctgatgcagaagcaccgtcgcagagagcggaggttcggccgagacatggagaccatcgggtttgcggtgtacgaggtgccaccagagctcgtgggccagcctgctgttcatctcaaacgggatttctttctggctaacgcttccagggccagatccgagcaattcataaacctgagagaggttagtacccggttccggctccctcccggtgagtacgtggtggtcccaagtaccttcgagcctaacaaggaaggagacttcgttctgcgcttcttctctgaaaaatcagcaggaacagtggagctcgatgaccagatccaggccaatctgcctgatgagcaagtattaagcgaagaagaaattgatgaaaactttaaggcccttttccgccagctggccggtgaagacatggagatctctgtaaaggaactgaggacgatactgaaccgcattatttccaaacacaaggatctgaggacaaaagggttcagcttggagagttgtaggtccatggtgaatctcatggaccgtgatgggaatggcaagttaggcctggtcgagtttaacatcttgtggaatcgtattagaaactacctgtctattttccgcaaattcgatttggataaatccggtagcatgagcgcctacgagatgagaatggcaatcgaatctgctggctttaagctaaataaaaagctttacgagctcataatcactcggtattccgagccagatctcgcagtcgattttgacaattttgtatgttgtcttgtgcggctcgaaaccatgttcaggtttttcaagaccctggatacagatctcgacggcgtggttacattcgatctgtttaagtggttgcaactcaccatgtttgcctag

SEQ ID NO: 23215 - DNA, 2145 bp, synthetic construct
  misc_feature 1..2145: note = Description of Artificial Sequence: Synthetic coding sequence
  source 1..2145: mol_type = other DNA
atgagcgaggagatcatcacccccgtgtactgcaccggcgtgagcgcgcaagtgcagaaacagagagcgagggagctcgggttgggtcggcatgagaatgcaattaaatatctggggcaggattatgagcaattaagggtccgctgcctgcaaagcggaacactttttagggatgaggccttcccaccagtaccccagagcctcgggtataaagatctcggccccaactcttctaagacgtacggaatcaagtggaagagaccaactgagcttttgtctaacccccagtttattgtggacggagccactcgcacagatatctgccaaggggcattgggcgattgttggctgctggctgcgatcgctagcctgaccctcaacgataccctgctccacagggttgtgccccacggccagagcttccagaacggttatgctggcattttccattttcaattatggcagttcggggaatgggtcgacgtggttgtcgatgacctcttaccaattaaggatggcaagctcgtgttcgtgcacagcgccgagggaaacgagttctggagcgccctgctcgaaaaggcctacgctaaagtgaacggctcatacgaggcccttagtggcggatccacaagtgagggttttgaagatttcacgggcggggttaccgaatggtatgagctccgcaaggcaccttctgatctctatcagattatcctgaaagccctcgagcgaggttccctgctcgggtgctcaatcgacatcagttcagtgctcgacatggaggcgattacatttaagaagctggtaaaagggcatgcgtatagtgtgactggagccaaacaagttaattatagagggcaggtggtctctctgatcaggatgcggaacccatggggcgaggtggaatggactggcgcttggtcagactcgagcagtgaatggaacaatgttgacccatatgagcgtgatcagctgcgggtcaagatggaggacggcgagttctggatgagctttcgagacttcatgcgcgagttcactcgtctggagatctgcaacctgacaccagacgctttaaaatccagaactattcgcaagtggaacacaaccttgtatgaaggcacctggcggagaggtagcacagccggagggtgcaggaattatccagccactttttgggtaaacccacaatttaaaatccgcctggatgaaacagacgatccggatgattacggcgatcgcgagtctggttgcagctttgtgctggcccttatgcaaaaacatcgacgaagggagcgtcgtttcggccgggacatggaaactatcgggtttgccgtctatgaggtaccacctgaacttgtcggccaaccagcagtgcatttgaagcgcgatttctttttggccaacgccagcagagctaggtcagaacagtttattaatctgcgagaggtgtctacaaggtttcggctcccaccaggggaatacgtggtcgtgcctagtacttttgaacccaacaaagaaggcgatttcgtactgcggtttttctccgaaaaatcagccggcacggtggaacttgacgatcagattcaggctaacctgccagatgaacaagttttgagtgaggaagagatcgatgaaaactttaaagctctgttccgtcagcttgctggtgaagacatggaaatctcggttaaggagctgcgaacaattctcaaccggattatttcaaaacacaaagacttaaggaccaaaggattttcgctggaatcatgccgatccatggtgaatctgatggacagagacgggaacggcaagctgggactggtcgagtttaacatcctgtggaacagaattaggaattaccttagcatttttaggaaatttgatctggacaagagcgggtctatgtctgcatacgagatgcggatggcaattgaaagcgctggattcaaacttaataaaaagctgtatgaattgattataaccagatactccgaacccgatcttgcagtggattttgataactttgtatgttgtctcgtgcgcctcgagactatgtttcggtttttcaagacattagatacagacctcgatggggtagtgaccttcgatcttttcaagtggcttcagctcactatgttcgcttag

SEQ ID NO: 23216 - DNA, 489 bp, synthetic construct
  misc_feature 1..489: note = Description of Artificial Sequence: Synthetic coding sequence
  source 1..489: mol_type = other DNA
atgagcgaggagatcatcacccccgtgtactgcaccggcgtgagcgcccaggtgcaaaagcaacgagccagagagctgggtttaggccgccacgagaacgcgatcaagtacctgggccaggactatgaacagcttcgagtgagatgcctgcagagcggaaccttgtttagggatgaagctttccctcctgtacctcagagcctggggtataaggacctgggcccgaattcttctaagacctacggaattaagtggaaacgccctaccgaactgctctcaaatccccagttcatcgtagatggagctacaaggacagatatttgtcaaggcgcccttggcgactgctggctcctggccgccatcgctagcctcaccctaaatgatacgctgctgcatagggtggtcccacatggacagtccttccagaacggctacgcgggaattttccactttcaactgtggcaattcggagagtgggttgatgtttag

SEQ ID NO: 23217 - DNA, 2145 bp, synthetic construct
  misc_feature 1..2145: note = Description of Artificial Sequence: Synthetic coding sequence
  source 1..2145: mol_type = other DNA
atgagcgaggagatcatcacccccgtgtactgcaccggcgtgagcgcacaggttcaaaaacagagagctagggagctggggttgggccgccacgaaaacgccatcaagtacttaggacaggactacgaacaactgagggttaggtgccttcaatccggtacactctttcgtgatgaggcctttccaccggtgccccagtccctcggatacaaggatcttgggcccaattcatccaagacctatggcattaaatggaaacggccaactgagctgctgtctaacccccaattcatcgtagatggagctaccagaacagatatttgtcagggtgccctgggggattgttggcttctggcagctatagccagcctcacactgaatgatacgttgctgcaccgggtcgtgccgcacggtcaatccttccaaaacgggtacgcagggatttttcacttccagctctggcagtttggagagtgggtggatgtggttgtggatgacctgttgccaatcaaggacggcaagctggtgttcgttcacagcgcagaaggtaacgagttctggtccgccctgctcgaaaaagcttatgctaaggtgaatggctcatatgaagctctctcaggcggctccaccagcgagggtttcgaagatttcactggaggtgtgactgagtggtatgagctgcgaaaggcaccgtccgacctgtaccagatcattctaaaggccctagagagaggtagtctgctcggctgtagtattgatatcagctctgtcctcgacatggaggccatcacttttaagaaactggtcaagggtcacgcctattccgttaccggcgctaaacaagtgaactatcggggccaagtggtgtctctgattaggatgagaaacccatggggtgaagtcgaatggaccggagcatggtccgactcgagttccgaatggaacaatgttgatccatacgagcgcgaccagttaagagtaaagatggaagacggcgaattctggatgtccttcagggactttatgagagaatttactcggctggaaatttgcaatctcacaccagacgctttgaagagcaggacgattcgcaaatggaacacaacactatacgagggcacctggcgccgtggctccacagccggcggttgtcgcaactaccccgctactttctgggtcaacccacagttcaagattcgactcgatgaaaccgacgatcctgacgactacggggaccgtgaaagcggttgttcattcgtgctcgcgctgatgcaaaagcacagacgacgagagcgcagatttggaagggacatggagacaataggctttgcagtctatgaggttccaccggagctcgtggggcagcccgctgtacacctcaaaagggacttctttttggcaaatgcctcacgcgctcgcagtgaacaattcatcaacctgagggaagtttctacgcgctttcggttgccccccggggaatacgtggtggtgccaagcactttcgaacccaacaaggaaggtgactttgtgctgagatttttctccgagaagagcgctggaacagtggagctggacgatcaaattcaggcaaacctccccgacgagcaagtgctctcggaagaagagattgatgaaaacttcaaggctctatttagacagcttgcaggcgaagatatggaaataagcgtcaaggagttgaggacaattcttaaccggatcatttctaagcacaaggatctcaggacaaagggctttagcctcgagtcttgcaggagtatggtcaatctcatggacagggacggaaacggcaagttaggacttgtcgagttcaatattttgtggaataggatcaggaattacctttcaatattccgtaagttcgacttggataagtctggatctatgtcggcctacgagatgcgtatggccattgagtccgctgggttcaaactgaataagaaactgtacgagttaatcatcacccgctatagcgagccagatctggctgttgacttcgacaacttcgtgtgttgtctggtgcgactggaaactatgtttaggttcttcaaaaccctggataccgatttagatggcgtcgtgacatttgacttatttaaatggcttcagctcaccatgttcgcgtag

SEQ ID NO: 23218 - DNA, 459 bp, synthetic construct
  misc_feature 1..459: note = Description of Artificial Sequence: Synthetic coding sequence
  source 1..459: mol_type = other DNA
atgagcgaggagatcatcacccccgtgtactgcaccggcgtgagcgcccaggttcagaagcaaagggcccgggagctgggcctcgggaggcatgaaaatgcaataaagtacctgggtcaggattacgagcagctgagggtgaggtgccttcagagtggaaccctttttagggacgaggcgttccctcctgtgccccagtcacttggttacaaagatctcggcccgaactcctcgaagacctacggtatcaagtggaagagacctacagagttacttagcaatccccaatttattgtagatggcgcaacccgcaccgatatctgccagggagctctgggagattgctggcttctggccgcgatcgcaagtctgactctcaatgacaccctccttcaccgtgtcgtgccccacggacagagctttcaaaacggctacgcggggatctttcactttcagtag

SEQ ID NO: 23219 - DNA, 489 bp, synthetic construct
  misc_feature 1..489: note = Description of Artificial Sequence: Synthetic coding sequence
  source 1..489: mol_type = other DNA
atgagcgaggagatcatcacccccgtgtactgcaccggcgtgagcgcgcaggttcagaagcagcgagcccgcgaactcggtttgggccgtcatgagaacgctatcaaatatctgggacaagactatgagcaactccgtgtgcgctgcctccaaagtggcactctgtttcgcgatgaagctttccccccagtcccccaaagtctagggtataaagacctgggccccaattcaagtaaaacttatggcataaaatggaagcggcccacagagctgctgtcaaatcctcagtttatcgtggatggcgccacacgcactgatatctgccagggagccctgggagactgctggctgttggctgctatcgctagtctgacgcttaacgataccctgctgcaccgggtggtgcctcatggacagtctttccagaacggctacgctggtatatttcatttccagctgtggcagttcggggaatgggttgatgtgtag

SEQ ID NO: 23220 - DNA, 492 bp, synthetic construct
  misc_feature 1..492: note = Description of Artificial Sequence: Synthetic coding sequence
  source 1..492: mol_type = other DNA
atgagcgaggagatcatcacccccgtgtactgcaccggcgtgagcgcacaggtgcagaagcagcgcgctcgcgagctcggactgggcaggcacgagaacgccatcaaatacctgggccaggattatgaacagctccgagttagatgcttacagtcaggcacgttattccgcgatgaggccttccctccagtcccccaatctctgggttacaaggacctcggcccaaactcttctaaaacctacgggatcaaatggaagcgccccaccgagctgttgtccaatcctcagtttatcgtggacggggccacccgtactgacatttgccagggggccctgggagactgctggctattggccgccatcgcaagtctgacactcaacgacactttgcttcaccgagtcgtgccgcatggccagagcttccagaatgggtacgcaggaatcttccatttccagctgtggcagttcggggagtgggtagatgtcgtctag

SEQ ID NO: 23221 - DNA, 576 bp, synthetic construct
  misc_feature 1..576: note = Description of Artificial Sequence: Synthetic coding sequence
  source 1..576: mol_type = other DNA
atgagcgaggagatcatcacccccgtgtactgcaccggcgtgagcgcccaggtgcagaagcaacgggccagggagttgggcctcgggagacacgagaatgccattaaatacctgggccaggattacgagcaattaagagtccggtgcctgcagtctgggactctgtttcgcgatgaggcatttccccctgtgccacagtctctggggtacaaggacctggggccaaactcctccaagacgtacggcatcaaatggaagcgtcccacagagttgctgagtaatccgcagttcatagtagacggggccacccgtacggatatatgtcagggcgcactgggtgactgctggctgttggcagcaatcgcttccctgactcttaatgacacactgctgcatcgagtcgtaccccatgggcagtcttttcagaacggctatgccggcatcttccattttcaactgtggcagttcggagaatgggtggatgtcgtagtcgatgacctcctgccaattaaagacggcaagctcgtgtttgttcattccgctgagggaaacgaattctggtcagccctgctgtag

SEQ ID NO: 23222 - DNA, 513 bp, synthetic construct
  misc_feature 1..513: note = Description of Artificial Sequence: Synthetic coding sequence
  source 1..513: mol_type = other DNA
atgagcgaggagatcatcacccccgtgtactgcaccggcgtgagcgcacaggtgcagaaacagagagcacgggagctgggccttggtcgtcatgagaacgccattaagtatctgggccaggattacgagcaactcagggtgcggtgtttgcagtccgggaccttattcagagacgaagcgtttccccccgtgccgcagtctttaggctacaaggacttaggaccaaactcgtcaaagacctacggaatcaagtggaagcggccaactgaattgcttagcaatccccaattcatagtcgatggtgccaccaggacagatatctgtcaaggagctctaggggattgttggctgctcgcagcgattgctagtctaactcttaacgacactctgctccacagagtagtgccccatggacagtcatttcagaacggttatgctggcatttttcattttcaattatggcagttcggcgagtgggtggacgttgtcgtggacgatttgctgccgatctag

SEQ ID NO: 23223 - DNA, 369 bp, synthetic construct
  misc_feature 1..369: note = Description of Artificial Sequence: Synthetic coding sequence
  source 1..369: mol_type = other DNA
atgagcgaggagatcatcacccccgtgtactgcaccggcgtgagcgcacaggtgcaaaagcaaagagctagagaactgggtctcggacgccacgaaaatgccatcaagtacctaggccaggattacgagcaactcagggtaaggtgtctacaaagcggcaccctgttccgggatgaggcgttccctccggtcccacaaagcctcgggtataaagatcttggccccaactcctctaaaacctatgggataaagtggaaacgccctactgagttgctctctaatcctcagtttatcgtggacggtgccaccaggacagacatttgccaaggcgccctgggagactgttggttactcgccgcgattgcttag

SEQ ID NO: 23224 - DNA, 192 bp, synthetic construct
  misc_feature 1..192: note = Description of Artificial Sequence: Synthetic coding sequence
  source 1..192: mol_type = other DNA
atgagcgaggagatcatcacccccgtgtactgcaccggcgtgagcgcccaggtgcagaaacaacgagcacgggaacttggactggggcgacacgaaaacgccataaagtatctgggacaggactacgaacagctcagggtcaggtgtctccagagcggaacgctctttagagatgaagcattccccccatag

SEQ ID NO: 23225 - DNA, 2145 bp, synthetic construct
  misc_feature 1..2145: note = Description of Artificial Sequence: Synthetic coding sequence
  source 1..2145: mol_type = other DNA
atgagcgaggagatcatcacccccgtgtactgcaccggcgtgagcgcccaggtgcagaagcagagggctagggagttaggtctgggacggcacgagaacgcaatcaagtacctgggtcaggattacgaacagttgcgggtgcggtgcttgcagagcggtacactattcagggacgaggcattccccccagtccctcagtccctcggttataaggaccttgggcctaactcttcaaaaacttacggaatcaagtggaagcgaccaacagagttactgtctaacccacagtttattgttgacggagccactcgcactgatatctgccaaggagctcttggcgattgttggctgcttgccgcaatcgcgtctttgactctgaacgataccttgctgcacagggttgttccccatgggcagtctttccagaacggctatgcaggaatcttccacttccagctatggcaattcggcgagtgggtcgacgttgtggtggacgatctgctgcccataaaggacggaaaattagtctttgtgcattctgccgaaggtaacgaattctggtcagcgcttctcgagaaggcgtatgctaaggtaaacggcagttacgaggcacttagtggcggcagtaccagtgagggtttcgaggactttacaggtggcgtgacagagtggtacgaactgcgaaaggcaccctctgatctgtaccaaatcatcctgaaggccctcgaacggggtagcctgctgggttgtagcatcgacatctcttccgtgctggacatggaagcaataacatttaagaagcttgtcaaaggccatgcttattcagtaaccggagccaaacaggtaaactacaggggacaggttgtctccttgatacgtatgcggaatccgtggggggaggtcgaatggactggagcctggtcagacagcagcagtgaatggaataacgtggacccctatgagagggaccagctccgggtcaagatggaagatggcgagttttggatgtcatttagagacttcatgagggagtttacccgactggaaatctgcaatctgaccccggatgcgcttaaatcccgcactataaggaagtggaataccaccttatacgagggcacctggcgccgcggctctacagcagggggatgcagaaattacccggccacattttgggttaatccgcagtttaagatccggctggacgagacagatgatcctgacgactatggcgaccgggagagtggatgcagtttcgtgttggccctgatgcaaaagcatcggcgccgagagcggcgatttggccgggacatggaaacaattggattcgctgtgtacgaagtgccgccagaattggtgggccagcccgcagttcacctgaagagggatttcttcctggcaaacgcctcccgggctcgatccgagcaatttatcaatctgagggaagtctctacacgtttccgattgccgcctggtgagtacgtggtggtcccttcaacctttgagcccaacaaggagggtgatttcgtcctcagattcttctcagaaaagtccgcgggcactgtcgagttagatgatcagattcaggcaaatctgcctgacgaacaggtactgtcagaggaagagatagacgagaattttaaagcgctgttcaggcaactcgctggtgaagacatggaaatttccgttaaagaacttcgtacgattcttaacagaataattagtaaacataaggacctccgtacaaaaggtttttctctggagtcttgtcgtagcatggtcaacctcatggatagagacgggaatggaaaactcggccttgtcgagttcaatatcttatggaacaggatccggaattacctgtccatttttcgaaaattcgacctggacaagtccggttcaatgtcagcctatgagatgaggatggcaatagaaagcgctggatttaagcttaacaaaaaactttacgagctaataataactcgctactcggagcctgatctggctgtggactttgataacttcgtttgttgtctggtgaggctcgagaccatgtttaggttctttaagacgctggacaccgacttagacggagtggtgaccttcgacctgttcaagtggttacagttaacgatgttcgcttag

SEQ ID NO: 23226 - DNA, 2145 bp, synthetic construct
  misc_feature 1..2145: note = Description of Artificial Sequence: Synthetic coding sequence
  source 1..2145: mol_type = other DNA
atgagcgaggagatcatcacccccgtgtactgcaccggcgtgagcgcccaggtccagaaacagcgtgcgcgggagctcggcctggggaggcatgagaacgcaatcaaatatttaggccaggattatgagcagctgagagtgcgctgcctgcagtccggcacactatttcgcgacgaggcatttccgcccgtgccgcagtcactagggtacaaagacttgggccccaatagtagtaaaacttacggcattaagtggaagcgcccaacggagctgctgagtaacccacagttcatcgtggacggtgcgacacgcaccgacatttgccaaggggccctgggggactgttggctacttgctgctattgcttcacttacactcaatgataccctcctgcatcgggtggtcccacatggccaatccttccagaacggctatgccggcattttccactttcaactctggcagtttggagaatgggtggatgttgtggtggacgacctgcttccaatcaaagacgggaagctggtgtttgtccacagtgccgaggggaacgaattctggtcagctctcctcgagaaggcatatgctaaagtaaatgggagttacgaggccctgtcgggggggtcaacatctgagggctttgaggacttcaccgggggcgttaccgagtggtacgaattgcgcaaagctccaagcgacctgtatcagatcattttaaaggcgctggaaaggggatccctgctcgggtgttctatcgacatcagcagcgtgctggacatggaggctatcacctttaagaaacttgtgaagggccacgcttattccgtaaccggagccaagcaagtgaactatcgtggacaggtggttagtttgatccgtatgagaaatccttggggcgaggttgaatggactggagcttggtccgactcatctagcgagtggaacaacgtcgacccctatgagcgggatcagctcagggtgaagatggaggacggcgagttttggatgtccttcagagacttcatgagggagtttacacggctggaaatctgtaatctgacccccgatgcattgaagagccgaacaatccgaaaatggaataccacactctatgagggcacttggagaaggggcagcacggccggagggtgcaggaactatcccgcaactttttgggttaacccgcagtttaaaattcgtctggacgagacggacgatccagacgattacggcgatagagagtcagggtgtagtttcgtgttagctcttatgcagaaacatcgcaggcgggaacgccgattcggtcgagatatggaaactatcggcttcgccgtgtacgaagtgccacccgagctggtcgggcagcccgctgtacacctgaaaagggattttttccttgccaatgcttcccgcgctagaagcgaacagtttatcaacttgagggaagttagcacaaggttcaggctaccacccggcgagtatgttgtggtgccttctacttttgagcccaacaaggagggcgatttcgttttgcggttcttttctgagaagagcgcaggaactgtggagctcgatgaccagatccaggccaatctcccagatgagcaggtcctgtccgaggaggagatagatgagaacttcaaagccctattccggcagttggccggggaagacatggaaatttccgtgaaagagctcagaaccattcttaatagaatcattagtaaacacaaggacttacggacgaagggtttcagtctagagagctgtcggtccatggtaaatctgatggatcgagatggaaacgggaaattgggattagttgagtttaatatattatggaatcgcatacggaactatctgagcatatttcgcaagttcgacctggacaaatcaggatctatgtcagcttacgagatgaggatggcaatcgagtccgccggctttaaactcaacaagaaattgtacgagctgatcatcacaagatactccgagcccgatcttgctgtagacttcgacaacttcgtgtgctgtctggttcgactcgaaaccatgttcaggttctttaagaccctggacaccgacctcgacggcgtcgtgacttttgatcttttcaaatggctgcagctgactatgtttgcatag

SEQ ID NO: 23227 - DNA, 447 bp, synthetic construct
  misc_feature 1..447: note = Description of Artificial Sequence: Synthetic coding sequence
  source 1..447: mol_type = other DNA
atgagcgaggagatcatcacccccgtgtactgcaccggcgtgagcgcccaggtgcagaagcaacgagctcgggagctcggtttggggcgacacgaaaacgccattaaatatctggggcaggattatgaacagctgagagttcggtgcctgcagtcaggcacgcttttcagagatgaggcttttccacccgtgccccaaagccttgggtataaggatctgggcccgaattcatccaagacctatggcatcaagtggaaaagaccaacagaactcctgagcaatcctcagttcattgtggacggcgctactaggactgacatatgtcagggcgcccttggagactgttggctcctggcggcgatagcctcactaacactgaatgacaccctcttgcatcgggtggtccctcacggacaatcctttcagaatgggtacgccggtatttag

SEQ ID NO: 23228 - DNA, 411 bp, synthetic construct
  misc_feature 1..411: note = Description of Artificial Sequence: Synthetic coding sequence
  source 1..411: mol_type = other DNA
atgagcgaggagatcatcacccccgtgtactgcaccggcgtgagcgctcaggtgcagaagcagcgggctcgagaattaggattgggccggcacgagaatgccattaaatacttaggacaggactacgaacagctgagggttcggtgccttcagagtgggaccctgttcagagacgaggcgtttcccccagtaccccagtccctcggttataaggacctaggtccaaactcctcgaaaacatatggaatcaagtggaagaggcctacagagctgctgagtaatccccagttcatagtagacggtgccactaggacggacatttgtcagggagccctcggcgattgctggctgctagccgctatagcatccctgactctgaatgatacactgctgcaccgcgtggtcccttag

SEQ ID NO: 23229 - DNA, 2103 bp, synthetic construct
  misc_feature 1..2103: note = Description of Artificial Sequence: Synthetic coding sequence
  source 1..2103: mol_type = other DNA
atggccggcatcgccgccaagctggccaaggaccgggaggccgccgagggcctaggatcacatgacagagcaattaaatacttgaaccaggattacgaggccctacggaacgaatgcctggaggccggcacattattccaggacccatccttccctgcaattcccagcgcattgggattcaaagaactgggtccatactcatccaaaacccgaggcatcgagtggaaacggcctactgagatctgtgctgaccctcagtttattatcggcggagcaacacgtacagatatttgccagggagcactgggcgactgttggctgttagccgctattgcttctctgactctcaatgaggaaatcctggcccgcgtagtgcctcttaaccagtcattccaagagaactacgccggaatcttccacttccagttctggcaatatggagagtgggtggaggtggtcgttgatgatcgactaccgaccaaagacggagagctgcttttcgtgcactccgcggagggatccgaattctggagcgcacttttggagaaagcttacgccaagatcaatggctgttacgaggccttatcagggggggccactactgagggctttgaagactttaccgggggcatagcagaatggtacgagttgaaaaaaccccctccaaacctcttcaaaatcatacagaaggctttgcagaagggatctctacttggttgcagcatagatataacgagcgccgccgacagcgaagcgataacattccagaaattagtcaaggggcatgcgtatagtgtcactggggcagaagaagtggaatcgaacggctccctgcagaaactgatccgaatcagaaatccgtggggcgaagtagaatggaccggcagatggaatgataactgtccctcttggaatacaatcgatcctgaggagagagaacgcctaacacgtcggcatgaagacggggagttctggatgtcattcagcgacttcttgaggcattactctaggctggaaatttgcaatttgactcccgacaccctgacaagcgacacttataaaaagtggaagctcaccaaaatggatggcaattggcggcgcggaagcaccgctggcgggtgtaggaactatcctaatacattctggatgaatcctcagtacttgatcaagcttgaagaagaggatgaggatgaggaggatggggagagcgggtgtacctttttggtgggattgatccagaagcacagacgacggcagcggaaaatgggagaagatatgcacacaatcgggttcggcatctacgaggtaccagaggaactgagcggtcagactaatatacacttaagtaaaaacttcttcctgacgaacagggcacgcgaacgctctgatacattcattaatctgcgcgaagttcttaaccgatttaaactccctcctggggaatacattcttgtccccagtacgttcgaaccaaacaaggacggggacttctgtattcgcgttttttctgaaaagaaggccgactatcaggcggtggacgatgaaatcgaagctaatctggaagagtttgacattagcgaggacgatatcgacgatgggttccggaggctcttcgcgcagctggccggcgaagatgccgagatttccgcttttgagctgcaaactatcttgcgcagggtacttgccaaaagacaggacatcaagtctgatggatttagtattgaaacctgcaaaataatggtcgatatgctggatagcgacggaagcggcaaattgggtctcaaggagttttatatcctgtggacgaagatccagaaatatcagaagatctatcgcgaaatcgacgtggaccgatccgggaccatgaattcttatgaaatgcgaaaggccctcgaagaggcgggttttaagatgccatgccagttgcaccaagtgattgtagctcgctttgccgatgatcagctgattatcgatttcgataatttcgttcggtgcttagtgcggctagaaaccctctttaagatttttaagcagctcgaccccgaaaatacgggcaccattgaacttgacttgatttcatggctttgttttagtgtgctttag

SEQ ID NO: 23230 - DNA, 2190 bp, synthetic construct
  misc_feature 1..2190: note = Description of Artificial Sequence: Synthetic coding sequence
  source 1..2190: mol_type = other DNA
gcccccggccccggccgggcccccgccgagcggagcgccgagagcccccgaccattttccgctcagtacggcagacgggaccgctccatggcaggtatcgccgcaaagttagcaaaagatcgggaagccgcagagggtctgggcagccacgacagggccatcaaatacttaaaccaagattatgaagctttgcgcaacgaatgcctcgaggccggtacactgttccaagatccaagctttccggccatccctagcgcccttggcttcaaagagttaggcccttactcctcaaaaacacgcgggatcgagtggaaacggcccaccgaaatctgtgctgatccccagtttataatagggggagctacgcgcaccgatatctgtcagggggccctgggggattgctggctgctggcagccatagctagtctgactttgaacgaggagattttggcacgagtcgtgcccctcaatcagtctttccaagaaaattatgccgggatcttccactttcagttctggcagtatggggaatgggtagaagtagtcgttgatgaccggctgcctacaaaagacggagaactgctgttcgttcatagcgcagaaggatcagaattttggtctgctctcctggagaaggcctacgcgaagatcaatggctgctatgaggccctgtccggcggagcgaccactgaagggtttgaagactttactggagggatcgcagagtggtacgaacttaaaaaaccgccacccaacctatttaagatcatccaaaaggccttacagaaaggctcactgctaggctgtagtattgacataacgtccgctgcagattctgaagcaataactttccaaaaattagtgaagggacatgcctatagcgttacaggagctgaggaggttgagtccaatgggtccctgcaaaagctaatcagaataagaaacccttggggggaggtggagtggactggtcgctggaacgacaattgtccttcatggaacacaatcgatcctgaagagcgcgagcggctgacccgtaggcacgaggatggtgagttctggatgtcattcagtgattttctgcgccattattcccgcctagaaatctgcaaccttacgcctgacacattgactagcgacacgtataaaaagtggaaactgaccaagatggatggaaactggcgcagaggatctacagccgggggatgtagaaactatcccaacaccttctggatgaacccccagtatcttatcaaactggaggaagaggacgaagacgaagaagacggtgaaagcggatgtaccttcctagttgggctaatccagaagcatcgacggcgccagcgaaagatgggagaagatatgcacactatcggattcggaatatatgaagttcacccccagctgtcaggccaaactaacatacacctgagcaaaaatttttttcttaccaaccgtgctcgtgagaggagtgataccttcattaacctgagagaagttctgaacagattcaagctgccccccggtgaatatatcctggtgcctagcaccttcgaacccaacaaagacggggacttttgtattagggtcttttccgagaaaaaagccgattatcaggctgtcgacgatgaaattgaggctaacttggaagaatttgatatcagcgaagacgacatagacgatggttttcgaaggctgttcgcccagcttgccggcgaggatgcagaaatcagcgcattcgagcttcagactatcctgcggagggtactggcgaagagacaagatatcaagagtgacggtttctctattgagacttgcaaaataatggtcgacatgctggatagcgatggcagcggaaaactgggtttgaaggaattctatatcctttggacaaaaattcagaaataccagaagatctatcgcgagatcgacgtggatagatcagggacaatgaacagctatgagatgagaaaagccctcgaggaggccggatttaagatgccatgccagctacaccaagtgatagttgccaggttcgctgacgaccaacttattatcgacttcgataactttgtccgatgtctggttaggctggagacattgtttaagatatttaagcagttagaccccgaaaacaccggtacaatcgagttggacctgatctcatggttatgtttttccgtgctttag

SEQ ID NO: 23231 - DNA, 1869 bp, synthetic construct
  misc_feature 1..1869: note = Description of Artificial Sequence: Synthetic coding sequence
  source 1..1869: mol_type = other DNA
atggagatctgcgccgacccccagttcatcatcggcggcgccacccggaccgacatatgtcaaggtgctttgggggattgttggctgctggcagctatcgcttccctgacactgaacgaggaaatcctggctagagtggtgcccctgaatcagagcttccaggaaaattacgctggcatttttcactttcagttttggcaatacggagagtgggttgaggtggtcgtggacgaccgcttgcccacgaaggatggagaattactgttcgttcactcagcggaggggtcggagttctggagtgcgctgcttgaaaaagcctacgcaaagattaatggttgctatgaagccctaagtggaggcgcgaccaccgaaggctttgaagatttcacagggggcatcgcagagtggtacgagctcaagaagccccccccaaaccttttcaaaataatccagaaggcactccagaagggtagcctgctgggatgctccattgatatcacctccgcagcggactccgaagctataaccttccagaaactggtgaaaggacatgcctatagcgttaccggggctgaggaagttgaatcaaacggttcactccaaaagttgatccgtatcagaaacccctggggtgaggtggagtggactgggaggtggaacgataactgcccatcttggaacacaatcgaccccgaggaacgcgagcgactaacgcgccgtcacgaagacggtgaattttggatgtcattttccgattttctgcgacactactcccgcctcgaaatctgcaatctgactcctgacactctcacgagtgatacatacaagaaatggaagttgaccaagatggacggcaactggcgccggggctcgaccgcaggaggctgcagaaattatccaaacaccttttggatgaacccccagtacttaataaaattggaggaggaggatgaagatgaagaggacggggaatctggctgtacattcctcgtgggcctcattcagaaacacaggcggagacaaaggaaaatgggagaggacatgcatacaatcggatttggaatatatgaggtacccgaagaattgtctgggcagactaacatccatctgtcgaaaaacttctttctgacaaatagggctcgagagcggtctgacacgtttattaatttgcgtgaggtgttgaatcgattcaagttgcctccaggcgagtatattctcgttccatctacctttgagcctaacaaagatggcgatttttgcattcgggtgttctccgagaagaaggccgattaccaggcagtagacgacgaaattgaggccaatttagaggagttcgacatttctgaagatgatatcgatgatggatttcggcgcctgtttgctcagttggccggggaggacgctgagatctccgccttcgaattgcagaccattttaagacgtgtcctagcaaaaagacaagatattaagtctgacggattttccatcgagacctgcaaaattatggtggatatgttggacagtgatggaagcggcaagctgggccttaaagagttctacatcctgtggactaaaatacagaaataccagaaaatttacagggaaatagacgtggaccggagcgggacaatgaatagctacgaaatgcgcaaagccttagaggaggccgggttcaagatgccttgccagttacatcaggttattgtggcccggtttgctgatgaccagctgatcattgattttgacaactttgtgagatgccttgttcgcctcgagaccctgttcaagatctttaagcagctggatcccgaaaatacgggtaccatcgaactcgatcttatctcctggttgtgcttcagcgtcctgtag

SEQ ID NO: 23232 - DNA, 396 bp, synthetic construct
  misc_feature 1..396: note = Description of Artificial Sequence: Synthetic coding sequence
  source 1..396: mol_type = other DNA
atggagatctgcgccgacccccagttcatcatcggcggcgccacccgtacagatatttgtcagggtgccttgggagattgttggctgctcgctgctattgcttccctaactctgaatgaggagatactggcacgggtggtacccctcaaccagtcctttcaggaaaactacgctgggatttttcactttcagttctggcagtatggagaatgggtggaggtcgttgtggatgacagactccccacaaaagatggagagctactctttgtgcacagcgccgaggggtctgaattctggtccgccctcctagagaaagcatacgccaaaatcaacgggtgctacgaagccctgagcggtggagctactacagaaggttttgaagattttactggctag

SEQ ID NO: 23233 - DNA, 156 bp, synthetic construct
  misc_feature 1..156: note = Description of Artificial Sequence: Synthetic coding sequence
  source 1..156: mol_type = other DNA
atgaagaaccgggaggccgcccgggagtgccggcggaagaagaaggaatatgttaagtgcctcgagaatagagtagccgtgcttgaaaatcaaaataagaccctgattgaggagctaaaggcactcaaggatctctactgtcacaagtccgattag

SEQ ID NO: 23234 - DNA, 984 bp, synthetic construct
  misc_feature 1..984: note = Description of Artificial Sequence: Synthetic coding sequence
  source 1..984: mol_type = other DNA
atgaccatggagagcggcgccgagaaccagcagagcggcgacgccgccgttacggaagccgagaatcagcagatgacagtgcaggctcagcctcaaatcgctacactggctcaagtgagcatgccagctgcccatgccacctcatcagctcctaccgtgaccctggttcagcttccaaacggtcagacagtgcaggtccacggtgtcattcaggcagcacaaccctctgtcattcagagcccccaggttcaaacagttcagatctcaacaattgccgagtctgaagactcgcaagaatcagtggactctgtgaccgacagtcagaaaagacgagagattctgagtcgccgccccagctataggaagattcttaacgatttgtctagcgacgctcccggagtcccacgcatcgaggaggagaaatctgaagaagagacatcagcccccgcaatcacaactgtgactgttcccacgccaatttaccagacatcgagcggccaatacatcgccattacccaaggtggcgcgatccagctagccaacaatggcacggacggagtccagggactgcagactttaactatgaccaatgccgccgcgacccagccggggaccacaattctgcagtacgcacagacgacagatggacagcaaattctggtgccatcaaatcaggtggttgttcaggccgccagcggcgacgttcagacatatcagatcagaaccgcccccacttctaccatcgcacccggcgttgttatggcaagcagccctgccctgcctacacagcccgcagaagaagccgcccggaagcgagaggtcaggttaatgaagaaccgcgaggccgcccgcgagtgtcgcagaaagaagaaagaatatgtaaagtgcttagaaaatagagtcgcagtcctggagaaccaaaacaaaacgctgatagaggaactcaaggccttgaaagatctatactgccacaaaagcgactag

SEQ ID NO: 23235 - DNA, 693 bp, synthetic construct
  misc_feature 1..693: note = Description of Artificial Sequence: Synthetic coding sequence
  source 1..693: mol_type = other DNA
atgaccatggagagcggcgccgagaaccagcagagcggcgacgccgcagtaaccgaagcggaaaaccagcagatgacagtgcaagctcagccccagatcgctaccctcgcgcaggtttcaatgcccgcagcgcacgccaccagctctgccccgactgtcacactggtgcagctgcccaatggtcagaccgtccaggtacacggagtgatccaggctgcgcagcccagtgtcatccagtcgccccaggtccagacggtccagtcaagttgcaaagatttgaagcgcttgttctccggtactcagatcagtacaattgcagaatctgaggacagccaggagagcgtggacagtgtaactgattcccaaaaacgccgcgagatcttgagtcggaggccgtcatacagaaagattctcaacgatctgagctcagacgcacccggcgtgccaaggatcgaagaagaaaagtctgaagaagagacgtctgcgttgccaacccagcctgccgaggaagcagctcgtaagagagaagtaaggctgatgaagaacagggaagccgcgagagagtgccggagaaagaaaaaagagtacgttaaatgcctggaaaacagggttgctgtcctagagaatcagaataaaactttgatcgaggaacttaaagccctcaaggacctgtactgccacaaatctgactag

SEQ ID NO: 23236 - DNA, 240 bp, synthetic construct
  misc_feature 1..240: note = Description of Artificial Sequence: Synthetic coding sequence
  source 1..240: mol_type = other DNA
atgaccatggagagcggcgccgagaaccagcagagcggcgacgccgctgtaacggaagctgagaaccagcagatgactgtacaggcccaaccccagatcgccactctggcacaggtgtctatgccagcggcgcatgccacttcttccgcaccgactgtgacccttgttcaactacccaacggccaaacagtccaggtgcacggcgtgatccaggcagcccagccctcggtgattcagtag

SEQ ID NO: 23237 - DNA, 984 bp, synthetic construct
  misc_feature 1..984: note = Description of Artificial Sequence: Synthetic coding sequence
  source 1..984: mol_type = other DNA
atgaccatggagagcggcgccgagaaccagcagagcggcgacgccgccgtgacagaggcagagaaccagcagatgaccgtccaggcacagccacagattgctacactcgcacaggtcagcatgcctgccgcccacgccacttccagcgcgccgacagtgacactggtgcagctccccaacggccagacagtgcaggtacacggcgtaatccaagctgcccagccctcggtgattcagtcaccccaggtacagactgtccagattagtaccatcgcagagagtgaggactcccaggaatctgtggactccgttaccgacagtcaaaagaggcgtgagattctaagccgacgcccatcctaccgcaagattctgaacgatcttagcagcgacgcaccaggggtcccccgcattgaagaagaaaaatctgaggaagagactagtgccccggccataaccaccgtgacggtgcctactcccatctatcagacctccagtgggcagtacatcgctattactcaaggaggggcgattcagctggctaacaacggcacagacggagtgcagggcctgcagactctaactatgaccaacgcagccgccacgcagcctgggaccacgatcctccagtacgcacaaacaactgacgggcagcagatcctggtgccctcaaaccaggtggtggtgcaagctgcttctggagatgttcagacatatcagattcggacggcccctacaagtacaatcgcacccggggttgtcatggcttcctccccagcactacccacgcaacctgcagaagaggcggcccgcaaacgggaagtgcgtctgatgaagaatcgggaggcagctagggaatgcaggagaaagaaaaaagaatatgtcaagtgcctggaaaaccgggtggccgtcctggagaaccaaaataaaactctgatcgaggaactgaaagccctcaaggacctgtattgccacaagtcagattag

SEQ ID NO: 23238 - DNA, 1026 bp, synthetic construct
  misc_feature 1..1026: note = Description of Artificial Sequence: Synthetic coding sequence
  source 1..1026: mol_type = other DNA
atgaccatggagagcggcgccgagaaccagcagagcggcgacgccgccgttaccgaagccgaaaaccagcagatgacagtccaggcgcagccccaaattgccacactggcccaggtttctatgccggccgcccacgcgactagctcagcacctaccgttacattggtgcaattgcctaatggtcagaccgtccaggttcacggggtcatccaagcagctcagccatcagtcatccagagccctcaggtgcaaactgttcagtccagctgtaaggatcttaagcgcctgttctccgggacccaaatctcaaccatcgccgaatccgaggatagccaggagtcagtcgacagtgtcactgattcacagaagaggagggagattctgtcacggcgcccctcttatagaaagatactcaacgatctgagtagcgatgccccaggcgtcccccggatagaggaagagaaatccgaggaggaaactagtgccccagccatcacaactgtgaccgtccctacgcccatctatcagacatcttccggccagtatatcgcaatcacgcagggaggcgcgattcaactcgccaataatggtaccgacggtgtacaggggctgcagacgctgacaatgactaatgctgcagccacccagccaggaacgaccattctgcagtatgctcagactactgatgggcagcagatcctcgtccctagcaaccaggtagttgtgcaagcagcaagcggggacgttcaaacatatcaaatccggactgcccccacatctacaatcgctcctggcgtagtaatggcatcatcaccagcgctgccaacccagccagcggaagaagccgctagaaaaagagaggtgcgcctgatgaaaaacagagaggccgcacgcgagtgtcggaggaagaagaaggaatatgtgaagtgtctcgagaatcgggtagccgtcctggaaaaccagaacaagaccttgatagaagagcttaaagcactgaaagacctctactgccataaaagtgattag

SEQ ID NO: 23239 - DNA, 549 bp, synthetic construct
  misc_feature 1..549: note = Description of Artificial Sequence: Synthetic coding sequence
  source 1..549: mol_type = other DNA
atgaccatggagagcggcgccgagaaccagcagagcggcgacgccgccgtgacagaagccgagaaccaacagatgactgtccaggctcaacctcagatcgcaactttagcacaggtcagcatgccggcagcgcacgccacgtcgtccgcgcctaccgtcactctcgtccagctgcctaatggacagactgttcaagtgcacggggtgatccaggcagctcagccatctgtaatccagtctccccaggtacagaccgtgcagagctcgtgtaaagatctgaaaaggctgttctccggcacccagattagcacaatcgcagagtcggaagatagccaggaaagcgtggattcagtgaccgatagccagaagcggcgcgaaattctgtctaggcgaccctcctatagaaaaattcttaacgacctgagctcagacgctcccggggtgcccagaatcgaggaggaaaagagcgaagaggagacttccgctccagcgattacaacagtgaccgtgcccactccgatttaccaaacaagctcaggtcagtactag

SEQ ID NO: 23240 - DNA, 399 bp, synthetic construct
  misc_feature 1..399: note = Description of Artificial Sequence: Synthetic coding sequence
  source 1..399: mol_type = other DNA
atgaccatggagagcggcgccgagaaccagcagagcggcgacgccgcggtgaccgaagccgagaatcagcaaatgacggtgcaggctcagccccagatcgccactctcgcccaggtgagcatgccagcagctcacgccacgtcttctgcacctaccgtgactctcgtacagctgcccaatggccaaaccgtccaggtgcacggcgtcatccaggccgcacagcctagcgtgatccagtctccacaagtgcagacagtgcagagttcttgtaaagacctgaaacggctcttctctggaacacagatctcaacaatagccgagtccgaagactcccaggaatcagtggatagcgtgacagattctcaaaaacgccgcgagatactatctagacggccgtag

SEQ ID NO: 23241 - DNA, 705 bp, synthetic construct
  misc_feature 1..705: note = Description of Artificial Sequence: Synthetic coding sequence
  source 1..705: mol_type = other DNA
atgaccatggagagcggcgccgagaaccagcagagcggcgacgccgctgtgacagaggctgagaaccagcagatgaccgtacaggcacagcctcagattgccacgctggcacaggtatcaatgccagccgcacacgctaccagcagtgctccgactgtgaccctcgtccagctgcctaacggccagaccgtccaggtgcacggtgtaatccaggcggcgcaaccaagcgtgatccagtccccccaggtgcagacagtccagatctctaccattgcagagtccgaggactcccaagaatccgtggattctgtcacagacagccagaaaagaagggagattctgtcccgccgcccttcctaccggaagattcttaatgatctgagttcggatgcacctggagtgccccggatcgaagaggagaagagtgaagaggaaactagcgcccctgcgattactaccgtgaccgtgcccactcccatttatcaaacgagttctggccagtacatcgccattacacagggcggggctattcaacttgctaataacggcacagatggcgtacagggcctgcagaccctcaccatgaccaacgctgctgctacacagccaggaacaaccatactgcagtatgcccaaaccactgacggtcagcagatactggtgccatctaaccaggtagtggtccagggaacccagaagctctag

SEQ ID NO: 23242 - DNA, 462 bp, synthetic construct
  misc_feature 1..462: note = Description of Artificial Sequence: Synthetic coding sequence
  source 1..462: mol_type = other DNA
atgcccgccgcccacgccaccagcagcgcccccaccgtgaccctggtgcagctgcctaatggacaaaccgttcaggtacatggcgtgatacaggctgcacagccgtcagtcatacagtctcctcaagtgcagaccgtgcagagttcctgcaaggacctgaagagattgttcagcggaacccagattagcactatcgcggagtccgaagattcccaggagtcagtcgattccgtgacagacagccaaaagaggagggagatcctgagcaggcggcccagctaccggaagatactcaacgacctgagtagcgacgcccccggcgtcccaaggatagaggaggaaaagagtgaagaggaaacttctgcccctgcaattactaccgtgacagttcctacccccatataccaaacgagctccggtcaatacacttacttgagggatacaacatacagctgccagtag

SEQ ID NO: 23243 - DNA, 1998 bp, synthetic construct
  misc_feature 1..1998: note = Description of Artificial Sequence: Synthetic coding sequence
  source 1..1998: mol_type = other DNA
atggcccacgagatgatcggcacccagatcgtgaccgagcggctggttgctctcctggaaagcggtaccgagaaggtcctgttaatcgacagcagaccattcgtagaatataacacaagtcatatcctggaggctatcaacattaactgttcgaaactgatgaagcggaggttacaacaagacaaagtgcttatcacggaactcattcagcacagtgctaagcacaaggtagacatagattgctcacagaaagtggtagtgtacgaccagtctagccaggacgtggcaagtctctcttccgactgtttcctcaccgtgttgctggggaaactggaaaaatccttcaacagcgtgcacctgcttgcagggggatttgccgaatttagccgatgctttccagggctgtgtgaggggaaaagtaccctcgtgcccacctgtatttctcagccatgtcttcctgtcgcaaacatcgggcctacgagaatcctgcccaatctctatttgggatgccagagggacgtactcaacaaggagctgatgcagcagaacggtattgggtatgtacttaacgccagcaacacgtgtcccaagccagactttattccggaatcccatttcttgagagtgccagtgaatgattctttttgcgagaagatcttgccctggctggataaatctgttgattttatcgaaaaagctaaagccagcaatgggtgcgtgctcgttcactgtttggccggcatttcacgatccgccacaatcgcaattgcttatattatgaaacgtatggatatgtcgctcgatgaagcttaccggttcgtgaaggaaaaaagacctacgatttcacctaattttaactttttgggtcagttgttggactatgagaagaagataaaaaatcagaccggcgcctccgggccgaaaagcaagcttaaattgttgcatctcgagaagccgaacgagcctgtccccgccgtatccgaaggcggacaaaaatctgaaacccctctgtcgccgccttgcgccgactccgccacatctgaggccgcaggccagcgcccagtacacccagcctctgtaccttcagtgccttctgtccagccatcgttgctggaagattcccccctggtccaggccctatcaggcctccaccttagtgctgaccgcctggaggatagtaataagctgaagcggagcttctcactggacataaagtcagtctcttattcagcctctatggccgcaagcctccatggttttagctctagtgaggacgccctggaatactacaaaccatccaccacactcgacggaaccaacaagctgtgtcaattcagtccggtgcaagaactgagcgaacagaccccagaaacgtcccctgacaaggaagaggcaagtatacccaaaaaactgcagaccgcacgtccaagtgattcccaatctaaacggctccattccgtgagaacttcatcttcgggtactgctcaacggagccttctgtccccacttcacaggagcggttccgtggaggacaattatcacacatctttcctattcggccttagcacctcccagcagcatcttacaaagtcagcgggactgggactaaagggttggcactcagatatcctcgctccacagacttcaaccccatccctcactagctcttggtattttgctaccgagtccagccacttctatagcgcttctgccatttatgggggctctgcctcctattcagcatacagctgctcccaactgccaacatgtggcgatcaagtctattctgttagaagaaggcagaaaccttccgatcgtgccgacagccgccggtcatggcatgaggagtcaccatttgaaaagcagtttaagagaaggtcctgtcagatggagtttggggagtctatcatgtccgagaatcggagccgggaagaactgggcaaagtgggaagccagtcaagcttttcagggtccatggaaattatcgaagtatcctag

SEQ ID NO: 23244 - DNA, 939 bp, synthetic construct
  misc_feature 1..939: note = Description of Artificial Sequence: Synthetic coding sequence
  source 1..939: mol_type = other DNA
atgcggatgctgctggccctgctggccctgagcgccgcccggccctcagcttcggccgaatcccactggtgttacgaagtccaggctgaatcttctaattacccttgtctggtgccagtcaaatggggtggtaattgtcagaaagatagacagtcccccataaacatcgtgacaacaaaagctaaggtcgataagaagcttggcaggttttttttctccggatacgataagaaacagacctggacagtccagaataacggccacagcgtcatgatgctcctcgagaacaaggccagcatcagcggtggcggccttcctgccccatatcaagctaagcagctccacttgcactggtcggaccttccttataagggcagcgagcattcactggacggggagcattttgctatggagatgcatatcgttcacgagaaggagaagggcactagtagaaacgtgaaggaggctcaggaccctgaggacgagatcgctgtgctcgcgtttcttgtcgaggctggcacacaagtgaatgaagggttccagccacttgtggaagcccttagtaatatacctaaacccgagatgtccacaacgatggctgagtctagcttgctggacctcctgccgaaagaggagaagctgcgccattatttcaggtacctggggagcctaacaacgcctacttgtgacgagaaagtggtctggactgtgtttcgggaaccgatccagctacaccgcgagcagatcttggcatttagccaaaagctctattatgataaggagcagaccgtgtcgatgaaagacaacgtgcgcccactgcagcagctgggccagcggacagtgatcaaatccggagcaccagggcggcctctcccgtgggcacttccagctctgctgggacctatgttggcatgtctgttggccggtttcctgagatag

SEQ ID NO: 23245 - DNA, 1380 bp, synthetic construct
  misc_feature 1..1380: note = Description of Artificial Sequence: Synthetic coding sequence
  source 1..1380: mol_type = other DNA
atggcccccctgtgccccagcccctggctgcccctgctgatccccgcccctgcacctggacttaccgtgcaactgctgttgtctcttttattactggtcccagtgcatccacagagactaccaaggatgcaagaagacagccccctgggtggagggagcagcggcgaagatgatcctctgggtgaagaggaccttccctcagaagaagactccccacgcgaggaggaccctcccggagaggaggacctgccaggggaggaggacctgcccggtgaggaggaccttcctgaagtgaaaccaaagtctgaggaagaggggagcctgaagctggaggacctacccacagtggaggctcccggtgacccccaggagcctcagaataacgcccatcgcgataaagaaggagacgatcagtctcattggaggtacggcggagacccgccctggcctagggtctccccagcatgtgccgggcggtttcagtctcccgtcgacatccgacctcagctcgcagctttctgccccgctttgaggcctctcgagctcctgggcttccagctgcccccactaccagaactccgactccgcaataatgggcactctgtgcagctgactctcccaccgggactcgagatggcccttggacccggacgcgaatacagggccctgcaacttcatctccactggggggcggcaggaaggcccggctcagagcatactgtggaaggacacaggttccccgccgaaatccatgtggttcaccttagtacagccttcgctcgggtggatgaggctttagggcgccccggaggcttagccgtgctggccgcttttctggaggagggccccgaggagaattccgcctacgaacagctgctcagccggctagaggaaatagcagaggaggggagtgaaacccaagtcccaggtctcgatattagcgctctgttgcccagcgactttagcaggtatttccaatatgaggggtctctgacaacaccgccatgcgcccagggcgtgatctggaccgtcttcaatcagaccgttatgctgagcgccaaacagcttcacaccctctctgatacgttgtggggacctggcgattctcggctccagcttaatttcagagcaactcaaccactgaacggccgtgtgattgaagcctcttttcctgcaggcgttgactctagtcctagggccgctgaaccagtacaactcaattcctgtcttgccgcaggcgacatactggctcttgtgttcggcttgctgttcgctgtaacctcagttgcgtttttggtgcaaatgcggcgacagcaccgcagaggcacaaaggggggcgttagctatagacctgcagaggtggcagaaactggcgcctag

SEQ ID NO: 23246 - DNA, 1071 bp, synthetic construct
  misc_feature 1..1071: note = Description of Artificial Sequence: Synthetic coding sequence
  source 1..1071: mol_type = other DNA
atggcccccctgtgccccagcccctggctgcccctgctgatccccgccccagccccaggattgaccgtgcagttgctgctgagtctgctgcttctggttcctgttcatcctcagcgccttcctcgcatgcaggaagactcgccactcggcggggggagtagtggggaagatgatcctctgggggaagaggatcttccttctgaagaggatagtcctcgcgaagaggatccccccggtgaagaggacctacccggagaggaggatttgcccggggaggaggatctcccagaagtcaagcccaagtccgaggaggaggggtccctcaaactggaggacctgcctactgttgaagcgcccggcgaccctcaggagccacaaaataatgctcaccgagacaaagaaggagatgaccagagccactggcgctatggcggggaccctccttggccaagggttagcccggcctgcgccggcaggtttcaatctcccgtggatattcgcccccaactggctgcattttgccctgcattgaggcctttggagcttttggggttccagttaccccctttgcccgagctgaggctgcgaaataatgggcattccgtgcaactgacccttccaccaggccttgaaatggctcttggccctgggcgcgagtacagagccctgcaattgcatctgcactggggagccgctggcagacctggttccgaacacaccgtggagggccaccggtttcccgccgagatccatgtggtgcatttgtctaccgccttcgctcgggtcgacgaggccttagggcggcctggtggactggcggtgcttgccgccttcttggaggagggccccgaggagaacagcgcttatgagcagctgttgtctcggctagaagagatcgctgaggaaggatcagaaacacaggtgcctgggttggacatctcggcgctcctgccctcagacttctctcgttactttcagtacgagggctccttaacaacccccccttgtgcccaaggggtgatttggaccgtgtttaaccaaactgtcatgctcagcgctaagcagagctag

SEQ ID NO: 23247 - DNA, 2775 bp, synthetic construct
  misc_feature 1..2775: note = Description of Artificial Sequence: Synthetic coding sequence
  source 1..2775: mol_type = other DNA
atgcccggccccagccccggcctgcggcgggccctgctgggcctgtgggcagccctggggctgggcctcttcggcttgtccgccgttagccaagagcccttttgggctgacctacagcctagggtggcatttgtggagagaggcggtagcctgtggttaaactgcagcaccaactgtcctcgccccgagaggggagggctagagactagcctgcgtcgaaatggaacacagcggggtcttcgctggctggcaagacagctggtggatataagggaacctgagacgcagcccgtttgcttcttccggtgcgcccgacgaaccctccaggcgcgtgggctgatccggacgttccaaaggcccgacagagttgagctgatgcctttaccgccgtggcagccggtcggcgagaattttacactgtcttgtcgagtgcctggcgcaggcccgagggcttcactcaccttgaccctcctgcggggggctcaggaactgatacggaggagcttcgccggcgaacccccaagggcccgcggagcagtgctgactgcgacggtcctggctcgtagagaagaccatggagctaatttctcctgcagggccgagctagacctccggcctcatggtttgggtttattcgaaaacagctccgcacccagagagctgaggactttttccttgagtcctgatgcaccgcgcctagcagcgccccgactgttggaggtcggctccgagcgtccagtgtcatgcacattggatggcctctttcccgcatcagaggccagggtgtatctggcactcggagaccagaacctgagcccagacgttactttggagggggatgccttcgtggcaacagcgacagccacagcctcggcagagcaggaaggcgcgcggcaactggtgtgtaacgtcactcttggaggggagaatcgtgagacccgggaaaatgttactatctactcatttcccgcccccctcctcaccttgtctgagccgtcggtgtccgaggggcagatggtgacagttacgtgcgccgctggcgctcaagcactcgttaccttggagggcgttccagccgcggttccgggccaacccgcacagctgcagctgaatgctaccgaaaatgacgacaggcgctcctttttctgcgacgctactctggatgtggatggggaaactctcatcaagaatcgcagcgccgagctgcgcgtactgtacgcacccagactggatgactccgattgcccacggtcctggacctggccagagggtcccgagcagactctgcgctgtgaggccaggggcaaccccgagccctcagtacactgtgcccgcagcgacgggggagccgttttggccctcggtttactggggccagtgacacgagcgctgtccgggacatacaggtgtaaagccgctaatgaccaaggcgaggctgtaaaagacgtgaccttgacagtggaatacgcccccgccctcgactcagttggatgtccagagaggatcacgtggcttgagggtacggaagcttccctgtcttgcgtagcccacggggttccccctccagacgtcatatgtgtgaggagtggagaactaggggccgtgatcgaagggctgctgcgcgttgccagggagcacgcggggacatatagatgtgaggccacgaacccgcgggggtccgccgctaagaacgtcgccgttaccgtagagtatggaccccggttcgaggaaccatcttgcccaagcaactggacatgggtggagggatccggccgactgttcagctgtgaagtcgacggcaagccccaacccagcgtgaagtgtgtgggaagtgggggtgcaaccgagggtgtgttgctgcctcttgcaccacctgaccctagccctcgcgctccacgcattccgcgcgttctggcccctggaatttacgtgtgtaacgctaccaacaggcacggcagcgtggcaaagaccgtggtggtcagtgcggaatcaccccccgaaatggacgaatccacgtgtccttcacaccagacgtggcttgagggcgccgaagcaagcgcgctggcctgcgccgcacgcggccgaccctctccaggcgtgcgttgctctcgggaggggataccctggccagaacagcagcgcgtaagtagagaggatgcagggacttaccattgtgtcgccactaacgcccacggtactgattcacggactgtgactgtaggcgttgagtacaggccggtggtcgccgagctggcggcctcgcctcccggtggcgttcgcccaggcggaaattttacgctcacctgtcgtgcagaggcatggccacctgcgcagatttcttggagggcccccccaggtgccctgaatattggcctctcgtcaaacaactcgaccctcagcgttgccggagcaatggggtcccacggaggcgaatacgagtgtgcggccactaacgcacatggccgtcatgctcggaggatcactgtccgcgtggctgggccctggctgtgggtggcggtcggcggtgcagcagggggggccgccctccttgccgccggcgctggtcttgccttctacgtccagtctacagcttgcaagaagggggagtataatgttcaggaagccgagtccagtggcgaggccgtgtgcctgaacggagccgggggaggagccggaggcgcagcaggcgcggagggaggacccgaggcggctggcggcgccgcggaatcgccagccgagggagaggtgtttgccatccagcttactagcgcatag

SEQ ID NO: 23248 - DNA, 1263 bp, synthetic construct
  misc_feature 1..1263: note = Description of Artificial Sequence: Synthetic coding sequence
  source 1..1263: mol_type = other DNA
atggagagccccagcgcccccccccaccggtggtgcatcccctggcagcgactgctactcaccgcctccctgctgacattctggaatccacccacaaccgccaagttgactatcgaaagcactccattcaatgttgcagagggtaaagaagttttgctgctggtgcacaatctgccacagcacctctttgggtactcatggtataaaggcgaaagagtggacgggaacaggcagattatcgggtacgtgatcggcactcaacaagcgaccccaggtccagcctacagcggtcgggagattatttaccccaacgcatccttactgattcagaacataatccagaataagctttcagttgaccattctgaccctgtcatcctgaacgtgttgtatggcccagacgaccctaccatttcaccaagctatacctattacaggcccggcgtcaacctaagcctatcatgccatgcagcttcaaatcccccagcccagtattcctggttgattgacgggaatatccagcaacatactcaagagctattcatttccaacattacggaaaaaaattcagggttgtacacttgccaagctaacaactcagcttcagggcactcccgaaccaccgtgaaaacaataacagtaagcgcagagcttcccaagcccagcatatcttctaacaatagcaagccagtggaggacaaagatgccgtagcatttacatgcgagcctgaggcgcagaacactacctacctctggtgggtcaacgggcaaagcctgcccgtatccccacgtctgcagctttccaatggcaaccggactctgaccctgtttaatgtcactcgaaacgacgcccgggcctatgtatgtggtatccagaatagcgtctctgccaacagaagtgacccagtaacattggatgtgctttatggtcccgacacgcccattatatctccacccgattcgagctacctgtccggcgccaatttaaacctttcctgccactccgcttccaatccttctcctcagtactcctggcggattaatggcatcccacaacagcatacacaggtcctatttattgcaaaaatcactccaaataataacggtacatacgcatgctttgtctccaatctcgcgactggtagaaataactctattgtcaaaagtattaccgtgtcagcctctggcactagccctggcttatctgccggagccacggttggaattatgattggggtcctagtaggagtagcacttatatag

SEQ ID NO: 23249 - DNA, 2109 bp, synthetic construct
  misc_feature 1..2109: note = Description of Artificial Sequence: Synthetic coding sequence
  source 1..2109: mol_type = other DNA
atggagagccccagcgcccccccccaccggtggtgcatcccctggcagcgcctgctcctgaccgcaagcctgcttacattttggaatccaccaacgaccgcgaagttaacaatcgaatccactccatttaatgtagcagaaggcaaggaagtcctgctgctggtgcataacctaccccagcacctgttcggttattcctggtataaaggagagagagttgacggcaaccgtcaaatcatcggatatgtgattggtacacagcaggctacacccggaccagcatacagcggcagggaaatcatctatccaaatgcctcgctgttaatccagaacatcatccagaatgacactggcttttatacattacacgtcatcaaatcggacctcgtgaatgaagaggctaccggacagttccgagtgtaccccgaactgcccaagccaagcatctcttctaacaattcgaaacctgtagaagataaggacgccgtcgctttcacatgcgaaccggagacccaggatgctacttacctttggtgggtgaacaaccagagtctgccagttagcccaagactgcagctgagtaacggcaaccggactcttaccctttttaatgtcaccaggaatgacaccgcgagctacaaatgcgagactcagaaccctgtgtctgctaggcggagcgatagtgtcattctaaatgtgctgtatgggcctgacgcccccaccattagccccctgaacaccagttacagaagtggggagaatttgaacctatcgtgccacgcggcaagcaacccaccggcccaatactcttggttcgtaaatggaacctttcagcagtccactcaggagttatttatcccaaacataaccgtgaataacagtgggagctatacctgccaggcacacaactctgacaccgggttaaatcgcacgactgtgactacaatcacagtgtacgctgagccacccaaacccttcattaccagtaacaattcgaaccccgtggaagacgaagatgccgtagccctgacttgcgaacctgaaattcagaacactacttacctgtggtgggttaacaaccagagtcttcctgtgtcccctcgcctgcagctgagcaacgacaatagaactctgaccctcctgtctgtcactcggaatgatgtgggcccatatgagtgcgggattcagaacaaactctctgtcgaccactccgatcccgtgatcctgaatgtcctgtacggacctgatgatcctaccattagccctagttacacatactaccgtcctggggtgaacctgtctctctcttgtcacgcagcctctaatccccctgcccaatacagctggctgatcgatggtaatatccagcaacatactcaggagctgttcataagtaacattacggagaagaattccgggctttatacatgtcaggcaaataacagtgcctcaggacatagtcgtaccacggtcaaaacaataaccgttagcgcggaacttcccaaaccctctattagctccaataatagtaaacctgtcgaggacaaagatgcagtggcattcacctgcgaacctgaggcccagaatacaacttacctctggtgggtgaatggtcagagcctcccagtgtctccgcggctccaactttccaacggcaaccgaaccctcacattgttcaacgtcacaaggaacgacgcaagagcctatgtatgtggcattcagaattccgtcagcgcaaatcggtctgatccagttactctggatgttctgtatggccccgatactcctataattagccctcccgacagcagctacctgtctggcgccaatctcaatttgagttgtcatagcgcctcaaatccgtcacctcagtactcttggagaatcaatggaatcccacagcagcatacccaggtcctgttcatcgccaaaatcacacctaacaataatggcacatacgcatgcttcgtttcaaatttggccactgggcggaacaactcaatagtgaaaagtattacggtgtccgcatccggcaccagtcctggcctgagtgcgggcgctacagttggcattatgataggggtactggttggggtggccctgatttag

SEQ ID NO: 23250 - DNA, 1035 bp, synthetic construct
  misc_feature 1..1035: note = Description of Artificial Sequence: Synthetic coding sequence
  source 1..1035: mol_type = other DNA
atgggcccccccagcgcccccccctgccggctgcacgtgccctggaaagaagtcctgctaactgccagcttgctcactttttggaaccccccaaccacagcgaagctgacaattgagtcaactcctttcaacgtggccgaaggcaaggaagtcctgttgctggcacacaacctcccccagaacaggatcggatactcctggtacaagggggagcgggtggacgggaattcactaatcgtgggatatgtgatcggaacccagcaagccactcctgggccggcctatagcggtagagagaccatctaccccaatgcctctttactgatccagaatgtgacgcagaacgacaccggattctatacgttgcaggtcattaaatctgacctggttaatgaggaagccacaggacagttccacgtgtacccagagctgcctaagccatccatctccagcaacaactcaaaccccgtcgaagataaggatgctgtggcatttacctgcgagcctgaagttcagaacacaacctatttgtggtgggttaatggacagagtttgcctgtctcccccaggctccagctctccaatgggaatatgactctaaccttgttgtctgttaagagaaatgatgctgggtcctacgagtgcgaaattcagaaccctgccagcgctaatagatccgatcccgtgacgctgaacgtgctttacggacccgacggaccaaccatttctccttccaaagcaaactacagaccgggcgaaaacctgaacctttcatgtcatgctgcaagtaacccccccgcccagtacagctggtttatcaacggtacatttcagcagagcacccaggagctctttattcccaacattacggtcaacaatagcggatcgtatatgtgccaagcccataattctgctacagggctcaacagaacgaccgtgactatgattacggtgtcaggttctgcccctgtcttgtccgcagtggcaaccgtgggaatcacgattggcgtactggcccgggtcgctctaatctag

SEQ ID NO: 23251 - DNA, 1977 bp, synthetic construct
  misc_feature 1..1977: note = Description of Artificial Sequence: Synthetic coding sequence
  source 1..1977: mol_type = other DNA
atggtgccccggctgctgctgcgggcctggccccggggccccgccgtgggcccaggcgcaccctcccgccctctgtccgccggcagtggcccaggccagtatcttcagcgcagcattgtgccaaccatgcactaccaggattctcttcctagattgccaatcccaaaactggaagatactattaggagatacttgtccgcccaaaaaccactcctgaatgatggacagttcaggaagacggagcaattctgcaaatctttcgagaacggtatcggaaaggagttgcatgagcagctggtggcgctggataaacagaataagcacacctcttacatatcaggcccctggttcgacatgtacctcagcgctagagactctgtcgtgctcaacttcaatccattcatggcgtttaatccagatcctaagagtgaatacaatgatcagctgactcgagcgaccaatatgaccgtctcagccatcaggttcctgaaaactctgcgagctggacttttagagcccgaggtgttccatctcaatcctgcgaagtcagataccattacttttaaaagactgatccgattcgtccctagctccctctcgtggtacggcgcatacctggttaacgcctaccctttggatatgtcccagtactttaggctttttaacagcaccaggttgccaaagccctctcgtgacgagttgtttactgacgataaagctagacacctcctcgttctgagaaaaggcaatttttacatctttgacgtgctcgaccaagacggcaatatcgtatctcccagtgagattcaggcccacctcaagtatatcctgtccgattccagtcctgcacccgaatttccactggcgtatctgacatccgaaaatcgcgatatctgggcagagttacggcagaagctgatgagctcaggtaatgaggagtcactgcggaaagtggattccgcagttttttgcttgtgtctggatgacttcccaataaaagatcttgtgcacctgtcgcataacatgttacacggggatggcacaaatcgctggttcgataaaagcttcaaccttatcatagcaaaagacggttctactgctgtccactttgaacatagctggggcgatggggtggcggtgttacgtttcttcaacgaagtgttcaaggactcaacccaaacccccgccgtcacgccccagagtcaacctgcaaccaccgattccacagttaccgtgcagaagctgaattttgaactgacggatgctctaaaaaccgggatcacagctgccaaggaaaaatttgatgctacgatgaagacactaacgatcgactgcgtacagttccagcggggcggaaaagaatttctaaagaaacaaaagttgtcaccggacgccgtggcccagctggcgttccagatggcatttcttcggcaatatggacagactgttgcaacctatgaatcctgtagtactgccgccttcaaacacgggagaactgagacaataaggccagcatccgtgtatacgaaacgatgctcggaggcatttgttcgggaaccaagtcggcatagtgccggtgaattgcagcagatgatggtggaatgctcaaaatatcatggccagctcacgaaagaggccgcgatggggcaaggttttgacagacacctgtttgctctgcgacacttggcggccgccaaaggcatcatacttccggaactgtatcttgaccctgcatacggacagatcaaccacaacgtattgtctacctccactctgtcctcgccagctgttaacttgggcggcttcgctccagtggtgtctgacggattcggcgttggctacgccgttcacgacaattggatcggatgtaacgtcagttcttaccctggaagaaatgcgagagagttccttcaatgcgtcgagaaggccttggaggacatgttcgacgccctggaaggcaaatccattaagtcatag

SEQ ID NO: 23252 - DNA, 1077 bp, synthetic construct
  misc_feature 1..1077: note = Description of Artificial Sequence: Synthetic coding sequence
  source 1..1077: mol_type = other DNA
atgcgggccacccccctggccgcccccgccggcagcctgagccggaagaaacgcttggaactggatgataacctggatactgagcgtcctgtgcagaagcgtgcccggtcagggcctcagcctagattacccccatgccttttgcccctctccccccctactgcacccgaccgcgccacagcagtcgccaccgcctcccgtttgggaccttacgtcctattggagccagaagagggcggtagggcatatcaagccctgcactgtccaactgggacagaatacacctgtaaagtgtaccccgtgcaggaagccctggctgtgttggagccgtacgctcgcctgccccctcataagcatgtcgccaggccaacagaggtcctagctgggacccagcttttgtacgctttttttacacggacccacggagacatgcacagcctcgttcgcagtcgtcacagaatacccgagcccgaggcagctgtgcttttccggcagatggctacagctctcgctcactgccaccagcacggcttagtcttgcgagacttgaaactgtgcagatttgtcttcgcggacagagagagaaaaaagctggtcttagaaaacttggaagactcctgtgtgctgactgggccggacgatagcttatgggataaacatgcgtgtcctgcctacgtgggtccggaaatcctgtccagcagagcctcctacagcgggaaagcagcagatgtctggtctctgggcgtcgctctctttacaatgttggccggccattatccatttcaggactcggagcctgtgctgctttttggaaagatcagacgaggagcttatgccctgccagcaggactttccgctcccgcgcgatgcctagttagatgtctgctgcgaagggagccagctgagaggttgacagcgacgggaatcctgctgcatccttggttgcggcaggaccccatgccactggctcccacccggagtcacttgtgggaggccgcacaagtagtcccagatggcctgggcctcgatgaggcccgcgaagaagagggggacagggaagtggtgctttatggatag

SEQ ID NO: 23253 - DNA, 1176 bp, synthetic construct
  misc_feature 1..1176: note = Description of Artificial Sequence: Synthetic coding sequence
  source 1..1176: mol_type = other DNA
atgagcggccccgtgcccagccgggcccgggtgtacaccgacgtgaacactcaccgacctcgggagtactgggattatgagtcccacgtggtcgagtggggcaaccaggatgattatcagctcgtgcgcaagttaggtcgtggaaaatactcggaagtgtttgaggctatcaatatcactaacaacgagaaggtagttgtcaagatcctcaagccggtgaagaagaagaaaatcaaacgggaaataaaaatcttagaaaatctaagaggcgggcctaatatcatcaccttggcagacattgttaaggatcccgtgtctcgaactcctgcactggtgttcgagcacgtgaacaataccgattttaaacagttgtatcagaccctgacggattatgatatcagattttatatgtacgagatcctaaaggcattggattattgtcatagtatgggcattatgcacagggatgtaaaaccccacaacgtgatgatcgaccatgagcacagaaaactgagactaatagattgggggctggccgaattttaccaccccggacaagaatacaacgtgagggtggcctctcggtacttcaaggggcctgagcttctagttgactatcaaatgtatgactatagtttggacatgtggtcgctgggctgcatgctggcttctatgatattccggaaagagcctttttttcacgggcatgacaattacgatcaactggtgcggattgccaaggtgctggggacagaggatttgtacgactacatagataaatacaatatcgaactcgacccacgattcaatgacatcttaggcaggcactcccgcaagcgatgggagcgcttcgtccattccgaaaaccaacatttagtctccccggaggccctcgattttctggataagctcctgcgctacgatcatcagtccagactgacagcccgtgaggcaatggaacacccctacttctatactgtggtgaaagaccaggctcgcatggggagctcttccatgccaggcgggtccacacctgtgtcaagtgctaatatgatgtctgggatttcatcagtgcctacaccctccccattaggcccactggccggtagccccgtgatcgccgctgcaaatccattgggtatgcctgttccagccgcggccggagcccagcagtag

SEQ ID NO: 23254 - DNA, 1194 bp, synthetic construct
  misc_feature 1..1194: note = Description of Artificial Sequence: Synthetic coding sequence
  source 1..1194: mol_type = other DNA
atgagcggccccgtgcccagccgggcccgggtgtacaccgacgtgaacacacatcggcctcgtgagtattgggactacgaatcccacgtagtggagtggggcaaccaggacgattaccaattggtgaggaaactcggcagaggcaagtactctgaagtgttcgaggcgatcaacattaccaataacgagaaggtcgtggtgaagatccttaaacccgtgaagaaaaagaagatcaaaagggagatcaagattttagagaaccttcgaggagggcctaacatcatcacactggcagatatcgtcaaagaccctgtcagtaggactccagccctcgtctttgagcacgttaacaatacagatttcaagcagctttatcagaccctgacggactatgacatccgcttttacatgtatgaaattctgaaggctctcgattactgccactccatgggaatcatgcatcgagacgtgaagccccacaatgtgatgatcgaccatgagcaccggaagttgaggctgattgattggggactggcggagttctatcaccctggtcaggagtacaatgttagagtggctagccggtatttcaagggccccgagctattagtggactaccagatgtacgactacagcctcgatatgtggagtttaggctgcatgctcgcatctatgattttccgaaaggagcccttctttcacggccacgataactacgaccaacttgtaagaatcgcgaaggtgttgggaaccgaggacctttacgactacatagataaatataatatcgaactcgaccctcgattcaatgacatccttgggcgtcattcgcgcaaacgctgggagcgcttcgtccactcagagaaccaacacctcgtgtccccagaggcactcgactttctggataagctgctccggtacgaccatcagagcagattaactgctcgggaggctatggagcatccctatttctacactgtcgtcaaggaccaggcccgaatgggttcgtccagtatgcctggtggttccactcccgtgagtagcgctaatatgatgtccggaatctcctcagttcctactccttctcctttggggcctcttgcgggcagtcccgtgatcgctgcagcaaatccgttgggatgcctctttcagcttcccctgcggagtgccgtgacagccctgtcagtcagctag

SEQ ID NO: 23255 - DNA, 768 bp, synthetic construct
  misc_feature 1..768: note = Description of Artificial Sequence: Synthetic coding sequence
  source 1..768: mol_type = other DNA
atgtacgagatcctgaaggccctggactactgccacagcatgggcattatgcacagagatgtcaagcctcacaacgttatgattgaccacgagcacagaaaattgcgactcatcgattggggcctggccgaattctatcatcccggccaggagtataacgtccgcgtggcaagccggtactttaagggccccgagctgctagtggactaccagatgtacgactactccctcgacatgtggagcttgggctgcatgctggctagtatgatctttagaaaggagccttttttccacggtcacgacaattatgaccagctagtgagaatcgcaaaagtactggggacagaagatttgtatgattatattgataaatacaatatcgaattagatccaagatttaatgacatcctgggccgccatagtaggaaaagatgggagcgcttcgtgcactctgagaatcagcatctcgtgagccctgaagccctcgacttcctggacaagctgctgcgctatgatcaccagtcaaggttaactgcacgcgaagccatggagcacccctacttttatacggtggttaaagaccaggctcgaatgggcagttcttcaatgccgggcggaagtactcctgtgagcagcgcaaacatgatgtctggtatcagtagcgtacccacccccagcccactagggccattagccggttctcctgtcatcgctgccgctaaccccttgggcatgcctgtgccagcagctgcaggcgctcagcagtag

SEQ ID NO: 23256 - DNA, 1158 bp, synthetic construct
  misc_feature 1..1158: note = Description of Artificial Sequence: Synthetic coding sequence
  source 1..1158: mol_type = other DNA
atgagcggccccgtgcccagccgggcccgggtgtacaccgacgtgaacacacacagacctcgggaatactgggactacgaaagccatgtcgtggagtggggcaatcaggacgactaccagctcgtgagaaaactggggagagggaaatattctgaagtgtttgaggcgataaatatcaccaataacgaaaaggtggtggtgaagatactcaaaccagtgaaaaaaaagaaaattaaacgggagattaagattttggagaacctgcgcggcggacccaatatcattaccttagccgacatcgtgaaagaccctgtgagccgtacacccgccctcgtcttcgagcacgtgaataacaccgacttcaaacagctgtatcagactctcacagactacgacatcaggttctacatgtacgaaattctgaaggccttagactactgccactccatggggatcatgcatcgcgatgttaagccccacaatgtgatgatcgatcacgagcataggaaactgcgcctgattgattggggattggcggagttctaccatccagggcaggagtataacgttagagtagcctcacgctattttaagggtcctgaactgctggtagactaccagatgtacgactacagcctggacatgtggagcttaggctgcatgctcgcctctatgatctttagaaaagagcccttctttcatggccatgataactacgaccagctagtcaggattgctaaggttcttggtacagaagatctgtacgactatatagacaagtacaacattgaattggaccctaggtttaatgatatactgggacgtcactcaagaaaacgatgggaacggttcgtgcacagcgaaaaccaacacctggtttcccctgaggctctcgatttcctggataaattacttcgatacgaccatcagagtaggcttaccgcccgggaggcaatggaacacccctatttctacaccgttgtcaaggaccaagcccgaatggggagctcttctatgcccggggggagcacccccgttagttcagccaacatgatgtccgaaatgaagttctgtagggtggcccaagccgggcttgaactgttatcttctacagtgtatcccccatggccgccaaaggtgctgcgactcgaagcatag

SEQ ID NO: 23257 - DNA, 1053 bp, synthetic construct
  misc_feature 1..1053: note = Description of Artificial Sequence: Synthetic coding sequence
  source 1..1053: mol_type = other DNA
atgcccggccccgccgccggcagccgggcccgggtgtacgccgaggtgaactctctgcgctctcgcgaatactgggactacgaggcccacgtacctagttggggcaaccaggacgattaccagctggttaggaaactgggcagaggaaaatactctgaggtgttcgaggctatcaacattactaataacgaacgggtggtagtgaaaatcttgaagcctgtgaagaaaaagaagattaagagagaagtgaaaattcttgaaaacctacggggcggcacgaatataataaagctgattgatacggtaaaagaccctgtgtccaaaacaccggctctagttttcgaatatatcaataacaccgatttcaaacagctctaccagatactgacagattttgatataaggttctacatgtatgagttacttaaagcgctagattactgccattccaaggggatcatgcaccgggacgtcaaaccccataacgttatgatcgatcatcagcagaagaaactaaggctcatagactgggggctggcggagttctaccacccggctcaggagtataacgtgagggtggcttctcgctattttaaggggcctgagcttctcgtcgattaccaaatgtatgattattccctagatatgtggtccttggggtgcatgctagcctcgatgatctttcgccgggaacctttctttcatgggcaagacaactatgatcagctggttcggatagcaaaagtgctggggaccgaagagttatatgggtatctcaaaaagtaccatatcgatttggatccccatttcaacgacatattaggtcaacattcccgaaagaggtgggaaaacttcatccattcagaaaataggcatctcgtcagccctgaagcactcgatctgctggataaattgctcaggtacgatcatcaacagcgacttacggcaaaggaggccatggaacatccttacttttatcctgtggtcaaggagcagagccagccctgcgccgacaacgctgttctgtcttctggattaaccgcagcccgctag

SEQ ID NO: 23258 - DNA, 600 bp, synthetic construct
  misc_feature 1..600: note = Description of Artificial Sequence: Synthetic coding sequence
  source 1..600: mol_type = other DNA
atggaggcccgggacaagcaggtgctgcggagcctgcggctggagctgggggcagaagtcctggtcgaaggactggttcttcagtatttgtaccaggaagggatcttgacagagaatcacatccaagagattaatgctcagacaactggcctcagaaaaacaatgcttctgctcgatattctgccatcacgaggtcctaaagcatttgacacgtttctggacagcctccaggagttcccctgggtccgggagaaactgaaaaaagcccgagaggaggctatgaccgacctaccggctggcgatagactgaccggcatcccttcccacattctcaattcttctccttctgaccggcagataaatcagctggcccaaagactggggcctgagtgggaacccatggttctctcgcttggcctctcacagacagatatttacaggtgcaaggcaaaccacccgcataatgtacagtctcaggtggtggaggcgtttattaggtggcgccagaggttcgggaagcaggccacttttcagagtctgcataatgggctccgcgcggttgaggtggatccatccctgctcctgcacatgttggaatag

SEQ ID NO: 23259 - DNA, 366 bp, synthetic construct
  misc_feature 1..366: note = Description of Artificial Sequence: Synthetic coding sequence
  source 1..366: mol_type = other DNA
atggaggcccgggacaagcaggtgctgcggagcctgcggctggagctaggcgctgaggtcctggtggagggcctggtgctgcagtacctatatcaggagggtattctgacggaaaaccatatacaggaaattaacgcccagactaccggcttacggaaaactatgctcttgctcgatatcctgccttccaggggcccaaaggccttcgacacatttcttgactcgctacaggagtttccttgggtccgcgagaagctcaagaaagcccgagaggaggcgatgaccgacttacccgccgagatgagaaaactgcggccaaaagatagcgtaacctgcctggccagccaattgacatggcgattttag

SEQ ID NO: 23260 - DNA, 600 bp, synthetic construct
  misc_feature 1..600: note = Description of Artificial Sequence: Synthetic coding sequence
  source 1..600: mol_type = other DNA
atggaggcccgggacaagcaggtgctgcggagcctgcggctggagctgggcgctgaggtacttgttgagggtctagtccttcagtacctgtatcaggagggtatccttaccgaaaaccacatccaagagatcaacgcccagacaaccgggttgcgaaagacaatgcttctcctcgatatcttaccctctcggggccctaaggccttcgatacgttcttagattccctgcaggaatttccttgggttagagagaaactgaagaaagctcgggaagaagccatgactgatttaccagctggggatcggctcaccggtatacccagtcatatcctaaactcgagtccctccgacagacagatcaatcagctggctcagcgtttaggccctgaatgggagccaatggtgctgtctttgggactgtcccagacagatatttaccgctgtaaggcaaaccatccccataacgttcaatcccaggtggtggaagcctttataaggtggcggcaacgctttgggaaacaagccacattccagagtttacacaatgggctccgcgcagtagaagtcgatccctcattactcttacacatgctggagtag

SEQ ID NO: 23261 - DNA, 312 bp, synthetic construct
  misc_feature 1..312: note = Description of Artificial Sequence: Synthetic coding sequence
  source 1..312: mol_type = other DNA
atggaggcccgggacaagcaggtgctgcggagcctgcggctggagctcggagccgaggttctggtcgaggggttggtacttcagtatctgtaccaggagggcatccttaccgagaatcatatccaggaaataaacgcccagacaaccggtctccggaagacgatgttgttgctggacatcctcccttcaaggggcccgaaggctttcgatactttcttagattccctgcaagagttcccttgggtacgtgagaagcttaagaaagccagggaggaggctatgactgacctcccagctggttgctggccgtag

SEQ ID NO: 23262 - DNA, 1443 bp, synthetic construct
  misc_feature 1..1443: note = Description of Artificial Sequence: Synthetic coding sequence
  source 1..1443: mol_type = other DNA
atgagcgccgaggtgatccaccaggtggaggaggccctggacaccgacgagaaagagatgctgctgtttctctgtagggatgtggccatcgacgtggtgccgcccaacgtgcgggacctcctagatatccttagggagcggggcaaactcagcgtgggtgacctcgccgagttgttataccgcgtaagacgttttgatctgttaaaacgtatcctgaaaatggatagaaaggccgtcgaaactcatctcctgcgtaacccccatttagtgtcagactacagagtcctgatggcagaaatcggggaggatttagacaaaagcgatgtgagcagcctcattttcttaatgaaggactatatggggcgcggcaagatcagtaaagagaagagcttcttagacctcgtggtggagctggagaagctcaatttggtggcccccgaccagcttgatctgttggagaagtgtctcaaaaatattcatcgtattgacctgaagacaaagatccagaaatacaaacagagtgtccaaggtgccggcacttcctacaggaacgtgctgcaggctgctatacagaaatctttaaaggacccaagtaataattttaggctgcacaatggacgctccaaggaacagaggctcaaggagcaattgggagcacaacaggaaccagtgaagaagtcaattcaggagagcgaagcctttctcccacaaagtattccagaggagcgctataagatgaaaagtaagccgttaggcatctgcctcatcattgactgcatcggtaacgagactgagttgttgagggatacatttacgagcctcggctacgaggtgcagaaattccttcatttatcaatgcatgggatcagtcaaattcttggacaatttgcatgtatgccggaacaccgggattacgactcctttgtgtgcgtgctggtgtcaaggggtggcagccaaagcgtgtacggggtggatcagacacacagcggtttacctctccatcacattaggcggatgtttatgggagacagttgcccatacctggccggaaagcctaagatgttcttcatacagaattatgtagtttctgagggtcagctagaagatagtagtttactcgaggtagatggcccagctatgaaaaacgtagagttcaaagcgcagaagcggggcctgtgtaccgtacaccgagaagccgactttttttggtctttatgcaccgccgacatgtccctgctggaacagtcccacagtagccccagcctctacctgcagtgtctgtctcagaagctacgtcaagagcggaagcgtcctcttcttgatctgcatatcgagcttaacggctatatgtatgactggaattctcgggtgagcgccaaagagaaatattacgtgtggctccagcatactctgaggaagaagctgattcttagctacacgtag

SEQ ID NO: 23263 - DNA, 1389 bp, synthetic construct
  misc_feature 1..1389: note = Description of Artificial Sequence: Synthetic coding sequence
  source 1..1389: mol_type = other DNA
atgagcgccgaggtgatccaccaggtggaggaggccctggacaccgatgaaaaggagatgctgctgttcttgtgcagggatgttgccatagatgtcgtacctcctaatgtgcgcgatctactcgacattttgagagagcgcggcaagttgagcgtgggagacctggccgagctactgtacagagtgaggcgcttcgacctgctgaaacgcatcttgaagatggataggaaagccgtggagacacatctgctccgcaatccccaccttgtgtccgattatcgagtgctgatggccgagatcggcgaagacctggataaatccgacgtgtcgtcactcattttcttgatgaaagactacatgggccgggggaagatctcaaaagagaagagttttctggacctggtggtggaactcgagaagctgaatttggtagctcctgatcaactggatctccttgaaaaatgtctgaaaaatatccatcggatagatctgaaaactaagattcagaagtacaaacaatctgtacaaggagcaggcactagttatcgcaatgtgttgcaggccgcaattcagaagtctctgaaagacccttctaataactttcgccttcacaacggcaggagcaaagagcagcggctgaaagagcaacttggagctcagcaggagcccgtaaagaagtcaattcaggaaagtgaagcctttctgccacagagcatcccggaggagaggtacaaaatgaagagtaaaccactaggtatttgcctcatcattgattgtatcggaaacgagactgagcttctaagagacactttcacctcactgggatatgaagtccagaagtttctccacctttccatgcacggtatctctcagattctcggtcaattcgcctgcatgccagagcacagagactatgactccttcgtttgcgtgctcgttagtcggggcggcagtcaaagcgtgtatggagtcgatcagacacatagtgggcttcctctgcaccacatccggcggatgttcatgggggacagctgtccttatctggccggcaaacccaaaatgttttttattcaaaactatgtggtctccgaaggacagctggaggatagcagcctgctggaagtggacggacctgcgatgaagaacgttgagtttaaggcacagaagcgaggactgtgcaccgtccatcgagaagcagactttttctggtctctttgcacagcagacatgagcctccttgagcagtcacactcttcgccctcactctacctgcaatgcctctcccagaagctgcgacaggaacggggtaccatcccaggctcagggattactgaatcgaaggacatgcactttagctcactgggctgcatcctcttagacgtgctttag

SEQ ID NO: 23264 - DNA, 1047 bp, synthetic construct
  misc_feature 1..1047: note = Description of Artificial Sequence: Synthetic coding sequence
  source 1..1047: mol_type = other DNA
atggccgagatcggcgaggacctggacaagagcgacgtgagcagcttgatcttcctcatgaaggattacatgggtaggggtaagatctctaaggaaaagagtttcttggacctggtggtggagctggaaaagctcaaccttgtggccccagatcagcttgatttgttggaaaaatgtctcaaaaatatacaccgaatcgatttgaagacaaaaattcaaaagtacaaacaaagcgtgcaaggggcaggcacttcttaccggaacgtgctccaggcagctatccagaaatccctgaaggacccttccaacaattttcgagaggaaccggttaagaaatcaatccaggaaagtgaggccttcctgccccaatcaataccagaggaaaggtataagatgaagtctaagccgttaggcatttgtctgatcatcgactgcatcggcaacgagacagagcttctcagagacacttttaccagcctagggtacgaggtgcagaagtttctgcatctgtcgatgcacggcattagccagattctgggccaatttgcatgcatgccagagcatcgggactacgatagttttgtatgtgtgctcgtgagccgagggggcagccagtcagtttacggggtggaccagacacacagtggccttccactgcaccacataaggcgaatgtttatgggagatagctgtccatacctggcaggaaaaccaaaaatgttttttattcagaactacgtggtgagcgaaggccaacttgaagatagcagtctactggaggtcgatggtcccgccatgaagaatgtcgaatttaaagcccagaagcggggtctgtgcaccgtgcacagagaagccgactttttctggtctctgtgtacagccgacatgtccctgcttgaacagtcccacagctcaccctctctgtatctccaatgcttgtcccagaagctccgacaagagcgtgggacaattcctggctctggtataactgaaagcaaagatatgcacttcagctcactgggctgcatcctcttagacgtcctttag

SEQ ID NO: 23265 - DNA, 903 bp, synthetic construct
  misc_feature 1..903: note = Description of Artificial Sequence: Synthetic coding sequence
  source 1..903: mol_type = other DNA
atgagcgccgaggtgatccaccaggtggaggaggccctggacaccgacgaaaaggaaatgttactcttcctgtgcagagacgtcgctatcgacgtagtaccacccaatgtccgggacttgctggacatcctgagagaaaggggtaaactgtctgtgggagatttggccgaacttctatacagggtgagacgtttcgacttgctcaaacggatactcaagatggacaggaaagccgttgaaacgcacttgcttagaaacccccacctcgtgagcgactatagagtgctgatggccgagattggggaagatctggacaaatccgacgtcagttccctgatttttctgatgaaggattatatgggtaggggaaagataagcaaggagaaatcctttctagatttggtggtagagctcgaaaaactgaatctcgtggcacccgaccagctggaccttcttgagaagtgtctgaagaacatccaccggatcgacctgaagacgaagattcaaaaatacaaacagagcgtgcagggggccggcacgagctaccggaacgtacttcaggccgccatccagaagagtcttaaagatccttcaaacaatttccgccttcataatggccggtccaaagagcagcggctcaaggagcagcttggtgcacagcaggaacccgtcaaaaaatccatccaagagagtgaagctttcctgccacaaagcatccccgaagagcggtataaaatgaagagcaagcccctggggatctgcctaatcattgactgtatcggtaacgagacagagaatgcacactcctggattttcaccctgaactctatggcaacatgcatgattggtacggccgagttcctgccgaggcggaatatcatgtccggctgctcgacattatag

SEQ ID NO: 23266 - DNA, 753 bp, synthetic construct
  misc_feature 1..753: note = Description of Artificial Sequence: Synthetic coding sequence
  source 1..753: mol_type = other DNA
atgagcgccgaggtgatccaccaggtggaggaggccctggacaccgacgagaaggaaatgctgctgttcttgtgccgcgacgtcgccattgacgtggtcccccctaacgttcgtgatctgcttgacatcttacgcgagaggggcaagctgtcggttggcgacctggccgaacttttatacagggtccggaggttcgacctcctgaaaagaattctgaagatggatcgcaaagccgtcgaaactcatctgctccgcaatccccaccttgtgtccgactacagggtgctcatggcagagattggggaggacctggataagtcggacgtcagctccttaatatttcttatgaaggattacatgggcagaggaaaaattagcaaggagaaatcattcctggacctggtggtcgagttagagaagctgaacctagtggcaccagaccagctggacttgcttgagaaatgtctgaaaaacattcatcgcattgatcttaaaaccaaaatccaaaagtataaacagtccgggggatggaatggcacatggatgacaaaggcctccttttcactctggctagaaatcgcttctttgtacatactccacatcccagatctgcccacacctctgccctgcatttttatgatttctgcgaaatgctgtcaggctgtgcttaatatatctgttttcaagaaggagagcggtatttgtaccggctggcaatcctacggacacagcggcgtgttgcacgtatgttag

SEQ ID NO: 23267 - DNA, 357 bp, synthetic construct
  misc_feature 1..357: note = Description of Artificial Sequence: Synthetic coding sequence
  source 1..357: mol_type = other DNA
atgagcgccgaggtgatccaccaggtggaggaggccctggacaccgacgaaaaagagatgcttctgttcctgtgtagagatgtggcaatcgacgtagtccctcccaatgttcgagatttgctggacattctgcgggaaaggggcaagctgtctgtgggcgacctggctgagcttttatacagagtgagacgattcgacctactgaaaaggattcttaagatggaccggaaagccgtcgagacacacttgctgcgaaatcctcatttagtatctgattaccgggtgttgatggcggagataggagaggatctcgacaagagtgacgtgtcgagcttaatatttctcatgaaggattag

SEQ ID NO: 23268 - DNA, 1443 bp, synthetic construct
  misc_feature 1..1443: note = Description of Artificial Sequence: Synthetic coding sequence
  source 1..1443: mol_type = other DNA
atgagcgccgaggtgatccaccaggtggaggaggccctggacaccgatgaaaaagagatgctcttgtttctttgccgagatgtggccatcgatgtggtcccaccaaacgtgcgcgacctgctcgacatccttcgggagcgaggtaagttgagcgtgggcgaccttgcggagcttctgtatcgagtacggcggtttgacctcctgaagagaatccttaagatggacagaaaggcagtggaaacccatttgctgaggaatccgcacctcgtctccgattacagggtgctgatggccgagattggtgaggatctggataaatcagacgtgtcctcattgatctttctaatgaaggactacatggggagaggtaaaattagtaaggagaagtcctttctggacctggtggtggaactggaaaagttaaacttggtcgcacccgatcaattagacctgctggaaaagtgccttaagaatattcacagaatcgacctgaaaactaaaatccagaaatataaacagtcagttcagggcgctgggacttcttatcgaaacgttcttcaggccgccatccagaagtcactcaaagaccccagcaataacttccgactgcacaacggccgatctaaagaacagcgattgaaagaacagctgggggcacagcaagaacctgtcaagaaaagtatccaagagtccgaggcatttctcccgcagtccatccctgaggagcgctataaaatgaaaagcaagccactcgggatttgtttaatcatcgactgtataggcaacgagacagagctcttgagagataccttcactagcctgggatatgaggtgcagaagttcctacacctgagcatgcacggtatctcccagatacttggccagtttgcatgcatgccagagcaccgtgattatgactcgtttgtgtgtgtactagtttcccgagggggctcccagtctgtctacggtgtcgatcagacacatagcggcctgccactgcaccatattcgtcgcatgtttatgggagacagctgtccttatttagcgggaaagccaaagatgttctttattcaaaactatgtggttagcgagggacaattggaagatagctctttactcgaggtggacgggcccgccatgaagaacgtggagttcaaggcacagaaacgtggcctttgtaccgtccaccgcgaagccgactttttttggtccctgtgtaccgctgatatgagcctactggagcaatcacactcaagtccttctctgtacctgcagtgcttgtcgcaaaagctcagacaggagaggaaaaggccgcttttggatctgcacattgagcttaatggctatatgtacgactggaacagtagagtgagcgccaaggaaaagtactacgtgtggttacaacataccctccgcaagaagcttattctcagctatacatag

SEQ ID NO: 23269 - DNA, 189 bp, synthetic construct
  misc_feature 1..189: note = Description of Artificial Sequence: Synthetic coding sequence
  source 1..189: mol_type = other DNA
atgagcgccgaggtgatccaccaggtggaggaggccctggacaccgatgaaaaagaaatgctgcttttcctctgtagagacgtcgcaattgacgtggtccccccaaacgtccgagacctgttggatatcctacgggagagaggaaagcttagcgtcggcgacctggctgagctgttgtatcgcgtctag

SEQ ID NO: 23270 - DNA, 195 bp, synthetic construct
  misc_feature 1..195: note = Description of Artificial Sequence: Synthetic coding sequence
  source 1..195: mol_type = other DNA
atgagcgccgaggtgatccaccaggtggaggaggccctggacaccgatgagaaagaaatgctcctgtttctgtgtcgcgacgttgcgattgacgtggtgccacctaacgtgcgcgatcttcttgatattctgagggaacgtggtaagctgtccgtaggggacttggcagagcttctttatcgcgttagaaggtag

SEQ ID NO: 23271 - DNA, 390 bp, synthetic construct
  misc_feature 1..390: note = Description of Artificial Sequence: Synthetic coding sequence
  source 1..390: mol_type = other DNA
atgagcgccgaggtgatccaccaggtggaggaggccctggacaccgacgagaaggagatgctgctcttcctgtgcagggacgtcgcaattgacgtggtgcctccaaatgtccgggacctccttgacattcttagggagaggggcaagttgagtgttggcgaccttgcagagctcctttaccgcgtcagaaggtttgacctgctcaaacgtatactcaagatggatcgcaaggctgtggagactcacctgctgcgcaacccccatttggtatctgactatagggtgttaatggcagagatcggtgaagatctagacaaatctgatgtgtctagcctgattttccttatgaaagattatatgggcaggggaaaaatctcaaaagaaaagtag

SEQ ID NO: 23272 - DNA, 1155 bp, synthetic construct
  misc_feature 1..1155: note = Description of Artificial Sequence: Synthetic coding sequence
  source 1..1155: mol_type = other DNA
atggccgagatcggcgaggacctggacaagagcgacgtgagcagcctgatttttctcatgaaagattatatgggccgggggaagatttctaaggaaaaaagtttcctagaccttgttgtggaattagagaagctcaatttagtggcccccgaccagctagacctcctggaaaagtgtctgaaaaatattcatcgcatagatctgaaaaccaagatccagaaatacaagcaatccgtgcaaggagcggggacctcctataggaacgtactgcaagcagcgatccaaaagagcctgaaagatcctagcaataacttccggcttcacaacggcaggtccaaagagcagaggcttaaagaacagctgggagcccagcaggagcctgtaaaaaagagcattcaggaaagcgaggcctttctaccccagtctattcctgaggagcgctacaagatgaaatctaagccgctcgggatctgtctaatcatcgactgcataggtaatgagacagaattgctgcgcgacaccttcacttccctgggctacgaagtacaaaagttcctgcatctttcgatgcacgggatctcgcagattctggggcaatttgcttgcatgccagagcacagagactacgacagttttgtgtgcgttcttgtgagcagaggaggcagtcagtctgtgtacggcgtggaccagacccatagcggcctacctctccaccacattcgccgcatgtttatgggcgactcttgcccatacttggccggcaaaccgaagatgtttttcattcaaaattacgttgtaagtgaagggcaactggaggacagcagcctgttagaggttgatggaccagcgatgaagaacgtggagttcaaagcacagaagagaggcctttgtacagtgcatcgtgaggccgacttcttttggagcttgtgcacagctgacatgtccctcctggagcagtctcactcttcgccgtccctgtacttgcagtgtctgagtcaaaaacttcggcaagagcgtaagcgcccattgctggatctgcacattgaactgaacggctacatgtatgattggaattcacgagtgtcagccaaggagaagtactacgtgtggctgcagcatacactcaggaaaaaactaatcctttcttacacgtag

SEQ ID NO: 23273 - DNA, 666 bp, synthetic construct
  misc_feature 1..666: note = Description of Artificial Sequence: Synthetic coding sequence
  source 1..666: mol_type = other DNA
atgagcgccgaggtgatccaccaggtggaggaggccctggacaccgacgagaaggaaatgctcctctttctgtgtcgcgatgtagcaattgatgtggtacctccaaatgtgcgggacctcctcgacatactgcgcgaacgcggcaagctgtcagtgggggatctggctgagctcctttacagagtccggaggtttgatctcctcaaacggattttgaagatggatcgcaaagcagtggagacccacttgcttcggaacccccatctcgtgtcagactaccgtgtgctgatggcagaaattggagaggatcttgataagtctgatgtgtcctctctgatcttcctgatgaaagattacatgggccgcggcaagatatctaaagagaagtctttcctcgacctggtggtggaactggagaagcttaacctggttgcacctgatcagctggacctcctggagaagtgcctgaagaatatccaccgcatcgatttaaagacaaaaatacagaagtataagcagagtgtccagggtgccggaacgtcttatagaaacgtgttacaggctgcaattcagaagagtctgaaggatccatccaataattttcgcatgattacgccatacgcacactgtccggacctcaaaatactggggaactgttcaatgtag

SEQ ID NO: 23274 - DNA, 1338 bp, synthetic construct
  misc_feature 1..1338: note = Description of Artificial Sequence: Synthetic coding sequence
  source 1..1338: mol_type = other DNA
atgagcgccgaggtgatccaccaggtggaggaggccctggacaccgatgagaaagaaatgctactctttctgtgccgagatgtggcaatcgacgtcgtcccacccaacgtgagggatctccttgatatactccgcgaacgagggaaattgtccgtaggcgatctcgccgaactgctttatagagtgcgcaggtttgatttgttaaagcgcatcctgaaaatggaccgaaaggcagtcgaaacacaccttttgagaaacccccacctggtttctgattatagagttctgatggcggagattggagaggacttggacaagagcgacgtgtcgtcgctaattttcctgatgaaagattacatgggccgaggcaagatctccaaagaaaaaagtttcctagaccttgtggtggagcttgaaaaattgaacctggtggcccccgatcagttggacctgttggagaaatgcctaaaaaatatacatcgcattgatttaaaaactaagattcaaaagtataaacagagtgtgcaaggcgcaggaacctcctacagaaacgtattgcaggccgcgatacagaagtcacttaaggatccttccaataattttagatcaataccggaagaacgatacaagatgaagtctaaacccctcggtatctgcctaatcattgactgtatcggaaacgagaccgaactactgcgtgatacctttacatccctcggctatgaagtgcagaagtttctacaccttagtatgcatggaatctctcagattctcgggcagtttgcttgcatgcccgagcatcgcgactacgattcattcgtgtgcgtactggtgtcccgcggaggttctcagtccgtgtacggggtcgatcagacacattcaggcctcccactccatcatatcagaagaatgtttatgggagatagttgtccttacctggctggaaaacccaagatgtttttcattcagaattatgtcgtttccgaagggcaattagaagactcaagccttcttgaggtggacggtcccgccatgaaaaatgttgagttcaaggcgcagaaacgggggctatgcaccgtacaccgcgaggccgactttttctggagtttgtgcacggccgacatgagcttactagagcagtcacatagttctccgagcctttaccttcagtgcctgtcccaaaagttgcgccaggagagaaaacgcccgctcctagatttgcacattgaactcaatggatacatgtacgactggaattcaagagtgagcgccaaagagaagtactatgtgtggctgcagcacaccctccggaaaaaactcatcctgtcttatacttag

SEQ ID NO: 23275 - DNA, 1152 bp, synthetic construct
  misc_feature 1..1152: note = Description of Artificial Sequence: Synthetic coding sequence
  source 1..1152: mol_type = other DNA
atggccgacaaggtgctgaaggagaagcggaagctgttcatccggagtatgggcgaggggacaataaatggccttctggatgagttgcttcagacaagagtgttgaacaaagaggagatggagaaagtaaagcgcgaaaatgccactgtcatggataagactcgtgccctcatcgactccgttattcctaaaggtgcgcaagcctgtcagatatgcattacctatatctgcgaggaggactcttatcttgctggaaccctgggcctttcagctgctccacaggcagtacaagataaccccgccatgcccaccagcagtggctctgaggggaacgtgaaactgtgtagtcttgaagaggctcagcgcatctggaagcagaagtcagccgaaatatatcctatcatggacaagtcctcaagaacgaggctagccctcatcatttgcaatgaggagttcgactcaatccccaggcgcaccggcgccgaagtggacatcacaggcatgactatgctgctgcaaaacctaggctatagcgtggacgtgaaaaagaatctcacggcgtccgacatgacaacagagttggaggcctttgctcaccgccctgagcacaagacaagtgatagtacattccttgtctttatgtcccatgggatcagagagggcatctgtgggaaaaagcacagtgagcaggtaccagacattctgcagctgaatgctatcttcaacatgctgaacacgaaaaattgtccttcactgaaggacaaacccaaggtgattataattcaggcctgtaggggtgacagtcccggagtggtttggttcaaggattcagtcggcgtgtcaggcaatctgtctctgcccacgaccgaggaattcgaggacgatgccatcaagaaagcccatatcgagaaagacttcattgctttttgttcctcaacaccggacaatgttagttggaggcatccaactatggggtccgttttcatcggtagattaatcgagcacatgcaagagtatgcatgttcctgcgacgtggaggaaatcttccgcaaggtcaggttttcctttgagcaaccagatggacgtgcacagatgcccactaccgagcgggtgaccttgacacggtgcttttacctgttcccaggacattag

SEQ ID NO: 23276 - DNA, 792 bp, synthetic construct
  misc_feature 1..792: note = Description of Artificial Sequence: Synthetic coding sequence
  source 1..792: mol_type = other DNA
atggccgacaaggtgctgaaggagaagcggaagctgttcatccggtcaatgggagaggccccgcaggctgttcaggataatcctgcaatgccaacttcttcagggtcagaaggtaatgtcaagctgtgctccctggaggaagctcagcgcatctggaagcagaagtctgcggaaatttacccaattatggataagtcttcacgcacccgcttggcccttataatatgcaatgaagaatttgactccattccccggcggacaggtgcagaggtggatattacaggaatgaccatgctgctgcaaaacctggggtactccgtggatgtcaaaaagaatctgacagctagcgatatgacaaccgaacttgaggcctttgcccaccgtcctgagcataaaacctccgacagcacttttctggtgtttatgagccatggtattcgcgaagggatctgcggcaagaaacactctgagcaagtacccgatattctccagctcaacgctatctttaatatgttaaacacaaagaattgcccttctctgaaggacaaaccgaaggtgatcattatccaggcctgccgaggggataacgtgtcctggagacaccctacaatggggagcgtgtttatcggacggctgattgagcacatgcaagaatacgcctgctcttgcgatgttgaggaaatttttagaaaagtgcggttcagttttgagcagcctgatggaagagcacaaatgccaactacagagcgtgtgacacttacccgctgtttctaccttttcccggggcattag

SEQ ID NO: 23277 - DNA, 267 bp, synthetic construct
  misc_feature 1..267: note = Description of Artificial Sequence: Synthetic coding sequence
  source 1..267: mol_type = other DNA
atggccgacaaggtgctgaaggagaagcggaagctgttcatccggtctatgggggaggacaatgtctcttggagacatcccacaatgggctctgtgttcataggtagattgattgaacatatgcaggagtatgcatgctcttgcgacgtcgaagaaatttttagaaaggttaggtttagtttcgaacagccagacgggagggcccaaatgcccacgaccgagagggtgaccctcacaagatgtttttacctgttccctgggcattag

SEQ ID NO: 23278 - DNA, 1152 bp, synthetic construct
  misc_feature 1..1152: note = Description of Artificial Sequence: Synthetic coding sequence
  source 1..1152: mol_type = other DNA
atggccgacaaggtgctgaaggagaagcggaagctgttcatccggtccatgggcgaaggaaccattaatgggttgcttgatgagctgctgcagactagggtcctaaataaagaagagatggagaaggtcaaacgtgagaacgccaccgtcatggataagaccagagcactaatcgattccgtaattccaaagggggcgcaggcctgtcaaatctgtattacgtatatttgtgaggaagacagttacttggctgggaccttagggctcagtgcagcccctcaggctgtacaggataaccccgcgatgcccacctcatccggatccgagggaaatgtgaagttgtgtagtttagaagaagctcaaaggatctggaagcagaagagtgccgagatctaccccatcatggataaatcctcccgtacacggctggcgctgattatttgtaacgaagaatttgacagcatcccaagacggaccggagctgaggtggacatcaccggcatgactatgctcttacagaacctggggtacagcgtagatgtgaaaaaaaatcttactgcttccgacatgaccactgaactggaggccttcgcacatagacccgagcacaagacatcggactcaactttcctggtatttatgtcacacgggatcagggagggcatttgtggcaaaaagcactctgagcaagtccccgatatcctgcagttaaatgctatattcaatatgctgaacaccaagaactgcccctcccttaaagataagcccaaagtcatcatcattcaggcatgtagaggcgattcccctggagtcgtctggtttaaggattctgtgggagtgagcggtaatctgtccctgccaacgacagaagaatttgaggatgatgcaatcaaaaaggcccacattgaaaaggacttcatcgctttctgctcttccacccccgacaacgtgtcgtggcgacatccaacaatgggcagcgtgtttatcgggcgtctcatcgaacacatgcaggaatatgcctgtagctgcgatgtggaggaaatattcagaaaggtgagattctcattcgagcagcctgacgggcgggctcagatgcccacaaccgaaagggttacactgacaaggtgcttctacctgttccccgggcattag

SEQ ID NO: 23279 - DNA, 267 bp, synthetic construct
  misc_feature 1..267: note = Description of Artificial Sequence: Synthetic coding sequence
  source 1..267: mol_type = other DNA
atggccgacaaggtgctgaaggagaagcggaagctgttcatccggtccatgggtgaggataacgtgtcttggaggcatcccaccatgggatctgtcttcattggacgcctcatcgagcatatgcaggaatatgcatgttcttgcgacgttgaggagatctttcggaaagtccggtttagctttgagcagcccgacggaagagcccagatgccgactaccgagcgtgtgacgctgacacggtgcttttatttattccctgggcactag

SEQ ID NO: 23280 - DNA, 1215 bp, synthetic construct
  misc_feature 1..1215: note = Description of Artificial Sequence: Synthetic coding sequence
  source 1..1215: mol_type = other DNA
atggccgacaaggtgctgaaggagaagcggaagctgttcatccggtccatgggtgagggaaccatcaacggcctgctggatgaacttctgcaaactcgggtattgaataaggaggagatggagaaggtcaagcgcgaaaacgctaccgtgatggacaaaaccagggcactcatcgacagcgtcattccaaaaggcgcccaggcttgtcagatctgtattacctacatctgtgaagaagactcttatctcgctggaacgcttggcctcagcgccgaccagaccagcgggaattacctaaacatgcaagactcccaaggcgtactgtcttcatttcccgcgccccaggcagtccaggataaccccgccatgcccacctcctctggatcagaaggaaatgtcaaactatgcagtctcgaggaggcacaaaggatttggaaacagaaatcagccgaaatttacccgattatggataaaagctcacgcaccaggctggctctcattatctgcaacgaagagttcgactcaatcccacgacgcaccggggcagaagtggatatcacgggcatgactatgttgttacagaacctcggttactcagtcgacgtgaaaaagaatctcacagcgagcgacatgaccaccgagttggaggcgttcgcacatagaccagaacataagaccagcgatagtacattccttgtctttatgtcacacgggatcagagagggaatctgtgggaaaaagcactccgagcaggtgccagatattctccagctgaacgcaatttttaatatgttaaacaccaaaaactgtccctcattgaaggataagcccaaggttatcatcatccaggcttgccggggagacagtcctggcgtggtgtggttcaaggatagtgttggagtgtccggcaacctgtccctcccgactacagaggagtttgaggatgacgcgatcaagaaggctcatatcgagaaggactttatcgccttctgttcttcaacccctgacaatgtctcttggcgccacccgactatgggcagtgttttcattggacgactcattgagcatatgcaagaatatgcctgcagctgcgatgtggaggagatttttcggaaagtgaggttctcttttgagcagccagacggacgtgcgcagatgcctacaacagagagagttaccctgactcgatgcttctatctctttccaggtcactag

SEQ ID NO: 23281 - DNA, 792 bp, synthetic construct
  misc_feature 1..792: note = Description of Artificial Sequence: Synthetic coding sequence
  source 1..792: mol_type = other DNA
atggccgacaaggtgctgaaggagaagcggaagctgttcatccggtccatgggcgaagcacctcaggccgtgcaggacaatcctgctatgcccaccagttccggctctgaaggcaacgtgaaattgtgttccttagaggaggcacagcggatatggaaacagaaatcagctgagatttatccgatcatggataagagcagcagaactaggctggctctcataatttgtaacgaggagttcgattcaatccctagaagaacaggtgcagaggtggatatcaccggtatgacaatgctgctgcagaatctgggctatagcgtcgatgtaaagaaaaacctaacagcctccgatatgacaacagagttggaggcctttgctcaccgtcctgagcacaaaacctccgatagtaccttcttggtcttcatgtctcacggaatccgcgaaggaatctgcggcaagaagcactctgaacaagtccctgatattttgcagcttaacgctatttttaacatgctgaatactaaaaattgtccatctctcaaggataagccgaaagtcatcattattcaggcctgccggggcgataacgtaagctggcggcatccaactatgggatctgttttcattggccggttaatcgaacatatgcaggaatacgcatgttcgtgcgacgtcgaagagatctttcggaaagtgcgctttagtttcgagcagcctgacggcagggctcagatgcccacaactgaacgggtgacactgactaggtgcttctacctgttcccaggacattag

SEQ ID NO: 23282 - DNA, 1152 bp, synthetic construct
  misc_feature 1..1152: note = Description of Artificial Sequence: Synthetic coding sequence
  source 1..1152: mol_type = other DNA
atggccgacaaggtgctgaaggagaagcggaagctgttcatccggtctatgggggagggtaccattaacggtctactggacgagctgctccaaactcgggtgctcaataaggaagagatggagaaggtgaaacgcgagaacgcaactgtgatggacaagactcgcgccctcatcgactctgtgatccccaagggggcacaggcatgccaaatctgcatcacgtatatttgcgaggaggacagctaccttgcgggcacgttgggtttgtcagctgctccccaagccgtgcaggacaatcctgccatgccgacctcttctgggtccgagggtaacgtgaaactgtgctccctggaagaggctcaacgcatatggaagcagaagagtgcagagatctatcccattatggataaaagcagccgaactaggctcgctctgatcatctgtaacgaagagttcgacagcatcccacgccgaaccggagccgaggtggacatcacaggcatgactatgctattgcagaacctgggttactccgttgatgtcaagaagaacctgaccgccagtgacatgacgacagaactagaggcgtttgcccatagaccagaacataaaacttctgacagtacctttcttgtcttcatgtcgcacggtatccgagagggtatatgtggaaagaaacactccgagcaagtgccggacattctgcagctgaatgccatcttcaacatgctcaacacaaagaattgcccctctctgaaagacaaaccaaaagtgatcatcattcaagcttgcaggggtgactcacccggagttgtctggttcaaggacagcgtgggtgtctccgggaatctctctctgccgaccactgaggaattcgaggatgacgccattaagaaagcgcatatcgaaaaggacttcatcgccttctgcagttctacgccggataacgtgtcatggaggcatcccactatgggttccgtttttatcggtaggctgatcgaacatatgcaagagtatgcctgcagctgcgacgtcgaagagatcttcagaaaggttcgcttcagcttcgaacaacccgatgggagagcccagatgccaactacggagcgggtgaccctgaccagatgcttctacctctttccgggccactag

SEQ ID NO: 23283 - DNA, 936 bp, synthetic construct
  misc_feature 1..936: note = Description of Artificial Sequence: Synthetic coding sequence
  source 1..936: mol_type = other DNA
atggccgacaaggtgctgaaggagaagcggaagctgttcatccggtctatgggtgaggctccccaggcggtgcaagacaaccctgcaatgccaacatcttccggcagcgaaggcaacgtgaagctttgctctctggaggaagcacagagaatctggaagcagaaaagcgccgaaatatatcccataatggataagagctcacggacccgtcttgccctcattatttgtaatgaagaatttgattcaattcctcgcaggactggcgcagaggtggatataacaggcatgactatgctcctgcagaatttaggttattccgtggatgtaaaaaaaaacttgaccgcctcagatatgactacggaactggaggcttttgcacacaggccagaacataagactagcgactctacatttctggtgttcatgtctcacgggataagagaaggcatttgcggcaagaagcattcagaacaggtgccggatatactgcagcttaatgccatcttcaatatgctcaataccaagaactgtccaagcctgaaagataagcccaaggtcatcattatccaggcttgtaggggcgattctcccggagtggtgtggtttaaagattctgttggcgttagcggcaatctgagcctccccacaacagaagagtttgaggacgatgcgatcaagaaggcccatatcgagaaagatttcatcgcattctgcagcagcacacccgataatgtttcatggaggcaccccactatgggatctgtttttataggccgactgatagagcacatgcaagagtacgcctgttcttgtgacgtcgaagagatatttcgcaaggttaggttttcctttgagcagccagacggtcgtgcacagatgccgacaaccgagagagttacattgacacgatgcttttatctttttcctgggcattag

SEQ ID NO: 23284 - DNA, 906 bp, synthetic construct
  misc_feature 1..906: note = Description of Artificial Sequence: Synthetic coding sequence
  source 1..906: mol_type = other DNA
atggagaaggtgaagcgggagaacgccaccgtgatggacaagaccagagctctgatcgatagcgttattccaaaaggcgcacaggcctgtcaaatttgtataacatatatctgtgaggaagactcctacctcgccggaacgttggggctgtctgcagaccagaccagtggaaattatctgaatatgcaggatagccagggtgtactgtctagctttcctgctccacaagctgtacaagataatccagccatgcctactagttcaggaagtgaagggaatgtaaaactctgttcgcttgaagaagcccagcggatctggaagcagaagtccgctgagatttatcctattatggataagagttctcggactagacttgctctgatcatatgtaacgaggagttcgattccatccctaggagaacaggcgctgaagtggatattacagggatgactatgctgcttcagaacctgggttactctgtggacgttaaaaagaacctgaccgcttccgacatgaccactgagcttgaggcatttgcgcacagacccgagcacaagacaagcgacagtactttcctggtgtttatgagccacggaatccgggaggggatctgcggaaaaaagcactcagagcaggtgccggatattctgcaactcaacgctattttcaatatgctgaacactaaaaactgccccagcctgaaggacaagcctaaagttatcatcatccaggcctgccgtggcgacagcccaggggtggtgtggtttaaggattctgtaggagtgtctgggaatctgagtttacccactacagaggagttcgaggatgacgccatcaaaaaggcccacattgaaaaggattttatcgccttttgctcatctacgcccggtaaatcgcagtcttag

SEQ ID NO: 23285 - DNA, 333 bp, synthetic construct
  misc_feature 1..333: note = Description of Artificial Sequence: Synthetic coding sequence
  source 1..333: mol_type = other DNA
atggccgacaaggtgctgaaggagaagcggaagctgttcatccggagcatgggcgagggaacaattaacgggttgcttgacgagttgttgcagaccagagtactcaacaaagaggagatggagaaggtgaagcgggagaatgccactgtcatggacaaaacacgtgccctcattgactctgtgattccaaagggggcacaggcttgccaaatttgcattacctacatttgtgaggaggactcttaccttgcaggcaccctggggctgtccgccgatttgtccaataacggccaagtgaagccacacacctcgtgcagtcactacctgcagtag

SEQ ID NO: 23286 - DNA, 267 bp, synthetic construct
  misc_feature 1..267: note = Description of Artificial Sequence: Synthetic coding sequence
  source 1..267: mol_type = other DNA
atggccgacaaggtgctgaaggagaagcggaagctgttcatccggtccatgggagaagataacgtcagctggagacatcccaccatggggagcgtcttcattggaaggctgattgagcatatgcaggagtacgcctgttcatgcgacgttgaagagattttccggaaggttcgtttttcatttgagcaaccagatggaagggcgcagatgccgacgaccgagagagtgaccctcactcgttgcttctatttattcccaggacactag

SEQ ID NO: 23287 - DNA, 1215 bp, synthetic construct
  misc_feature 1..1215: note = Description of Artificial Sequence: Synthetic coding sequence
  source 1..1215: mol_type = other DNA
atggccgacaaggtgctgaaggagaagcggaagctgttcatccggagcatgggggaagggactatcaatggcctgctggatgagctgctgcaaactagagtgctcaacaaagaagaaatggagaaagtcaaacgcgaaaacgcgacggtcatggacaagacccgcgctcttatcgactcagtgatcccaaagggagctcaggcttgtcagatctgcatcacctacatctgcgaggaggattcatatctggcaggtaccctgggtctcagcgctgaccaaacttctgggaattacctcaatatgcaggatagccagggcgtcctgtcaagctttcccgcccctcaggctgtccaggacaaccccgcaatgccaacctcctcaggttctgagggtaatgtaaagctgtgttctttggaggaagcacagcggatttggaaacagaaatccgccgagatttatccgataatggataagtcttcacgcaccaggctggctcttatcatatgtaatgaggagttcgactctatccctagacgcactggagctgaggttgacatcacaggcatgaccatgttgcttcagaacctcggctactctgtggatgtcaagaagaatctgaccgcatcagatatgactaccgagctggaagctttcgcacatagaccggagcacaagacctcagatagtacattccttgtttttatgagccatggtatcagagagggcatttgtggcaagaagcacagtgaacaggtgcctgacattctgcaacttaacgccatctttaacatgctcaatacaaagaattgcccatccctcaaagacaagcctaaggtaatcattatccaagcttgccgaggggactctcctggagtggtgtggtttaaggacagcgtcggggtcagcggcaatctctctctgcccaccacggaagagtttgaggacgacgcgatcaagaaggcgcatatagagaaagactttattgccttttgctccagcacccctgataatgtgagttggcggcatcccaccatgggatcagttttcatcggcaggctgatcgagcatatgcaggagtacgcatgcagctgcgacgtggaggagatttttagaaaggtccgcttcagctttgagcagccggatgggagagctcagatgcccacaacggagcgggttaccctgactagatgtttttacctttttcccgggcactag

SEQ ID NO: 23288 - DNA, 792 bp, synthetic construct
  misc_feature 1..792: note = Description of Artificial Sequence: Synthetic coding sequence
  source 1..792: mol_type = other DNA
atggccgacaaggtgctgaaggagaagcggaagctgttcatccggtcaatgggtgaggctcctcaagctgtccaggacaatccagcaatgccaacctccagtggctctgaaggtaatgtgaagctgtgcagtttagaagaagcccaaaggatctggaaacaaaagagcgccgagatctatcccattatggacaaaagttccagaacaagactggcccttattatatgcaatgaggaattcgactcgatacctagacgtaccggcgccgaagtcgatatcactggaatgacgatgttgctccaaaacttgggttattctgttgatgtcaagaagaacctgacagccagcgatatgactaccgaacttgaagccttcgcccacagacctgagcacaaaacttcggattctactttcctagtgtttatgtcgcacgggattagagaaggcatttgcgggaaaaagcatagcgagcaggtgcccgatatcctgcagctgaacgcgatttttaacatgctgaacaccaaaaactgtccaagcctcaaagacaagcccaaggttattatcatccaggcctgcagaggagacaatgtgagctggcggcaccctaccatgggctcagttttcattgggagattaatcgaacatatgcaggaatatgcttgtagctgcgacgtggaggaaattttccgtaaggtgagattttctttcgagcagccagatggcagagcccagatgcccacaacagagagggttaccctgactagatgtttctatctattcccaggacactag

SEQ ID NO: 23289 - DNA, 1368 bp, synthetic construct
  misc_feature 1..1368: note = Description of Artificial Sequence: Synthetic coding sequence
  source 1..1368: mol_type = other DNA
atgaagagccagggccagcactggtacagcagcagcgacaagaactgtaaagtatcttttagagagaagttacttattatcgacagcaacctgggggttcaggatgtagagaatctgaaattcctatgcattggactcgtgcctaacaagaaattggagaagtcctcatcagccagcgatgtctttgaacatctgttggccgaggatctgctgtccgaggaggatccgttctttttggcagagctcctctacataatccgccagaagaagctgctgcagcacctgaattgtacgaaagaggaggttgagcggttgcttccaacacgccaacgggtcagcttgtttcgtaatcttctatacgagttgagcgaaggcattgattccgaaaacctgaaggatatgatattccttttgaaagatagcctgcccaaaactgagatgactagtctgagcttcctcgccttcttagagaaacagggaaaaattgacgaagataacctgacatgcctggaggatttgtgtaaaaccgtcgtgccaaagttgttgaggaacattgagaagtataagcgcgagaaggccatccagatagtgacccccccagtagacaaggaggcggagtcctaccagggcgaggaagaattggtgtcccagactgacgtgaagacttttctggaggctctgccccaggaatcctggcaaaacaagcacgcagggtcgaacgaaattctgtcccacgtcttccagtggcttgggtttacagtgcacattcataataacgtgaccaaggttgagatggagatggtcctacaaaaacagaagtgtaatccagcccatgccgacggcgactgctttgtattctgtatcttgactcacggccgcttcggcgctgtttattccagtgatgaagccctgatcccaattcgagaaatcatgtctcattttactgctctccaatgccctcgacttgctgaaaaacccaagctgttctttatacaggcctgccagggcgaggagatccagccatcggtgtctattgaggccgatgcacttaacccagaacaggcacccactagcctccaggactctattcctgcggaggccgatttccttttaggtctcgctactgttccaggatatgtgagttttcggcacgtagaggagggatcatggtacattcaatctctttgcaatcatcttaagaaactggtgccccggcacgaggatattctgagtatcctgaccgcagttaatgatgacgtgagcagacgagtggataagcaagggactaagaagcaaatgccccaaccagcctttacattgcgaaagaagctggttttcccagtgccactggatgccttgtctctgtag

SEQ ID NO: 23290 - DNA, 1437 bp, synthetic construct
  misc_feature 1..1437: note = Description of Artificial Sequence: Synthetic coding sequence
  source 1..1437: mol_type = other DNA
atgaagagccagggccagcactggtacagcagcagcgacaagaactgcaaggtgagtttccgggagaagctccttattatcgatagcaatctgggcgttcaggatgtggaaaatctcaaatttctgtgcattgggctggtgcctaacaaaaaactggagaagagctcctcagcttctgatgtttttgagcacctgctcgccgaggacttgctgtcagaggaagacccgttctttcttgccgagctactttatatcatccggcaaaaaaagcttcttcaacatctgaattgcactaaagaagaggttgagcgtcttctgcccactaggcagcgcgtgagtttgttccggaatctattgtatgagctgtcagaggggatcgacagtgagaatctaaaagacatgatttttctgttgaaggattccctcccaaaaactgaaatgacctctctcagtttcttagcatttctagaaaaacagggaaaaatagacgaggacaacctgacttgcctcgaggacttatgtaaaacggttgtgcccaaactcctccgcaatatcgagaaatacaagcgggaaaaagctatccagatcgtgacaccaccagtggataaggaagccgagtcttaccagggggaagaagagctagtgtcgcagacagatgttaagacttttctggaggctctcccaagggccgctgtgtacaggatgaatagaaatcaccgcggcctgtgtgtcattgtgaacaatcatagttttacctcactaaaagatcggcagggaacacataaggacgccgagatcctctcccatgttttccaatggttggggttcaccgtgcacattcacaacaatgtgacgaaggtggagatggaaatggttctccaaaagcagaagtgcaaccccgcacacgccgacggggattgcttcgtcttctgtattctgacgcacggaagattcggcgccgtgtattctagcgatgaggctctaatcccgattcgagaaattatgtcgcatttcactgcccttcagtgcccacgcttagctgaaaagcctaagctgttcttcatccaggcttgccagggcgaagagattcagccgtccgtcagcattgaggcagacgccctgaaccctgagcaggctccaacatcattgcaggactccattccagcagaggctgacttcctgctgggacttgcaacagtccctggctacgtctcatttcgccatgtagaggaaggtagctggtatatccagtctctgtgtaaccatctgaagaagctggtccctcgcatgctgaaatttctagaaaagactatggaaatccggggtagaaaacgcaccgtatggggagctaagcagatctccgccacaagcctgcctactgccatcagtgctcagacccccagaccaccgatgcggaggtggtcctctgtaagctag

SEQ ID NO: 23291 - DNA, 1566 bp, synthetic construct
  misc_feature 1..1566: note = Description of Artificial Sequence: Synthetic coding sequence
  source 1..1566: mol_type = other DNA
atgaagagccagggccagcactggtacagcagcagcgacaagaactgcaaggtctcctttcgcgagaaactactgatcatcgacagcaatcttggagtgcaggatgtggagaacttaaagtttctgtgtatcggtctcgtgcccaacaaaaagttagagaaatcttcatctgcttcagacgtgttcgagcacctgctggctgaggacttactttcagaggaagacccatttttcctggctgaactgctgtacatcatacggcagaagaagctgctgcaacatctgaactgcacaaaagaggaagtagaaaggctcttacccacaagacagagggtttcactgtttagaaatctgttatatgagttaagcgaaggaatcgattccgaaaacctgaaggatatgatcttcctcttaaaagattctctgccaaagacggagatgacatctctgtctttcttggcttttcttgaaaaacagggcaagattgatgaagacaatctcacatgtctggaggacctatgcaaaaccgtggtgcccaaactgctacggaacatcgagaagtataagcgggaaaaggccatacagatcgtaactcctcctgtcgacaaggaggccgaatcctatcagggcgaggaggagcttgtatcccagaccgatgttaagacattcctcgaagctttgcctcaggagtcttggcagaacaagcacgcaggctcaaacgggaatcgggccacgaacggtgcgccgagccttgtttcccggggcatgcagggcgcttccgccaacactctgaactcagaaaccagcaccaagcgcgcagcagtgtaccgaatgaatcgcaatcatagaggcctatgcgtgattgtgaacaatcacagcttcacctcgttgaaggaccgtcaggggacccacaaggatgccgagatcctgtctcatgttttccagtggttagggtttactgtgcacatacacaataatgtgaccaaagtggagatggaaatggtcttacagaagcagaaatgtaatccagcacacgcagatggtgactgcttcgtgttctgtatcttgacccatggccgtttcggagctgtttacagtagcgacgaggccctgattcctataagagagattatgagccatttcacagcattgcaatgtccgaggctggcggaaaaacccaagttgttttttatccaggcttgccagggagaagagattcagccctctgtctccatagaggctgatgcattaaatccagaacaagcacccaccagcctgcaggattccatacctgcggaagcggactttctacttggactcgcaactgttccaggttatgtgagctttagacacgtggaagagggcagctggtatattcagtccttatgtaatcacctaaaaaagctggtcccgaggatgctgaagttcctcgaaaaaacaatggagatccgtggcaggaagcgaacggtgtggggcgctaaacagatttctgcaacttctcttccaacggctatatctgcgcagaccccgcgcccccccatgcggcggtggtcctcagtgtcttag

SEQ ID NO: 23292 - DNA, 1569 bp, synthetic construct
  misc_feature 1..1569: note = Description of Artificial Sequence: Synthetic coding sequence
  source 1..1569: mol_type = other DNA
atgaagagccagggccagcactggtacagcagcagcgacaagaactgtaaagtaagttttagggagaagcttctgatcattgatagcaaccttggcgttcaggatgttgagaatctgaagttcctctgcatcggcctggtgcccaataagaagctcgagaagtctagctccgccagcgatgtgtttgaacatttactggcagaggaccttctgtccgaggaggacccatttttcctcgccgagctgctctacattattcgtcagaagaagctgctccagcacttgaactgcacgaaggaagaagtggagaggctgctgccaacacggcagagagtgtccctcttcaggaatttactgtacgagctgtcggaaggaattgacagcgagaacctcaaagatatgatcttcctgctaaaagactctctgcctaaaacagagatgactagcctctccttcttagcgtttctggaaaagcagggcaagatcgacgaggataacttgacatgcttggaagatttatgtaagactgttgtgcctaagctgctgaggaatatcgagaaatataagcgagagaaagccattcagatcgtaacacccccggtagacaaagaagcagaatcttaccagggcgaggaagagctggtatcacagacggatgtgaaaacctttctggaagctcttccccaggagagctggcagaacaaacacgctggctccaacggcaatcgcgcgactaacggcgccccttcactggtcagtagggggatgcagggggccagtgccaatacattgaatagcgagaccagcaccaaacgggctgccgtgtatcgaatgaacaggaatcaccggggactctgtgttattgttaataatcattcatttacaagcctaaaagacagacaggggactcataaggacgcagaaatcctgtcccacgtgttccagtggttgggcttcactgttcatatccataataacgttacaaaggtggagatggagatggtgctgcagaaacagaagtgcaacccagctcacgccgacggagattgttttgtgttctgcatcctcacccacggtagattcggcgcggtttacagctccgatgaggccctcatcccaatcagagagataatgtcacacttcaccgccttgcagtgccctcgcctcgcggaaaaacccaaattgttttttattcaggcttgccagggagaggagatccagccatctgtaagcatcgaagccgacgctctcaatcctgaacaggcccccacatctctgcaggattccatcccggcggaagccgatttcctgctcggccttgcaactgttccgggatacgtgtcttttcggcacgtcgaagagggctcttggtatattcagtctctctgtaaccatctgaaaaaactcgtcccacgtcatgaggatatcctatccatcctgacagccgtgaacgacgatgtgtctagaagggttgacaaacagggaaccaagaagcagatgccccaacctgcatttaccctgcgtaaaaagctggtctttccggtcccactcgacgctctcagcctgtag

SEQ ID NO: 23293 - DNA, 1440 bp, synthetic construct
  misc_feature 1..1440: note = Description of Artificial Sequence: Synthetic coding sequence
  source 1..1440: mol_type = other DNA
atgaagagccagggccagcactggtacagcagcagcgacaagaactgcaaagttagcttccgcgagaaactgctgattatcgacagcaatcttggcgtccaggatgtcgagaacctaaaattcctgtgtatcggattagtacccaataaaaagctggaaaaatcttcatctgcttctgatgtattcgagcacctactggctgaagatttgctgtctgaggaagaccccttctttctggctgaacttctgtacatcatccggcagaaaaaattgctgcagcacctaaactgcacgaaggaggaggtagagagactcctgccaacccgccagagagtgagtctgttccggaacctgctgtacgagctatctgagggcatagatagcgagaacctgaaagatatgatatttctgcttaaagactcacttccgaaaaccgagatgacatctctgtctttcctagcatttttggaaaagcaaggcaagatcgacgaggacaatctgacatgcctggaagacctgtgtaagaccgttgttccgaagctgcttagaaacatcgagaagtacaaacgcgagaaagcaattcagattgtgactccccctgtagacaaggaggctgagtcttatcagggagaagaggaactcgtgtcgcagaccgatgttaagacattccttgaggctctgcctcgggctgccgtttatcgcatgaataggaatcaccggggcctgtgcgtcatcgttaataatcactcttttacttctctaaaagatagacagggaacccataaggatgcagagattcttagccatgtgttccagtggctgggcttcactgtgcatattcacaataatgtcacaaaggtggagatggagatggtgctgcagaagcagaagtgcaatcccgctcacgctgacggggactgcttcgtgttttgcattctgacccacggacggttcggcgctgtgtattccagcgatgaagctctcattcctattagagagattatgtctcacttcacagcgttgcagtgtcctagactcgccgaaaagccaaaactgttttttatacaggcttgccagggcgaggaaattcagccgagtgtcagtattgaggcagatgccctgaacccagagcaggcccccacctctctgcaggattcaatccccgcggaggctgatttcttgctcggcctggccacagtgccgggatacgtgagctttcgtcacgtggaggagggttcctggtacatccagagtttatgcaatcatctcaagaagctggttcctcgtcacgaagatattctgagtattctgaccgctgtgaatgatgatgtttctagacgagtggacaagcaggggacgaagaagcagatgcctcagcctgcatttactctccgaaagaaactggtttttcccgtaccgctggacgctctctctctctag

SEQ ID NO: 23294 - DNA, 822 bp, synthetic construct
  misc_feature 1..822: note = Description of Artificial Sequence: Synthetic coding sequence
  source 1..822: mol_type = other DNA
atgaagagccagggccagcactggtacagcagcagcgacaagaactgtaaagtatccttcagagagaagctccttatcattgattctaatctcggggttcaggacgtggagaacctgaagtttctctgtattgggctggtgcccaacaagaaacttgaaaagtcctctagtgcgtctgacgtgtttgagcatctcctcgccgaggatctgctcagcgaggaagaccctttctttctggccgagctgctgtacataatccggcagaaaaaattgctacagcacctgaattgtaccaaggaggaggtggagcgtctcctccctacccgccagcgagtcagccttttccggaaccttctctacgaactctccgaagggatcgactccgaaaacttaaaagacatgattttcttgctgaaggacagcttgccaaagaccgaaatgacctccctcagcttcctcgcctttcttgagaaacagggtaagattgatgaggataatctcacatgcctggaagatctgtgcaagaccgttgtgcctaagctcttacggaatatcgagaaatataagagagaaaaggccatccagatcgtgaccccacccgtggacaaggaggctgagtcttaccagggagaggaagagctggtcagccaaacggatgtaaaaactttcctagaggcgctgccacaggaatcttggcaaaataaacatgctggtagtaatgagggctcctgtgtgcaggatgagagcgagccacagcggcccttatgccactgccagcagccccagctttatctacctgagggccagactcgcaatccatag

SEQ ID NO: 23295 - DNA, 1533 bp, synthetic construct
  misc_feature 1..1533: note = Description of Artificial Sequence: Synthetic coding sequence
  source 1..1533: mol_type = other DNA
atggccgccgccgccctgcgggaccccgcccaggtgcccgtggccgccgatctgctgacggaccacgaagagggctatgtcacgttcgaagacgtggctgtgtacttctctcaggaggagtggcgcttgctggatgacgctcagcggttgctttatcgcaatgtgatgctggagaatttcacactgcttgcatcgctcgggcttgcgtcgagtaagacccatgaaatcactcagttagaatcctgggaggaaccttttatgccggcctgggaggtggtgacctccgccatccctagaggctgctggcacggcgccgaagccgaggaagcaccagaacagatcgccagcgtggggttgctgagttccaacattcaacagcatcaaaaacagcactgtggggagaaaccgctcaaacgccaggaaggccgggtcccggtgctgcggtcatgcaaagtgcacttaagcgaaaaatctctgcagtcgcgagaggtgggtaaggccctactcatctcttcaggagttctaaagcaccaggtgacgcacacaggtgaaaaaagccataggagctcaaagtctagggaggccttccatgccggtaagcgacactataagtgttctgaatgcggcaaggcctttggccaaaaatatctcttggtccagcatcagcgcctccatgccggaaaaaagacgtacgagtgcagtgagtgtggcaaactttttagggacatgtccaatctgtttatccatcaaattgttcatacaggcgaacggccatatggctgctccaactgcggcaagagcttttctcggaatgcacatctgatcgagcaccaaagagtgcacacaggggagaaaccatttacctgctcggaatgcggcaaggcattcagacacaatagcaccctagtccaacatcataagattcacacaggtgttagaccttacgagtgttcggagtgcgggaaactgttctcattcaatagcagcctgatgaagcatcagagaatccacaccggggagcgaccatacaaatgcagcgagtgcggcaaattttacagccacaaaagtaatctgatcaagcattggagagtgcatacaggcgagcgcccctacaagtgcagtgactgtggcaagttttttactcagtgcagcagcctaatgcagcaccagaaagtccataccggagaaaaaccatttaagtgtaacgaatgcggcaggttttttcgtgagaacagtacgctagttagacaccagcgcgtccacacaggtgcaaagccgtacgagtgcagagagtgcggtaaattttttagtcagagttcgaccttgatgcagcacaggaaagtccatattggggaaaagccctttaagtgtaacgaatgcggccgactgtttcgcgagaattcctcactcgtcaaacatcaacgtgtgcacacaggagccaaaccctatgagtgccgcgagtgcggtaagttctttaggcacaactcaagcctgttcaagcatcggcgcattcatactggagagatgcagtag

SEQ ID NO: 23296 - DNA, 729 bp, synthetic construct
  misc_feature 1..729: note = Description of Artificial Sequence: Synthetic coding sequence
  source 1..729: mol_type = other DNA
atgagcaacccccggagcctggaggaggagaagtacgacatgagcggcgcgcggttagcccttatcctctgtgtgaccaaggccagagagggctccgaggaggatctcgacgcacttgaacacatgttcaggcaattaaggtttgagtccaccatgaagcgtgacccaacagcagagcagttccaggaggagttagagaaattccagcaggccattgattcacgagaggatcccgtgtcctgcgcctttgtggtgctcatggcccatggaagggaaggtttcctgaagggcgaagatggggagatggtgaagctcgagaatctgttcgaggccctcaataataagaactgtcaggcacttcgggcaaaaccaaaagtttatattattcaggcctgccggggcgagcagagagaccctggtgaaactgttggtggcgatgaaatcgttatggtcatcaaggattctccgcagaccatccctacctacactgatgctctgcacgtgtacagcacagttgaaggttacatcgcttacaggcatgatcagaagggctcttgctttatccagacacttgtggatgtctttacaaagagaaaaggccacatactcgaactcctgactgaggtcacgcggaggatggcagaggctgagctcgtgcaagagggcaaggctagaaagactaaccccgaaatacagagcacactcagaaaacggctgtacctccagtag

SEQ ID NO: 23297 - DNA, 1359 bp, synthetic construct
  misc_feature 1..1359: note = Description of Artificial Sequence: Synthetic coding sequence
  source 1..1359: mol_type = other DNA
atggccgcccccagcgccggcagctggagcaccttccagcacaaggagctgatggcagccgacagaggacgtagaatccttggagtgtgtggcatgcaccctcaccatcaggagaccctgaaaaaaaacagggtcgtgttggctaagcaactcctactctctgaattactagagcatctcctggaaaaggatattatcaccctcgaaatgagggagctgatccaagcaaaggtcggctccttctctcaaaatgtcgaactgctgaatttactgcccaagcggggcccacaggcgtttgacgccttttgtgaggccttacgggaaactaagcaaggccatcttgaagacatgctgctgactacgctcagtggcctacagcatgtcctgcctcctctgtcctgtgattacgacctcagcctgccatttcctgtgtgtgaatcttgcccactctataagaagttgcggctctctacagacaccgtagaacactcattagacaataaggatggacccgtgtgcttgcaggtcaaaccctgtacacccgagttctatcagactcattttcaactggcctaccgtctgcagtcgcgacccagaggtcttgctcttgtattgagtaatgtacatttcacaggggaaaaagagttggaatttagatcgggaggcgacgtggaccattcaacactggtcactctcttcaagctgctaggctacgacgtacatgttttgtgcgatcaaacagctcaggaaatgcaagaaaagctgcaaaactttgcccagctgcctgcgcatcgcgtgaccgacagttgcattgttgccctgctgtcccacggcgtggagggagccatctacggcgttgacgggaaactgctacagcttcaagaagtgttccagttattcgataacgcaaactgtcccagcctacagaataagcctaagatgtttttcattcaggcatgcagaggtgacgagactgaccgcggagtagaccaacaagacggcaagaatcacgctggcagtcctgggtgtgaggagagcgatgccggaaaggaaaagcttccaaagatgagactccccacccggtctgatatgatttgcggctatgcctgtctgaaagggacagctgctatgagaaatacaaagcgaggctcctggtacatcgaagcgttggcccaggtgttctcggaacgggcatgtgatatgcacgtcgccgatatgctggtcaaagtcaacgccctgataaaggatcgcgaggggtacgcacccggaaccgagttccacaggtgtaaggaaatgagcgagtactgcagtaccctctgtaggcacttgtatctgttcccaggacatccccccacctag

SEQ ID NO: 23298 - DNA, 327 bp, synthetic construct
  misc_feature 1..327: note = Description of Artificial Sequence: Synthetic coding sequence
  source 1..327: mol_type = other DNA
atggccgcccccagcgccggcagctggagcaccttccagcacaaggaattgatggcagcagaccgtggaaggcggatcctcggcgtgtgtggcatgcacccacatcatcaagagacccttaagaagaacagagtggtcctggccaaacagcttctgctgagcgagcttctggagcaccttctggagaaggacattattactctggaaatgcgggagctcatccaggcaaaggtagggtcattcagccagaacgtggagctgctgaacctcttgcccaagcgcgggccacaagccttcgatgcattttgtgaagccctccacagttag

SEQ ID NO: 23299 - DNA, 942 bp, synthetic construct
  misc_feature 1..942: note = Description of Artificial Sequence: Synthetic coding sequence
  source 1..942: mol_type = other DNA
atgcacccccaccaccaggagaccctgaagaagaaccgggtggtgctggctaaacagctgctgctcagtgaacttcttgagcacttgctggagaaagacatcataacgctggagatgcgggaactcatccaagccaaagtcggtagcttctcacagaatgtggagctgctgaacttgttgccaaagcgaggaccgcaagcgtttgatgcgttctgtgaggccttgcgggagactaaacagggccacttagaggacatgctgctgactacattgagtgggctgcagcacgtgctcccccctctgtcatgtgattatgatcttagtttgccctttcctgtttgcgaatcatgtcccctctataaaaaattgcggctttccaccgatacggtggaacattccttagacaataaggacggtccagtgtgcttgcaggtgaaaccatgcacccccgagttctaccagactcacttccagctggcttacaggttacagagccggccccggggcctggccctcgtactcagcaatgttcatttcacaggtgagaaagaactagagttcagatcaggaggcgatgtcgaccactctacactggtgactttgttcaagctcctaggatatgacgtgcacgtcctgtgcgaccaaacggcccaagagatgcaggagaagctccaaaacttcgctcagctgccggcccacagggtgaccgatagttgcattgtcgcactcctgtcacatggggtggagggcgcaatctatggcgttgatggcaagctgcttcagctgcaagaggtctttcaactctttgataatgccaactgcccaagcttacaaaacaagccaaaaatgttcttcattcaggcctgcaggggagccggagccattggtagcctgggccacctgctgctgtttactgcggccacagcatctctggcactgtag

SEQ ID NO: 23300 - DNA, 993 bp, synthetic construct
  misc_feature 1..993: note = Description of Artificial Sequence: Synthetic coding sequence
  source 1..993: mol_type = other DNA
atgctgaagctgaagaccaagttcggcagctggcagaccctgtgcaagcggtccaacgtctggcaggacaagtgctttttcaaacctttcaacatagaccagatctcgccaaataaaaaagcacatccaaacatggaggccgggccacccgagtctggcgagtccactgacgcactgaagctctgcccccacgaagagtttttgcgactgtgcaaggagagagcagaggagatatacccaataaaggagcgcaataacaggacccggctggcactgataatctgtaataccgagtttgatcacctgccccccagaaacggcgcggactttgacatcactggcatgaaggaattactggagggactggactattcagtagatgtggaagagaacctgaccgcccgcgatatggaatctgcactgcgcgctttcgctacacggccagaacataagagctcggactcaacatttcttgtgctaatgtcgcacggcattctggaagggatttgcggcacagttcatgatgaaaagaagcctgacgtgctgctgtatgacactatctttcagattttcaataataggaactgtctttccctgaaggataagcctaaggtgattattgtgcaggcttgtagaggggcaaacaggggagagctttgggtaagggactcacctgcttcactggaggtggccagcagccagagcagcgaaaatctcgaggaggatgccgtgtacaaaactcacgtcgagaaggacttcatcgccttttgcagctcaactcctcacaacgtgagctggagggactcaactatgggaagtatcttcatcacccagctgattacttgctttcagaagtacagctggtgctgtcacttagaggaggtcttccgcaaagtgcaacaatccttcgaaacccctcgcgcgaaagcacagatgcctacaatagagagactgtccatgacgagatacttttaccttttcccaggaaactag

SEQ ID NO: 23301 - DNA, 444 bp, synthetic construct
  misc_feature 1..444: note = Description of Artificial Sequence: Synthetic coding sequence
  source 1..444: mol_type = other DNA
atggccgagggcaaccaccggaagaagcccctgaaggtgctggagtcactgggaaaggatttcctcactggagtcctcgacaacctagtcgagcagaacgttctcaattggaaggaagaagagaagaagaaatactacgatgctaaaacggaggataaagtaagagtgatggctgattctatgcaggaaaaacagcggatggcaggacagatgctgctgcaaactttctttaatatcgatcagatctctcctaataagaaggcccaccctaacatggaggcagggccccctgaaagcggcgagagcacagatgcactgaaactgtgccctcatgaggagtttctgcgactgtgcaaggagcgcgcagaagaaatctacccaatcaaggagaggaataaccgtacccggctcgccctgattatttgcaatactgagttcgactag

SEQ ID NO: 23302 - DNA, 1134 bp, synthetic construct
  misc_feature 1..1134: note = Description of Artificial Sequence: Synthetic coding sequence
  source 1..1134: mol_type = other DNA
atggccgagggcaaccaccggaagaagcccctgaaggtgctggagtctcttgggaaggactttctgacgggagtgttagacaacttggtggagcagaatgtcctgaattggaaagaggaggagaaaaagaaatactatgacgccaaaaccgaggacaaggtaagagtgatggcagactctatgcaggagaaacagagaatggctggtcagatgctactgcagacattcttcaacattgaccagatatctccgaataagaaggctcatccaaacatggaggcaggaccccccgagagtggcgaatccacagacgctctaaagttgtgtccacacgaagagtttctgcggctttgcaaggagcgtgccgaggaaatctatccgataaaagagagaaataatagaacccgcctggccttaattatctgcaatactgagttcgaccatttgccaccccggaacggtgcagactttgacatcactggtatgaaggagctgctagaaggcctggattattcagtggatgtggaagaaaatctgactgctagggacatggaatctgcactgcgcgctttcgctaccaggccggaacataagagctccgattcaacctttcttgtcctcatgagtcacggaattctggaggggatctgcgggactgtccacgatgagaaaaaaccagatgtcctactatacgacaccatctttcagatcttcaataacagaaattgtctgtcattgaaggacaaaccaaaagtgatcattgtgcaggcatgccgtggagcgaatcgtggcgagctatgggtgcgcgattctccagcatcattagaggtggcttccagtcagagtagcgaaaacctagaagaggacgcagtctataagacgcatgttgagaaggacttcattgcattctgcagtagtacgccccataacgtgtcgtggcgcgattctacgatgggctctatcttcattacccagctaatcacatgctttcaaaaatattcctggtgctgtcacctggaggaagtctttagaaaggtacagcagagtttcgaaactccaagagccaaggcccagatgcccacaatagagcgattatccatgacacgctatttctacctctttcccggaaattag

SEQ ID NO: 23303 - DNA, 1305 bp, synthetic construct
  misc_feature 1..1305: note = Description of Artificial Sequence: Synthetic coding sequence
  source 1..1305: mol_type = other DNA
atggccgaggacagcggcaagaagaagcggcggaagaacttcgaggcgatgttcaaagggatcctccaaagcggacttgacaacttcgtgattaatcacatgcttaagaataacgtcgccggccagacatccatacagactctcgtcccgaacacggatcagaagagtaccagtgtgaagaaagataaccataagaagaaaaccgttaaaatgctcgaatatctgggcaaagatgtgttgcatggcgtgtttaattatttggcaaaacatgatgtcctgactctcaaagaggaggagaaaaaaaagtattacgataccaagatagaagacaaagcacttattcttgtggattcactgcgaaagaacagggtcgcacaccagatgttcacacagacactgctaaatatggatcagaagattacaagcgtaaaacccttgctgcagattgaggcagggccccccgagagcgcagaatccacgaacatcctgaagctgtgtccacgtgaggagttcctgagactgtgtaagaaaaatcatgatgagatctatcccatcaagaaacgggaggatcgtagacgcttagccctgatcatctgtaatactaaattcgatcacctgccagcccggaatggggctcattacgacattgtagggatgaaacgcttactgcaggggctcggctacaccgtcgtcgatgaaaagaacctcactgccagagatatggaatccgttttgcgtgcatttgcggctaggcccgaacacaagtcgagcgatagtactttcctcgtgctcatgtcccacggaattctcgaaggcatttgtgggactgcccacaagaagaagaagccggatgtgctgctatatgatacaatcttccaaatttttaacaacaggaattgtctgtctcttaaggataaacctaaggtgattattgtacaggcatgcagaggcgagaagcacggcgagctgtgggtcagagactcccccgcctcactggcgctgatttcttcacagtcttccgagaacctggaagcggattctgtgtgcaagatccacgaagagaaggacttcattgcattctgttcttcaaccccccacaatgtgtcctggcgagatcgaacccgggggtctattttcatcaccgaactcattacctgtttccagaaatattcgtgctgttgtcatcttatggagatctttcgaaaggtgcagaagtctttcgaagtgccccaggcgaaggcccagatgccaactatcgagcgcgccaccctgactagggacttttaccttttcccgggtaattag

SEQ ID NO: 23304 - DNA, 402 bp, synthetic construct
  misc_feature 1..402: note = Description of Artificial Sequence: Synthetic coding sequence
  source 1..402: mol_type = other DNA
atgctgaagaacaacgtggccggccagaccagcatccagaccctggtgcccaataccgatcagaagtctacctccgtgaagaaggacaaccacaagaagaaaaccgtgaaaatgctcgagtacctgggtaaagacgtgctgcacggtgtgttcaactacctggcaaaacacgatgttctgactttgaaagaagaggagaaaaagaagtattacgacaccaagattgaggacaaggcacttattctggtggatagtttacgaaaaaatcgagttgcgcaccagatgttcacacagaccttattgaatatggaccaaaagataacctccgtgaagcaccttagtaataaaaaagagagaggcccacaaacgcctggctcacatcatatgcaatacaaggtctag

SEQ ID NO: 23305 - DNA, 1344 bp, synthetic construct
  misc_feature 1..1344: note = Description of Artificial Sequence: Synthetic coding sequence
  source 1..1344: mol_type = other DNA
atggccgccgtgccccgggtggagggcgtgttcatcttcctgatcgaagattctggtaaaaagaagcggaggaagaatttcgaggccatgtttaagggaatcctgcagtctgggctggacaacttcgtgattaaccacatgctgaaaaacaatgtggccgggcagacctctatacagacgctggtccctaacacagaccagaaatcgaccagtgttaaaaaagacaaccataaaaaaaaaaccgtcaaaatgctcgagtatttgggcaaggatgtccttcatggtgtattcaactatctcgccaagcatgacgttctcactctcaaagaagaagaaaaaaaaaagtattacgataccaagattgaggataaggcactgatattggttgactcactacgaaaaaatcgtgttgcccatcaaatgtttacacagacccttttgaacatggaccaaaagattaccagtgtgaaacctttactccagatagaagccgggccccccgagagtgctgaatcaaccaatattctgaaattatgtcctcgtgaggaatttctccggctgtgtaagaaaaaccatgacgaaatctaccccattaagaagcgggaggaccggagaaggctggcgcttatcatctgtaacaccaaattcgaccacctccctgcaagaaatggcgcccactatgatatcgtggggatgaaacgccttttacaggggttggggtacactgttgtggatgagaaaaaccttacggcccgcgacatggagagcgtccttagggcgtttgccgctcgacctgagcataagtccagtgactctaccttcctagtcctaatgtcccacgggatccttgaaggtatctgtggtaccgcccacaagaagaagaagcctgatgttctgctgtatgacacaatctttcaaatcttcaataatcgcaactgcctgagcttaaaggacaaaccgaaagtcattatcgtgcaggcctgtaggggagaaaagcacggcgagctctgggtgagggattccccagcttctctagccttgattagttcacagtccagcgagaatctcgaggctgattccgtctgcaagattcatgaagaaaaggacttcattgctttttgtagcagtaccccgcacaacgtgagctggcgggaccgtacaagagggagcatcttcataaccgagctcatcacctgctttcagaagtactcctgttgttgccacctgatggaaattttccgcaaagttcagaaatcttttgaggtacctcaagctaaagcacagatgccgactatcgaacgggccactttaacaagggatttctacctgttcccaggaaactag

SEQ ID NO: 23306 - DNA, 879 bp, synthetic construct
  misc_feature 1..879: note = Description of Artificial Sequence: Synthetic coding sequence
  source 1..879: mol_type = other DNA
atggccgccctgctgcagatcgaggccggcccccccgagagcgccgagagtacaaatatcctgaagctctgtccacgcgaggagttcttaagactgtgcaaaaagaatcacgacgagatctaccccattaagaagcgggaggatagacgacggctggcgttgattatttgcaataccaagtttgaccacctgccagcccgcaacggcgcccactacgatatcgtgggaatgaagaggctgctgcagggcttaggttacactgtggtcgacgaaaaaaatctgactgctcgcgatatggaaagcgttctgcgagccttcgccgcaagaccagaacacaagagtagtgactccaccttcttggtcctaatgtcccatggaatcttagagggaatatgcggcaccgctcacaaaaagaagaagccagacgtgttattgtatgatactatttttcaaattttcaataaccgaaattgcctgagcttgaaagataagccgaaagttatcatcgtgcaggcatgtcgtggcgagaagcacggagaactctgggtcagggactcccctgcttccctcgcactcatttcaagccagagttccgagaaccttgaggccgattccgtgtgtaagatccatgaagaaaaagattttattgctttctgcagtagcacaccccacaacgtgagctggcgcgaccggacaaggggttcgatattcataacagagttaatcacttgcttccagaagtattcctgctgttgccacctcatggaaatctttcgaaaggttcaaaaaagttttgaggtgccccaagccaaagctcaaatgcccacaattgaaagagccacactgactcgcgacttctacctgttcccaggtaactag

SEQ ID NO: 23307 - DNA, 1131 bp, synthetic construct
  misc_feature 1..1131: note = Description of Artificial Sequence: Synthetic coding sequence
  source 1..1131: mol_type = other DNA
atggccgaggacaaccacaagaagaagaccgtgaagatgctggagtacctgggaaaggatgtgctgcacggcgtatttaactatctggccaaacacgatgtgctcacccttaaggaagaggaaaaaaagaagtactacgacaccaaaatagaggataaggcactgattctggttgatagcctccgcaagaacagagttgcacatcagatgttcacccagacccttttaaacatggaccagaagattacatccgtcaagcccctgctccaaatagaagccgggcctcccgagtcagcagaaagcaccaacatattaaaactgtgccctagagaggagttccttagactgtgcaagaaaaatcacgacgagatttacccaatcaaaaagagggaagaccggcgccgactggccctgatcatttgcaacaccaaatttgaccacctgcctgcccggaacggggctcactacgatattgtgggcatgaagagactgcttcagggcctcggctacaccgtggttgacgagaagaacttgacagcgagggatatggaaagcgtactgcgggcattcgccgctcgaccagagcataagtcatccgattcaaccttcctggtcctgatgagtcacgggattttggagggcatctgcgggactgcacacaagaagaagaagcccgatgttttactctatgacactatctttcaaatatttaataataggaactgcctgtccttaaaggataagcccaaagtgattattgtgcaggcatgccgcggagagaagcacggcgagctctgggtgcgagattcacccgctagcctggcgctgattagctcccagagctctgagaatctggaagctgactccgtttgtaagattcacgaagagaaggattttattgccttctgtagcagcacaccacataacgtgtcctggcgggatagaacacgaggctccatctttatcaccgaactcatcacttgttttcagaaatattcttgttgttgccatcttatggaaatttttcgcaaggtacagaagtcttttgaggtgccccaagcgaaagcacagatgccaactatcgagcgcgccactcttacaagagacttctatctgtttcccggaaattag

SEQ ID NO: 23308 - DNA, 1344 bp, synthetic construct
  misc_feature 1..1344: note = Description of Artificial Sequence: Synthetic coding sequence
  source 1..1344: mol_type = other DNA
atggccgccgtgccccgggtggagggcgtgttcatcttcctgatcgaagattccggaaaaaagaaacgacgcaagaatttcgaagccatgtttaagggtattctacagtcaggtctggacaattttgttattaatcacatgctgaaaaacaatgtcgctggccaaacatcaattcagaccctcgtccctaacacagatcaaaagtccacgtccgtgaagaaggacaaccataagaagaaaactgtgaagatgctggagtatctcggtaaagacgtgctgcacggcgtcttcaattatcttgctaagcatgatgttctgaccctgaaagaggaagaaaaaaaaaagtattacgatactaaaatcgaggataaagctctgatattagttgatagcctacggaagaaccgggtagcccatcagatgtttacgcaaaccctccttaacatggatcaaaaaataacatcagttaaacctctcctgcagattgaagccggaccaccagagagcgctgagtctacaaacattctgaagttatgtccaagagaggaattcctgaggctctgcaagaagaaccacgacgaaatctatcccattaagaagcgcgaagataggcggcgactggccctgattatctgtaataccaaatttgaccatttgcctgcgaggaacggagctcactatgacatcgtaggcatgaaaaggctgctacagggcctcggctacacagtcgtcgacgaaaagaacctgaccgcccgagatatggaaagcgtgctgagagcctttgccgcccggcctgaacataagtcaagcgactcgacctttttggtgctgatgagtcacgggatcctagaaggcatttgcgggactgctcacaaaaaaaagaaacccgatgtattgctgtacgacactatctttcaaatctttaacaacaggaattgcctgtctctgaaggataaaccgaaggtgattattgtgcaggcctgcaggggagagaaacacggcgaactgtgggttagagattcccccgcttcccttgctctgatttcctctcagtctagcgaaaatctggaagcagatagcgtgtgcaaaattcacgaagagaaagacttcatagccttctgttcgtccacccctcataatgtttcctggcgggatagaacacgaggatcaatctttatcaccgaactcattacttgctttcagaaatatagctgttgctgccacctcatggagattttccggaaagtgcaaaaatcctttgaggttccacaggctaaagcccagatgcccactatcgagagagcaaccctgactcgtgatttctaccttttcccaggtaactag

SEQ ID NO: 23309 - DNA, 879 bp, synthetic construct
  misc_feature 1..879: note = Description of Artificial Sequence: Synthetic coding sequence
  source 1..879: mol_type = other DNA
atggccgccctgctgcagatcgaggccggcccccccgagagcgccgaatctaccaatatcctgaaattgtgcccaagggaagaattcctcagactttgtaagaagaaccacgacgaaatctatccaattaagaagcgagaggataggcggcggctggcacttatcatctgcaacacaaaatttgaccacctgccagcccgcaatggcgcccattatgatatcgtcggaatgaagcggctgctgcagggattgggatacacagtcgtcgatgagaaaaatctcaccgcaagggacatggaatccgttctgagggcgtttgctgccaggcctgaacacaaaagttctgactctacgtttctggtgctgatgagccatgggatattggaggggatttgcggaactgcccacaagaagaaaaagcctgatgtgctgctttatgacacaatatttcaaatcttcaacaaccgaaactgcctgtccttgaaggacaagccgaaggttataatcgtgcaggcttgtcgcggtgagaaacacggagaactgtgggtgagagattcacctgctagccttgccctgatatccagtcagtcaagcgaaaatcttgaagccgacagcgtgtgtaaaattcacgaggagaaggactttattgcattttgctcctctacacctcataacgtgtcctggcgagacaggactcgaggtagtatctttataactgagctgatcacatgtttccagaaatattcgtgttgctgtcacctgatggagatatttcgtaaggttcagaagtccttcgaggtgccccaagcaaaagcacagatgccgacgattgagagggctacactgactcgcgacttttatctgtttccaggtaattag

SEQ ID NO: 23310 - DNA, 882 bp, synthetic construct
  misc_feature 1..882: note = Description of Artificial Sequence: Synthetic coding sequence
  source 1..882: mol_type = other DNA
atgagcagcgccagcggcctgcggcggggccaccccgccggcggcgaagagaacatgacggagacagacgctttctacaaacgtgaaatgttcgaccccgccgaaaagtacaagatggatcatcgacggcgcgggatcgccctgattttcaaccacgagcgcttcttttggcatcttaccctgcctgagcgacgaggaacttgtgctgaccgggacaacctcacgaggcgctttagcgacctcggcttcgaggtgaaatgctttaacgatctgaaagccgaggaactccttttgaaaatccatgaggtcagtactgtgagccatgcagacgcggattgttttgtgtgtgtgttcctgtcccacggggagggaaatcatatttacgcctacgatgcaaaaatcgagatccagacccttaccggcctgtttaagggggacaagtgccacagtttggttggaaaacctaagatattcatcatccaggcttgtcgtgggaatcagcatgacgtgccggtcattcctctcgacgtggtcgataatcagacggaaaaactcgacacgaacataaccgaggtggacgcagcctccgtgtatactctgcccgccggcgctgatttcctgatgtgctacagtgtggctgaaggctattactcacaccgagaaactgtgaatggcagttggtacattcaggacctctgcgaaatgctcggcaaatatggttcatctttagagttcacggagcttctgactctggttaacagaaaggtgagtcagcgccgtgtggatttctgtaaggacccaagtgctatcgggaagaagcaggttccatgttttgcatctatgctgaccaagaagctgcattttttcccaaagagcaactag

SEQ ID NO: 23311 - DNA, 615 bp, synthetic construct
  misc_feature 1..615: note = Description of Artificial Sequence: Synthetic coding sequence
  source 1..615: mol_type = other DNA
atgagcagcgccagcggcctgcggcggggccaccccgccgtgagcacagtgtctcacgcagatgcggactgcttcgtttgtgtgtttctgtcccatggcgagggcaaccacatctatgcctatgacgctaaaatcgaaattcagacattgacaggacttttcaagggagacaagtgccacagcttggtcggaaagcccaagatttttattattcaagcatgcagagggaatcaacatgatgtgcccgtgattcccctagatgtcgtggataaccagaccgaaaagctagacacgaatatcaccgaagtcgatgctgccagtgtgtatactctgcccgccggggccgactttctgatgtgctactctgttgcagaggggtactactctcaccgtgagacagtgaacggcagctggtacatccaagacctctgtgaaatgctggggaagtacgggtctagtttagaatttaccgaactgctgaccctcgtcaatagaaaggtttcccagcgcagggtggacttctgtaaagacccttccgccatcggaaaaaaacaggtgccctgctttgctagtatgctgactaaaaagctgcactttttccccaaaagcaattag

SEQ ID NO: 23312 - DNA, 912 bp, synthetic construct
  misc_feature 1..912: note = Description of Artificial Sequence: Synthetic coding sequence
  source 1..912: mol_type = other DNA
atggccgacgaccagggctgcatcgaggagcagggcgtggaggactctgctaatgaggactctgttgacgccaagcctgatagatccagtttcgtcccatctctgttctctaagaagaagaaaaacgttaccatgcgaagtatcaagaccacacgagatagagtgcccacgtatcagtacaatatgaatttcgagaaactcgggaagtgcattattattaacaataagaattttgacaaagtgactgggatgggcgttcgaaacggtacagacaaagatgccgaggccctgttcaagtgttttcgcagcttgggatttgacgtcattgtttacaatgactgcagctgcgccaaaatgcaagacctactgaagaaggctagtgaagaagatcacactaatgccgcctgctttgcctgtatcctccttagtcatggcgaggaaaatgtgatctatggtaaagacggtgtgacacccatcaaagaccttactgcccacttcagaggcgatagatgcaaaactctgctggagaaacccaagcttttctttattcaggcctgcagagggaccgaactggatgatggaattcaagctgatagtggccctattaatgacaccgacgctaatcctaggtacaagattccggttgaggctgactttctgtttgcgtacagcactgtgcccggatactattcatggcggtcgcctggtcggggaagctggtttgttcaggcactgtgtagcatactggaagaacacggcaaagaccttgagattatgcagatccttacgagagttaacgaccgagttgcgcgtcactttgagtcccaatccgacgacccgcactttcacgaaaaaaaacagattccctgtgttgtaagtatgctcacaaaggagctctacttctcccaatag

SEQ ID NO: 23313 - DNA, 912 bp, synthetic construct
  misc_feature 1..912: note = Description of Artificial Sequence: Synthetic coding sequence
  source 1..912: mol_type = other DNA
atggccgacgaccagggctgcatcgaggagcagggcgtggaggactctgctaatgaggacagtgtggatgcaaaaccagacagaagctctttcgttccaagccttttctccaaaaagaagaaaaacgttactatgagaagcatcaagacgacccgtgacagagtgcctacttaccaatacaatatgaactttgagaaactcggcaaatgcatcatcattaacaacaaaaattttgataaggtgaccgggatgggcgtgcgcaacggcacagataaagatgcagaggccctgtttaagtgcttcagatctttaggatttgacgtgatagtgtacaacgattgctcttgtgcaaaaatgcaggatctcctcaaaaaagcctctgaggaagaccacaccaacgctgcctgcttcgcttgcatacttctgagccacggtgaggagaatgttatctatggcaaagacggggtgacccctataaaagacttgacagctcacttcaggggcgataggtgcaaaactcttttagagaagcccaaattgttctttatacaggcttgcaggggcacggaactagacgatgggatccaggcggatagcggccccattaatgacacagatgcaaacccccggtataaaattcctgtggaggcggacttcctctttgcttattctaccgttcccggatactatagttggcgaagcccaggcagaggctcctggttcgtccaagcactatgttcaatcctggaagaacacgggaaggatttggaaatcatgcagatcctaaccagagtgaacgatcgggtggcccgccacttcgaatcccaaagcgacgatccccactttcacgagaaaaagcagatcccctgcgtggtcagtatgctgacaaaagaactttatttctctcagtag

SEQ ID NO: 23314 - DNA, 663 bp, synthetic construct
  misc_feature 1..663: note = Description of Artificial Sequence: Synthetic coding sequence
  source 1..663: mol_type = other DNA
atggccgacgaccagggctgcatcgaggagcagggcgtggaggactcagcaaacgaggattccgtggacgcaaagcccgacagatcaagcttcgtcccctccttgttttctaaaaaaaagaagaatgttacgatgcgttctattaaaacaacacgagatcgcgtgccaacgtaccaatacaatatgaattttgagaagctgggcaagtgtatcatcataaacaacaagaatttcgacaaagtcacaggtatgggcgtgagaaatggcactgataaggatgccgaggccctgtttaaatgctttcgctcgctggggttcgacgtgatcgtttataatgactgttcagtgacgcaggcaggcgtgcaacgtagagatttgggcaggcttcagccacctcctccaaggttcaagcagtacagttgcctgagtctccttagctcctgggattatcggcacgccccccccagactggcaaatttttgcatatttcgcagagaagggttccgccacgttgggcaggcgggattgaaactgctggcgagttcggatcctccgaccagcggtagtcagtctgcgggaatcacaggtgtgtcacttcacacccaaccgcagattatgaaggttagccttcggcattgcaacacttttatctgctttgcttag

SEQ ID NO: 23315 - DNA, 912 bp, synthetic construct
  misc_feature 1..912: note = Description of Artificial Sequence: Synthetic coding sequence
  source 1..912: mol_type = other DNA
atggccgacgaccagggctgcatcgaggagcagggcgtggaggactccgctaatgaggattcggtggatgcgaaacctgatcggtccagctttgttccgtccttgttttcaaagaagaagaaaaacgtgacgatgcggtctattaagacaaccagggacagagtaccaacataccagtataatatgaacttcgagaagcttggcaagtgcatcatcatcaacaataaaaatttcgacaaagtaacgggaatgggtgtgcggaacggcactgataaggatgccgaagccctgttcaagtgttttagatcattgggcttcgatgtgatcgtatacaacgactgcagctgcgctaaaatgcaggacttgctcaagaaggcgtctgaggaagatcatacaaatgctgcctgtttcgcgtgcattttactgagccatggcgaggagaatgtgatttatgggaaagacggtgtaaccccaatcaaggacctgaccgctcatttccgaggggatagatgcaagaccctgctcgaaaaacctaaactgttcttcattcaggcatgtcgcgggacagaattggacgacggaatacaagctgacagcgggcccatcaacgacaccgacgccaatccaagatataaaatccctgttgaggcagatttcctgttcgcatattcaacggtacctggatactacagctggcggagcccgggtcgcggctcgtggttcgtgcaggctctgtgctcaattctagaagagcatggtaaagatctggagattatgcagattttaactcgggtaaacgatcgagttgcccgccatttcgagtcacaatctgatgacccacatttccatgaaaagaagcagatcccatgtgtggtgagcatgctgactaaagagctgtacttctcccaatag

SEQ ID NO: 23316 - DNA, 663 bp, synthetic construct
  misc_feature 1..663: note = Description of Artificial Sequence: Synthetic coding sequence
  source 1..663: mol_type = other DNA
atggccgacgaccagggctgcatcgaggagcagggcgtggaggactccgccaatgaagacagtgtggatgcaaaacccgacaggtcgtcattcgttcccagtctcttctccaagaagaagaaaaatgtgaccatgaggtcgattaaaactacccgggatagagttcctacatatcagtacaatatgaatttcgaaaagctgggcaagtgcatcatcatcaataataaaaacttcgataaggtgacaggcatgggagttcgcaacggaacggataaggacgcagaggccctctttaagtgctttagatccctgggattcgacgtgatcgtgtataacgattgcagtttcactcaagctggggttcagcggagggatctgggtcgcttgcaacctccccccccgcgttttaagcaatactcttgcctgtccttgctctccagctgggattataggcatgcgccaccacggctggccaacttctgtatcttccgtagagaggggttccggcacgtgggacaggccgggctcaaattgcttgcctcgtcagaccctccgacgagtggcagccagagtgcaggcatcacaggggtgagcctgcatacccagccccagattatgaaggtctccctgcgccactgcaacaccttcatctgctttgcctag

SEQ ID NO: 23317 - DNA, 1011 bp, synthetic construct
  misc_feature 1..1011: note = Description of Artificial Sequence: Synthetic coding sequence
  source 1..1011: mol_type = other DNA
atggactgcgtgggctggccccccggccggaagtggcacctggagaagaacaccagctgcgggggctcttctgggatatgcgccagctacgttacccagatggctgacgatcagggatgcattgaagaacagggagtggaagactctgccaacgaggatagtgtggacgcgaaacccgaccgaagttccttcgtaccatcactcttcagcaaaaagaaaaaaaatgtgacaatgaggtctatcaagaccactcgtgacagagtgccgacataccagtacaacatgaatttcgagaaactcggcaagtgcatcataattaataacaagaattttgacaaagtcactggaatgggcgtgagaaacgggaccgacaaggatgcagaggccctgttcaaatgctttcgcagcctgggctttgacgtcatagtgtataacgattgctcatgcgctaaaatgcaggacttattgaagaaagcatccgaggaggatcacaccaacgccgcttgcttcgcatgcatccttctgtctcacggcgaggaaaacgtgatttatgggaaagacggagtcacccccatcaaggacctcaccgctcactttcgaggcgacagatgcaaaaccctgctcgagaagcccaagctcttttttattcaggcctgccgggggaccgagctggacgacgggatacaggccgacagcggtccgattaacgataccgacgccaacccacggtataaaattcccgttgaggctgactttttgtttgcttattccaccgtgccaggatattatagctggcggagccccggacgaggaagctggtttgtgcaggccctatgctctatcttggaggaacacgggaaagacctggaaatcatgcagatcctcacaagggtgaatgaccgcgtagcacggcacttcgagtctcagagtgacgacccccactttcacgagaaaaaacaaatcccatgcgttgtgagtatgctgacaaaggagctttatttctctcagtag

SEQ ID NO: 23318 - DNA, 762 bp, synthetic construct
  misc_feature 1..762: note = Description of Artificial Sequence: Synthetic coding sequence
  source 1..762: mol_type = other DNA
atggccgacgaccagggctgcatcgaggagcagggcgtggaggacagcgctaacgaagactctgtggacgctaaacccgatagaagctcatttgtgccaagcttgttctccaagaagaaaaagaatgtcacaatgagatctatcaagaccacccgcgaccgcgtaccaacgtatcagtacaacatgaatttcgaaaaactaggcaagtgtatcatcatcaataacaaaaactttgataaagtgacaggcatgggcgtaagaaatggtactgataaggacgcggaagcccttttcaaatgcttccgcagcttaggatttgacgtgatagtatacaatgattgtagctgtgccaagatgcaggacctgctgaagaaagctagtgaagaggaccacacaaatgcagcttgcttcgcctgcattcttctatcgcatggagaagagaacatggaatcttgtagcgttactcaagccggcgtgcagaggcgggacctaggccggctgcagccaccccctccccggctagccgaaggtccgagtctcatgatggcatcacggcctaccaggggaccgtcaatgactcagatgttaatattggatacccgctctcagtggaaactgacaagctccagccctattcctcggttccaagctataacccggggtggtgcccaggaagaagcgcctggcctatgcaaacccagcgccccatcctggcggtcaaccgagaagacatggaaatcttgccgctcgtcaccagggtag

SEQ ID NO: 23319 - DNA, 669 bp, synthetic construct
  misc_feature 1..669: note = Description of Artificial Sequence: Synthetic coding sequence
  source 1..669: mol_type = other DNA
atggccgacgaccagggctgcatcgaggagcagggcgtggaggacagcgccaatgaagattcggtcgacgccaaaccggacagaagctcattcgtgccatctctgttttccaaaaagaaaaaaaacgttacaatgcgctcgattaagaccacgagagacagagtccccacttaccagtacaacatgaattttgagaaactgggcaaatgcattatcataaataacaagaactttgataaagttacaggaatgggggtgcgcaatgggaccgataaggatgctgaagccctgtttaagtgtttccgatctttaggatttgatgttatcgtttataacgactgctcttgtgccaaaatgcaggatctcctcaagaaagcatccgaagaagaccacaccaatgccgcatgcttcgcatgcattctgctgtcacatggcgaggaaaatgtgatttacggtaaagacggcgttacaccaattaaagacctgaccgctcattttagaggggaccgttgcaaaacattgctagagaagccaaagctgttctttatccaggcctgccgtggaacggagctcgacgacgggatccaggcggactcaggccccataaatgacacggacgctaatcctagatataaaatacctgtcgaagctgatttcctctttgcatag

SEQ ID NO: 23320 - DNA, 795 bp, synthetic construct
  misc_feature 1..795: note = Description of Artificial Sequence: Synthetic coding sequence
  source 1..795: mol_type = other DNA
atggccgacgaccagggctgcatcgaggagcagggcgtggaggacagtgcaaatgaggattcggtagacgcaaagcctgaccgctccagcttcgtgccgtccctgtttagcaagaagaagaagaacgtgacaatgcgctctattaagacaaccagagacagggttcctacttatcagtacaacatgaactttgagaagctggggaaatgtataatcattaacaacaaaaatttcgacaaggtgacgggaatgggggtgagaaacggcaccgataaggacgcagaggctctcttcaaatgctttaggtcactcgggttcgacgtcatcgtatacaacgactgcagttgcgctaagatgcaggacctgctgaaaaaggctagcgaggaggaccatacgaatgccgcttgcttcgcctgcatcctgttttttatccaggcgtgtaggggaacagagttggatgacggtatccaggctgacagtggacccatcaatgacacagacgcaaaccctcggtacaagattcccgtggaggcggacttcctgtttgcgtacagcaccgtccctggctattactcttggcgcagtccgggtaggggctcgtggttcgtgcaggcactctgttcaattctggaagagcacggtaaggatcttgagattatgcagatacttacgcgggttaacgatagagtcgcccggcatttcgagtcccaatctgacgatccacacttccatgagaaaaaacagattccttgcgtagtgtcaatgttgaccaaagaactctatttttcccagtag

SEQ ID NO: 23321 - DNA, 837 bp, synthetic construct
  misc_feature 1..837: note = Description of Artificial Sequence: Synthetic coding sequence
  source 1..837: mol_type = other DNA
atgcagcggggcctgttcagcgacggcgacaccagcaagaagaagaaaaacgtaacaatgcgatccatcaaaacaacccgggatagggtgcccacgtaccagtacaatatgaactttgagaagctgggcaagtgtataatcatcaacaacaaaaattttgacaaggtaaccggaatgggcgtgcgaaacggcaccgacaaagatgctgaggctcttttcaagtgctttaggagtttggggtttgacgtgatagtctacaatgattgttcttgtgcaaagatgcaggaccttctgaaaaaggccagcgaggaagaccacacaaacgccgcctgttttgcttgtatcttgttgtcccacggcgaggaaaacgtgatatacgggaaggacggcgtgactccgattaaggatttaaccgcccacttcagaggagatcgttgtaagacactgctcgagaagcccaaactgttcttcatccaagcgtgtagagggaccgagcttgacgatggcattcaggctgactctggacctatcaatgataccgatgcaaacccccggtataaaatcccggtggaggcagatttcctgttcgcatacagcacggtgccaggctactactcttggcgctcaccggggcggggcagctggtttgtgcaggccctctgttctatattggaagagcacggtaaggacttagaaatcatgcagattctgactagagtcaatgaccgtgtggcaaggcacttcgaatcccagtcagatgatcctcacttccacgagaaaaaacagattccctgcgtagtgtctatgctaactaaagagctatatttctcccagtag

SEQ ID NO: 23322 - DNA, 1188 bp, synthetic construct
  misc_feature 1..1188: note = Description of Artificial Sequence: Synthetic coding sequence
  source 1..1188: mol_type = other DNA
atggacttcagccggaacctgtacgacatcggcgagcagctggacagcgaggatctggcgagcctgaagtttctgtcccttgactatattccccagcggaagcaggagcctatcaaagacgcactgatgctctttcagcgtttacaggaaaaaagaatgttggaggaaagtaacctatcctttctgaaggagctgctgttcagaataaatagactggacctcctcattacatatttgaacactcgaaaggaggagatggaaagggagctgcaaactccggggcgcgcacaaataagcgcctatagagtaatgctgtatcagatctccgaggaagtctccaggtcagagctgcgatccttcaagttcctcctgcaagaagagattagtaagtgcaagttagatgatgatatgaacttgctcgatattttcattgaaatggaaaaacgggttattctaggtgaaggaaaactggacattctcaagcgggtctgcgctcagattaataaaagtcttctcaaaatcatcaatgattatgaagaattctccaagggggcccttactaccacctttgaggaactgcacttcgagattaagcctcacgacgactgcacggttgaacagatttacgagatactcaagatttaccaactgatggatcactctaatatggactgtttcatatgttgcatcttatcgcatggagacaaaggtatcatatacggcacagacgggcaggaggcccccatctacgagcttaccagccagttcaccggactaaaatgcccaagcctcgccggaaaaccaaaggtgttcttcattcaggcatgtcaaggcgataattatcaaaaaggaatcccagtggagacagactcagaggagcagccttacctggaaatggatttgagtagtcctcagacgaggtacattcctgacgaggccgactttctactgggcatggctaccgtgaacaattgtgtttcctaccgcaacccagccgaggggacttggtacattcaaagcttgtgccagtctctgcgcgaaaggtgtccacggggagatgatatcttgactatattaaccgaggtgaactatgaggtttctaacaaggacgacaaaaagaatatggggaaacagatgccacagcctacgtttactttgcggaaaaagctcgtgttccccagcgactag

SEQ ID NO: 23323 - DNA, 1491 bp, synthetic construct
  misc_feature 1..1491: note = Description of Artificial Sequence: Synthetic coding sequence
  source 1..1491: mol_type = other DNA
atggacttcagccggaacctgtacgacatcggcgagcagctggactctgaagacctggccagcttgaagtttctttctttggactacattcctcagcggaagcaggagcccatcaaagatgctctaatgctgttccagcggctccaggagaaacgcatgctcgaggaatctaacctttctttcctgaaagagctcctatttagaatcaataggctggacctgttgattacctatctgaataccagaaaagaggaaatggagcgggaactacagacaccaggcagagcgcagatctccgcttatcggttccacttttgtaggatgagctgggccgaagctaactcccaatgtcaaacccagtccgtacccttttggaggcgggtcgaccacctactgattcgagtcatgctgtatcagatcagcgaggaggtcagtcgcagcgagttacgctcctttaaattcctgctgcaagaggaaatcagtaaatgcaaactggacgacgatatgaatttactggatatattcattgaaatggagaaacgagtaatactgggagaggggaagctcgatatcctcaaaagagtttgtgcacagatcaataagagcttgctcaagatcatcaatgactacgaagagttctctaagggtgaagaactgtgcggcgttatgaccatctccgactcacctcgggaacaggacagcgagtcccagacacttgacaaggtttaccagatgaaaagcaaaccgcgcgggtactgccttatcattaataatcacaattttgcgaaggctcgcgagaaggtgcctaagcttcatagcatccgggatagaaatggaacacacctcgacgccggcgccctgactacgaccttcgaggagttgcatttcgaaatcaaaccacatgatgattgcacagtcgaacagatctacgagatccttaagatatatcaacttatggaccattctaatatggattgctttatctgttgcatcctgtcccatggtgataaaggtatcatatatggtacagatggtcaggaagcccctatttacgagctgacttcacaattcaccggactgaagtgccccagtctggcaggcaaacccaaagtgttttttatacaggcatgccaaggcgacaactatcagaaagggatcccggtcgaaaccgactcagaagaacaaccttacttggagatggatctcagctctcctcaaaccagatatatcccagacgaggccgattttctgttgggcatggctaccgttaataactgcgtgtcttaccggaatcccgccgaggggacatggtacatccagagcctgtgccagtcgctgcgagagcgttgccccagaggtgatgatatactgacaatcttaaccgaggtgaattacgaagtctcgaataaagatgacaagaagaatatggggaagcagatgcctcagcccacttttacactgaggaaaaaactggtgtttccctcagattag

SEQ ID NO: 23324 - DNA, 1395 bp, synthetic construct
  misc_feature 1..1395: note = Description of Artificial Sequence: Synthetic coding sequence
  source 1..1395: mol_type = other DNA
atggacttcagccggaacctgtacgacatcggcgagcagctggacagtgaagacctagcatctctgaagtttctgtcattggattacattccccagaggaagcaggaacccatcaaggatgcgctgatgcttttccaacggcttcaggaaaaaaggatgctcgaagaatcaaacctgtcttttctgaaggaactcttatttcgtattaatcgactggacttgttgattacatatctcaacacccgaaaggaagaaatggaaagagaactccagacccccggtcgggctcagatcagtgcatatcgggtaatgctataccagattagcgaagaagtgtctcggagtgagctccgaagcttcaagttcctgctgcaggaagagatctccaaatgcaaactggacgatgacatgaatcttctggatatcttcattgagatggaaaagagggtcatcctgggcgaaggaaagctggacatcctgaagcgggtgtgtgcccagatcaacaagtcattgcttaaaataatcaacgattatgaagagttctctaagggagaggagctttgtggtgtgatgaccatcagcgacagcccccgtgagcaggatagcgaaagtcagaccttagataaagtttaccaaatgaaaagtaagcctcgtggctattgtctgataatcaacaatcataattttgcaaaggctagggaaaaagtccctaagttacactcaatccgggatcgaaatgggacccacctggacgctggagctctgacaacaacttttgaagagctccactttgaaataaaacctcacgacgactgcaccgtcgaacaaatatatgaaattcttaagatctaccagctcatggatcactccaatatggactgtttcatttgttgtatccttagtcatggggataagggcataatctacggcacagatgggcaggaagcaccaatctacgagttgacttctcagttcacaggcctgaagtgtcccagtctggccggcaagccgaaagtttttttcatccaggcatgtcagggggacaattatcagaagggcatccccgtcgagaccgactctgaagagcagccgtacttggaaatggatctgtccagcccacagacccggtacattcccgacgaggccgattttctgctgggcatggctacagtgaataactgcgtcagctatcgaaatccagctgagggtacttggtacatccagtccctatgtcaatctctgcgagagaggtgccctcgtggggacgatatcttaaccatcctcaccgaagtgaattatgaggtgtctaacaaggatgacaaaaagaatatggggaaacagatgccacagcctacgttcactttgcggaagaaattggtgtttcctagcgattag

SEQ ID NO: 23325 - DNA, 1617 bp, synthetic construct
  misc_feature 1..1617: note = Description of Artificial Sequence: Synthetic coding sequence
  source 1..1617: mol_type = other DNA
atggagggcggccggcgggcccgggtggtgatcgagagcaagcggaatttctttctcggtgcctttcccaccccctttccagccgagcacgtcgagctgggaagattaggtgattcggagacagctatggttcccgggaagggaggagctgactatattttgctgccattcaagaaaatggactttagccgtaatctctacgacatcggggaacagctcgattctgaggatctcgcttccctgaagtttctgtccttagattatatcccgcagagaaaacaagagccaattaaggatgccctgatgctgtttcagcgcctccaagagaagagaatgctggaggaatccaatctgtccttcctgaaggagttattgttcaggatcaacaggctagatctgttgataacttatcttaatacaaggaaggaagaaatggaaagagagctgcagaccccgggccgtgcccagattagtgcctatagagtgatgctgtatcagatctccgaagaagtatcgcgctccgaactcaggagctttaagttcctgctgcaggaggaaatctccaaatgcaagttagacgacgatatgaacctgttggacatcttcatcgaaatggagaagcgcgtgatactcggagagggaaaactcgatatcctgaaaagagtgtgcgcacagatcaacaaatctcttcttaagattataaacgactacgaagaattctctaaggagagaagctccagcctggaagggtcgcctgatgaattctctaacggggaagagctttgcggggtcatgacaatttctgactcaccgagggaacaggattccgagtcacagacactggacaaggtgtaccagatgaagtctaagccccggggctattgcttgatcatcaataaccataatttcgcaaaagcacgagaaaaggtacccaagttgcacagcatccgcgaccggaatggaacacacttagacgctggcgctctgaccaccaccttcgaggaacttcactttgagatcaagcctcatgacgactgtacagtcgaacagatttacgaaattctaaagatttaccagttgatggatcactccaacatggattgtttcatatgctgtatcctctcccatggggacaaagggatcatctacgggactgatgggcaggaagcacccatatatgagctgacgtctcagttcacaggcttgaagtgtccaagtcttgccggaaaacctaaggtatttttcattcaggcctgccagggcgacaactaccagaagggcatccccgtggagactgattctgaagagcaaccgtacctggaaatggatctgtccagcccgcagacccggtatatcccagacgaagccgacttcctcctgggcatggcgacggtgaacaattgtgtttcatacagaaaccctgccgagggaacctggtacattcaatcactgtgtcaaagcctgagagagagatgccctaggggcgacgacattctcacaattctgaccgaggttaactatgaggtctccaataaagacgataagaaaaatatgggaaagcagatgccacaaccaaccttcaccctgaggaagaagctagtattcccaagcgactag

SEQ ID NO: 23326 - DNA, 708 bp, synthetic construct
  misc_feature 1..708: note = Description of Artificial Sequence: Synthetic coding sequence
  source 1..708: mol_type = other DNA
atggacttcagccggaacctgtacgacatcggcgagcagctggacagtgaagacctggcttcgctgaaatttctgagcctcgattacataccccaaaggaaacaagagccaattaaggacgccctcatgttattccagcgccttcaggaaaaacgcatgctggaagaatctaaccttagttttctgaaagaactgctgtttcgtattaatcggctcgatctgctcatcacgtacttgaacactagaaaggaagaaatggaacgagagctccaaacgccaggacgcgctcaaatctccgcttacagagtcatgctgtatcagatctcagaagaggtgagcagatcagagcttcggagctttaaatttctgctgcaggaggagatctcgaagtgcaagcttgacgacgatatgaacctcctggacattttcatcgagatggagaaacgcgtaatactcggcgaggggaagcttgatatcctgaagcgagtctgcgcccagataaacaaaagcttgttgaagatcatcaacgactatgaggagttttctaaagaaagatcgagctctctcgagggaagtcctgatgagttctccaacgactttggacaatccctcccaaatgaaaagcagacatccgggatcctctcggatcaccaacagtcacagttttgtaaatctaccggggagagcgcccagacgtcacagcactag

SEQ ID NO: 23327 - DNA, 708 bp, synthetic construct
  misc_feature 1..708: note = Description of Artificial Sequence: Synthetic coding sequence
  source 1..708: mol_type = other DNA
atggacttcagccggaacctgtacgacatcggcgagcagctggacagcgaggacctcgcttcactcaaattccttagtctagactacatccctcagcgaaaacaagaaccaatcaaggatgccctgatgctgtttcaacgcctgcaggaaaaacgcatgctggaggagtccaacctctcattcctgaaggaactgctctttcgcatcaatagattagacctccttataacttacctgaatacaaggaaggaggagatggaaagagaactgcagacccccggtagggctcaaatttctgcgtatcgtgtgatgctgtatcaaatttcagaagaggtctctcgcagcgaactgcgaagtttcaaattcttgctgcaggaagagataagcaagtgcaaactggatgacgatatgaacctcctggacatctttattgagatggagaagcgtgtgatcctgggcgaggggaagcttgacatcctcaagagagtgtgtgcccaaataaacaaatccctcctcaagatcatcaacgattatgaagagttttctaaggagcgatcttcttcactcgaaggttcacctgatgaattctctaatgattttggccagagcttacctaacgagaagcaaacaagtggcatcctgtccgatcaccaacagagtcaattctgcaaaagtactggtgagtcggctcagacatctcagcattag

SEQ ID NO: 23328 - DNA, 837 bp, synthetic construct
  misc_feature 1..837: note = Description of Artificial Sequence: Synthetic coding sequence
  source 1..837: mol_type = other DNA
atggacttcagccggaacctgtacgacatcggcgagcagctggactcagaggacctcgcaagtctgaagtttctctccctcgactacatccctcagcggaagcaggagcctattaaggatgcccttatgctcttccaacgtttacaggagaagcgaatgttagaagaatccaacctgtcattcctgaaggagctgctgttccggattaacagacttgatttgctgatcacatacttgaacactaggaaagaggaaatggagagggaacttcagacgcccggaagggcgcagatttccgcctaccgtgtaatgctgtaccaaatctccgaggaagtatcccgcagcgaacttcggtcctttaagtttcttctccaggaggagatttccaagtgcaagctggatgatgacatgaatctgctggacatctttattgaaatggagaaacgggtcatcctcggtgagggcaagctcgacattctgaaaagagtttgcgcgcaaatcaacaagagtctgctaaaaatcatcaatgactacgaggagttcagtaagggagaggagctgtgtggcgtgatgaccatctccgatagcccccgcgaacaggactccgagtctcaaactctggataaagtgtatcagatgaaatccaaaccacgaggatactgcttgattatcaacaaccataacttcgcgaaggctcgagaaaaggtgccgaaactgcattctatccgagaccggaacggtacccacctcgatgcagggagccactcagtggcacaagccggggtgcagtggtgtgatctgagctctctccaacctcctccaccatggttcaagtag

SEQ ID NO: 23329 - DNA, 1395 bp, synthetic construct
  misc_feature 1..1395: note = Description of Artificial Sequence: Synthetic coding sequence
  source 1..1395: mol_type = other DNA
atggacttcagccggaacctgtacgacatcggcgagcagctggactccgaggatctagccagcctgaaatttctgtctctcgattacataccacagagaaagcaggaacctatcaaggatgccctcatgctgttccagcgcttgcaggaaaaacggatgctcgaggagtccaacctctcgttccttaaagaattgctgtttcggatcaatagactggacctgctcataacatacctgaatactaggaaggaggagatggaaagagaactccagactcctggccgggcacagattagcgcttaccgtgtcatgttataccagatctcagaggaagtgtcccgatctgagctgagaagttttaagttccttctccaggaagagatcagcaagtgtaagctcgatgatgatatgaacttactcgatattttcattgaaatggagaagcgcgtcattctcggcgagggaaagctggatatccttaagcgtgtgtgtgcacagataaacaagtcgctgctgaagattatcaacgactatgaagaattctctaaaggcgaagaactctgcggagtgatgaccatctctgatagccctagagaacaggactcggagtcccagactctggataaagtgtaccagatgaagagtaagccccgtgggtattgcctcattattaacaaccacaatttcgcaaaagccagggagaaggtcccgaaactgcactcaatccgagaccgaaatggaacccacttggacgcaggagctctcacgacaacatttgaggagcttcacttcgaaattaagccacacgatgattgtactgtcgaacagatttacgagattcttaagatctaccaactcatggatcactctaatatggactgtttcatatgttgcatactgagtcatggagataaggggatcatatatggaactgacggccaggaagcacccatctacgagctgacaagccaattcacggggctcaaatgcccctctcttgcgggcaagcccaaagtgttcttcattcaggcctgccaaggagataactaccagaaggggattcctgtcgaaacagattctgaggagcagccctacctggagatggatctgtcttctccccagactcggtatatcccggatgaagcagacttcctgctgggcatggctaccgtgaacaattgtgtgtcgtatcgtaaccctgccgagggcacgtggtacatccagtctctctgccagtctctgagggaacggtgtcctcgcggtgacgatatactcaccatcttgactgaggtcaactacgaggtatcaaacaaagacgataagaagaacatgggaaagcagatgccccagcctacctttacactgcgcaaaaaacttgtgtttccttcagactag

SEQ ID NO: 23330 - DNA, 663 bp, synthetic construct
  misc_feature 1..663: note = Description of Artificial Sequence: Synthetic coding sequence
  source 1..663: mol_type = other DNA
atggacttcagccggaacctgtacgacatcggcgagcagctggacagtgaggacttagccagccttaagtttctgtctctggactatatcccgcagcggaaacaggagcccattaaagacgctctaatgctgttccagcggctccaggaaaaaaggatgctggaggagagcaatctgtcatttttgaaggaacttttgttcaggattaacagactggacttgctgatcacgtacctgaacactcgcaaggaggagatggagcgcgagttacaaactccagggcgagcccagattagcgcttatcgcgtgatgctgtatcaaataagtgaagaggtctctaggagcgagcttagaagcttcaaattcctgttgcaggaggagatatcaaagtgcaagctggacgacgacatgaatctccttgacatattcattgagatggaaaagagagtgatactaggcgaaggaaagctggacattcttaagcgcgtttgtgctcagatcaataagtcactgctgaagatcatcaatgactacgaagaattctctaaggattttggccagtccctgccaaatgaaaagcagacgagcggcattctcagtgatcaccagcaatctcaattttgcaagtccactggcgagagcgcacaaacaagccagcactag

SEQ ID NO: 23331 - DNA, 597 bp, synthetic construct
  misc_feature 1..597: note = Description of Artificial Sequence: Synthetic coding sequence
  source 1..597: mol_type = other DNA
atggacttcagccggaacctgtacgacatcggcgagcagctggactccgaggacttggcgtcactgaaatttctgagccttgactatataccacagagaaaacaggagccgatcaaggatgctcttatgctctttcagaggctccaggaaaaacgcatgctggaggaatccaatctctccttcctgaaggaactgttgttccgcattaacaggcttgacttgttaatcacctatctgaatacccgaaaggaagagatggaacgcgagttgcagactccgggacgggcacaaatatccgcttaccgggtgatgctttatcaaattagcgaggaagtctcgaggagcgaactccgctctttcaagtttctgctacaggaggaaatttccaagtgtaagcttgatgacgatatgaatctcttagatattttcatcgaaatggaaaaaagagtcatattgggggaagggaagctggacatactcaagagagtgtgcgcccaaatcaacaaatccctgttaaaaataataaacgattacgaggagttctctaaagagcggagctctagcctggaggggtccccggatgagttcagtaactag

SEQ ID NO: 23332 - DNA, 351 bp, synthetic construct
  misc_feature 1..351: note = Description of Artificial Sequence: Synthetic coding sequence
  source 1..351: mol_type = other DNA
atggacttcagccggaacctgtacgacatcggcgagcagctggactccgaagatcttgcctccctcaaattcttatcacttgattatataccacagcggaagcaagaaccaatcaaggacgctcttatgctgttccagcgcctgcaggagaagaggatgttggaggagagcaacctcagtttcctgaaagaactacttttccggatcaatcgcttggatctcctaatcacatacctaaacacaagaaaggaagagatggaacgcgagttgcagactccagggcgcgctcagattagcgcttacagggttatgctttatcagatatctgaagaggtgtcacggagcgaatag

SEQ ID NO: 23333 - DNA, 1440 bp, synthetic construct
  misc_feature 1..1440: note = Description of Artificial Sequence: Synthetic coding sequence
  source 1..1440: mol_type = other DNA
atggacttcagccggaacctgtacgacatcggcgagcagctggacagcgaagacctcgcatcactcaagttcctgtctctggactatattccgcagaggaagcaggaaccgattaaggatgccctgatgctgtttcaacgcctgcaggaaaagcgaatgttggaggaatctaacctgtccttcctgaaggaacttctgttccggattaataggttggatctgcttattacatacctgaatacgcgcaaagaggaaatggagagggagctacaaacacccggacgtgcccagatctccgcctacagagttatgctgtatcagataagtgaggaagtgtcacgttctgagttgcgaagcttcaaatttctgctacaggaagagatcagtaaatgcaagcttgacgatgacatgaacttgctggatatttttatagagatggagaaacgggtaatcttgggtgagggcaagctcgacatactgaaaagggtctgcgcccaaataaataagtccctgctgaagataatcaacgattatgaggagtttagtaaagaacggagttcctccttggagggaagccctgacgagttttctaatggggaggaactctgtggagtaatgacaataagcgactctccacgcgagcaagattcggaatcacaaactctggacaaagtgtaccagatgaagagcaagccacgaggttattgtcttataatcaataaccacaattttgccaaagcccgggagaaggtgcccaaactccactccatacgcgacaggaatggaactcatctggatgcaggcgccctaacaacgacattcgaagagctccacttcgagatcaagcctcatgacgactgcacagttgagcagatttacgaaatactgaagatttaccaattaatggaccatagcaacatggactgttttatatgctgtattttgtcgcatggcgacaagggcataatctacggtacagacggccaggaggcacctatttacgaactcacttctcaattcacaggccttaagtgtccatctctggcgggtaagccaaaagtgttttttatccaagcttgccagggcgacaattaccagaagggaattccagtcgaaaccgactccgaggagcagccttatctggagatggatctgtcttccccacaaacccgctatattccagacgaggccgacttcctccttggtatggccactgtcaataattgcgtcagctataggaatccagcagaggggacttggtatatccagagcctttgccagtctctgagggaacggtgtccgagaggcgacgatatcctaacgatccttacagaggtcaactatgaagtctctaacaaagatgataaaaaaaacatgggtaaacagatgccccaaccaacatttaccttgcgcaagaagcttgtattcccctccgattag

SEQ ID NO: 23334 - DNA, 375 bp, synthetic construct
  misc_feature 1..375: note = Description of Artificial Sequence: Synthetic coding sequence
  source 1..375: mol_type = other DNA
atggacttcagccggaacctgtacgacatcggcgagcagctggacagcgaggatctagcctctcttaaatttttgtcgttggactacatcccacagcggaagcaggagcccatcaaagatgccctgatgctttttcagcgactgcaagagaagcggatgctagaggaatctaacttatcatttctgaaagagctcctgttcagaattaaccggctcgacctcctgattacatacctgaatacccgaaaggaggaaatggaacgggagctacagaccccaggacgtgctcagatctcagcgtacagggtgatgctgtatcagattagcgaggaagtttcgagaagcgaattgcgcagcttcaagtttctactatag

SEQ ID NO: 23335 - DNA, 630 bp, synthetic construct
  misc_feature 1..630: note = Description of Artificial Sequence: Synthetic coding sequence
  source 1..630: mol_type = other DNA
atggacttcagccggaacctgtacgacatcggcgagcagctggactccgaggacttggctagcttgaagtttctaagcctggattatatcccccagcgcaagcaggaaccgattaaagacgccctgatgctgtttcaaagactccaggaaaaacgtatgctggaggagtctaacctgtcattccttaaggaactgctgttcaggatcaatcggcttgatctgttgattacatatctgaacaccagaaaagaggagatggagagggagttgcaaacccctggcagagcgcagatctcagcctacagagtgatgctttaccagattagcgaagaggtgagcagatctgaactccggtctttcaagtttctgctgcaggaagagatatcaaagtgtaagctggacgacgacatgaacttgctggatatattcatcgaaatggagaagagagtcatcctcggtgaagggaagctcgatatcctcaagcgggtttgcgctcaaatcaacaaatccttgctgaagattataaacgactatgaggaattcagcaaagattttggccagagtctcccaaatgagaaacagaccagcggcattctgtcggatcatcaacagagtcagttttgcaagtag

SEQ ID NO: 23336 - DNA, 1251 bp, synthetic construct
  misc_feature 1..1251: note = Description of Artificial Sequence: Synthetic coding sequence
  source 1..1251: mol_type = other DNA
atggacgaggccgaccggcggctgctgcggcggtgccggctgcggctggtggaggaattacaggtggatcagctgtgggatgccttacttagccgagagctgttccgccctcacatgatcgaggacatccaacgcgccgggagtggttctaggcgtgaccaggcgcgtcagctcattatcgacctcgaaaccagaggctcccaggccctgcccctgttcatttcatgcctagaagatactggtcaggacatgctggctagcttcctcaggactaatagacaggctgctaaactctcgaaacccaccctggagaatctgacccccgtagttctgagaccagaaatcaggaagcccgaagttctccgcccagaaacacccaggcccgtggatattggttccggtggctttggagacgttggggcactggaatccttaagggggaacgcagatcttgcttatatactttctatggagccttgtgggcactgcttgattatcaataatgtaaacttttgccgtgagtcaggcctgaggacccggacaggcagcaatattgattgtgagaaattaagaagaagattttcttcacttcacttcatggtggaggtcaaaggggatctgacggccaagaaaatggttctggcgcttctggagttggcccagcaagaccacggtgcattggattgctgcgtcgtcgtgatcctgagccacggctgtcaagcttcacatctgcaatttcccggagctgtttatggaaccgacggctgtccagtgtccgtagaaaagatcgttaacattttcaatggaacctcctgtccatccctggggggaaaaccaaagttatttttcattcaggcttgcggtggcgagcagaaagaccacggtttcgaggtggcttcgacaagtcctgaagatgagagtcctgggtccaacccagagccagatgctaccccttttcaggaaggcctgcgcacttttgaccagctcgatgctatatcgtctctgccaactcccagcgatatttttgtgtcctatagcacctttcccggattcgtatcctggagggacccaaagtctggaagctggtatgtggagacactcgacgacatctttgagcagtgggctcacagcgaggatcttcagtccttgttgctccgtgtggcaaacgcagttagtgtgaagggaatttacaaacaaatgccggggtgttttaattttttgcgtaagaagttgttcttcaagaccagctag

SEQ ID NO: 23337 - DNA, 801 bp, synthetic construct
  misc_feature 1..801: note = Description of Artificial Sequence: Synthetic coding sequence
  source 1..801: mol_type = other DNA
atggacgaggccgaccggcggctgctgcggcggtgccggctgcggctggtggaggaactccaagtggatcaactctgggacgcccttctgtcccgggaactattcagaccacacatgatagaagatattcagcgcgccggtagtggctcccgccgggatcaggcccgtcagctaatcatcgatctggaaacccgcggctctcaggctctcccattattcatcagctgtcttgaggatacaggccaggatatgttggcttcctttttgcgcaccaatcgtcaggcggccaaacttagcaaaccgactctggagaacctgacgcccgtggtccttcgaccagagattcgtaaaccggaagtgcttcggcccgaaactcctagacctgtggatatagggagtggggggtttggcgacgtcgagcagaaggatcatggctttgaggttgcttccacttccccagaggacgaatcccctggctctaatcctgaacccgatgccacaccatttcaggagggcttgagaacttttgatcagctggacgctatcagttctctccctactcctagcgatatattcgtgtcatactctacatttccggggtttgtatcttggcgtgatccaaagtccggatcctggtacgtggaaacactggatgatattttcgaacagtgggcacacagtgaggacctccagtcattattgctgcgtgtcgccaacgcggtcagtgtgaagggtatctacaaacagatgcccggttgtttcaatttcctacgcaaaaaactgttcttcaagacaagctag

SEQ ID NO: 23338 - DNA, 603 bp, synthetic construct
  misc_feature 1..603: note = Description of Artificial Sequence: Synthetic coding sequence
  source 1..603: mol_type = other DNA
atggagccctgcggccactgcctgatcatcaacaacgtgaacttctgtcgcgagagcggtctccgtacgcgcactggcagtaacatcgactgcgagaaattgcgtcgcaggttttcaagcttacattttatggtggaggtgaagggggacttaacggccaagaagatggtgcttgctctgctggaactcgcccaacaggatcatggcgctctcgattgctgtgtcgttgtgattctgagccacggctgccaggcttcacacctgcagtttcctggtgctgtgtatgggaccgacggctgtcccgtgagcgtagaaaaaatcgtgaacatttttaatgggacaagctgcccttctctgggagggaaacctaaacttttcttcatccaggcgtgcggcggcggatttgtctcctggcgggatcccaaaagtggcagctggtacgtggaaacactcgatgatattttcgaacaatgggcccacagtgaggacttgcaaagcctgctgcttcgtgtggccaatgcagtgagtgtgaaaggcatatacaagcagatgcccggctgttttaacttcctgcgcaaaaagctgttcttcaaaacatcttag

SEQ ID NO: 23339 - DNA, 1002 bp, synthetic construct
  misc_feature 1..1002: note = Description of Artificial Sequence: Synthetic coding sequence
  source 1..1002: mol_type = other DNA
atgctggccagcttcctgcggaccaaccggcaggccgccaagctgagcaaacctactttagaaaatctgactccggttgtgcttcgtccagaaattcgcaagccagaagtgctgcggccagagacacccaggcctgtggatattggttcggggggcttcggcgatgtgggcgcacttgaatccctacggggcaacgctgacctggcctacatcttgtcaatggagccgtgcggccattgtctgatcatcaacaacgtgaacttttgccgggaaagtggcctcaggacacggaccggaagtaacattgattgcgagaagctgagacgacgattctcatctctgcatttcatggtggaagtcaagggcgatctgaccgccaagaaaatggtcctcgcactcctcgaactggcacaacaagaccatggtgcactggattgctgcgtagtggtgatactctcacatgggtgccaggcctcccatttacagtttccaggggccgtgtatggcaccgatggatgtcccgtgagcgtggagaagatcgttaacatttttaacggtacaagctgcccctccctgggcggcaagccaaagcttttctttatacaggcatgtggtggagaacagaaggatcatggatttgaagttgcaagcacatcgccggaagatgagtcaccaggaagcaaccctgagcccgacgctacacctttccaggagggcttaaggactttcgatcaactggacgcgatcagctccctccccacaccttcagacatctttgtgtcctactccacgttccctgggttcgtgagctggagagaccctaagagtggaagctggtatgtagagacacttgacgatatattcgaacagtgggcccattcagaggacctacagagtctgcttctgcgggtcgccaatgccgttagcgtgaagggcatctacaaacaaatgcctggctgtttcaatttcctcaggaaaaaactgttctttaagaccagctag

SEQ ID NO: 23340 - DNA, 765 bp, synthetic construct
  misc_feature 1..765: note = Description of Artificial Sequence: Synthetic coding sequence
  source 1..765: mol_type = other DNA
atggacgaggccgaccggcggctgctgcggcggtgccggctgcggttagtcgaagagttgcaagtcgaccaactctgggatgctctcctgagtcgggagttatttaggccccacatgatagaagacatacagcgggccggaagcggttcgaggcgtgatcaggctcgtcagctgatcattgatctagaaacccgaggatcccaggccctgcccctcttcatatcttgccttgaggatactggccaggacatgctggcttcattcctgaggactaatcgacaggccgccaagctgagcaaaccaaccctcgaaaacctgactcccgtggtactgcgaccagaaatcaggaaacccgaagtcctgcggccagaaactccgcggcctgttgacatcggatccgggggctttggggatgtgggcgcccttgagtctttgcgtggcaacgccgatctcgcctacatcctctcaatggaaccctgcggccactgcttaataattaataacgtgaacttctgccgggaatctggactcaggaccaggacaggttctaacatagactgcgaaaaactaaggaggcgcttctcttcactgcactttatggtggaggtcaagggcgacctgactgcaaaggcgtcccatctgcaatttcctggggctgtgtatgggactgatgggtgcccagtgagcgttgaaaaaatagtgaacatattcaatgggacctcatgcccgagtttgggagggaaaccaaaactgtttttcatctag

SEQ ID NO: 23341 - DNA, 801 bp, synthetic construct
  misc_feature 1..801: note = Description of Artificial Sequence: Synthetic coding sequence
  source 1..801: mol_type = other DNA
atgctggccagcttcctgcggaccaaccggcaggccgccaagctgagcaaacctactttggagaacctcacaccagttgtgctgcgaccggagatccgcaaaccagaggtcctgagacctgagacgccccggccagtcgatataggctctggtggctttggggatgttggggctctcgagagtcttcggggcaacgcagatcttgcatacattttgagtatggagccatgcggccactgcttgattatcaataacgtaaacttttgtagggaatcgggcctgaggaccaggaccgggtccaacattgactgtgagaaactgcggagaaggttttcttcattacacttcatggtggaagtaaagggagatctgacagctaaaaagatggtgctcgcactgcttgagctggcacaacaggatcatggagctcttgactgctgcgtggttgtcattctgagccacggatgtcaggccagccatttacagttcccaggggcggtgtatggcactgatggctgtccagtctctgtcgagaaaattgtgaacattttcaacggcacttcatgcccatcgctggggggtaaacctaagctcttttttatccaggcttgtgggggtgagcagaaagaccacggcttcgaggtcgcttctacttccccggaggacgaaagccccggctcaaatcctgagcccgacgcgacccccttccaggagggtctgcggacattcgatcaattggatgcgatctcttctctgccgactccctcggatatttttgtctcatatagcacatttccctag

SEQ ID NO: 23342 - DNA, 1266 bp, synthetic construct
  misc_feature 1..1266: note = Description of Artificial Sequence: Synthetic coding sequence
  source 1..1266: mol_type = other DNA
atggacgaggccgaccggcggctgctgcggcggtgccggctgcggctggtcgaagagctgcaggtggaccaactctgggacgccctgcttagcagagaactgttccgaccacacatgatagaagacatccagagagctggatcaggctccaggcgggaccaggccagacagttgatcattgatctggagacccgcggcagccaggcgctgccattattcatttcttgtctggaggatacaggacaggatatgctggcctccttcctgcgcacgaaccgccaagccgcaaaactgtctaagcctaccctcgagaatctgacccccgttgttcttcggccggaaatccggaaacctgaagttctgcggcctgaaacacctcggccagtggatatcgggagcgggggatttggtgatgtgggggcgctggaaagcctgaggggaaacgccgacctcgcatatattttgagtatggaaccgtgcgggcactgtctgatcatcaacaatgttaacttttgcagagagtctggactaagaacgaggacagggtcaaatatcgattgcgaaaagttgcgaagaaggtttagcagtctgcattttatggtagaagtgaaaggggacctgacggccaagaaaatggtgcttgcattgctggaactcgcccaacaagatcacggcgcacttgactgctgcgtagttgtgatcctcagtcacggctgccaggcaagtcaccttcagtttcctggcgccgtgtatggaacagacggctgcccagtcagtgtagagaaaattgtgaacattttcaacgggacctcgtgcccctccctcgggggtaagccaaaactattttttattcaggcatgcgggggtgagcagaaggatcatggctttgaggtggcctcaacctcacccgaggatgagagccctggctccaacccagagcctgatgccaccccattccaggaaggtctccgaaccttcgatcagttagatgcaatttcctcactgcctactccctccgacatctttgtcagttactcgaccttccccgggtttgtctcatggcgcgaccctaagtctggaagctggtacgtagaaacactggatgacatattcgagcaatgggcacattcggaggatctccaatctctgctccttagagtgagcgctgcgtttctgtgtaaaggagagggaaggcttctgaggggctcagtgtcgtcttggggatggggttttggtgtaagccgggctggacctaatcagggctag

SEQ ID NO: 23343 - DNA, 2721 bp, synthetic construct
  misc_feature 1..2721: note = Description of Artificial Sequence: Synthetic coding sequence
  source 1..2721: mol_type = other DNA
atgaccgccgtgcacgccggcaacatcaacttcaagtgggaccccaaatctttggaaatccgcacactagctgttgagaggctccttgagcctctggtgactcaagtgaccacactcgtgaacactaattctaaagggccatcgaataaaaagcgcggaagatcaaagaaggcccacgtgctggcggctagtgttgaacaggctaccgaaaatttcctcgaaaaaggagataagatcgctaaagagtcacagttcctaaaagaggagctggtcgccgctgtggaagatgtgagaaagcagggtgatctgatgaaggccgccgctggggagtttgcggatgatccttgctccagcgtaaagagagggaatatggtacgggccgctcgcgcactgctgagtgcagttacccgcctcctgattttagccgacatggctgacgtgtataaactcctggtccagcttaaagtggtagaggacgggatcctcaaacttcgaaatgctgggaatgaacaggatctaggcattcagtacaaggcgctcaagcctgaggtcgacaagttgaacataatggccgccaagagacaacaggaactcaaagacgttggtcacagggaccagatggcggcagctcgcggcatacttcagaagaacgtcccaattctgtacacagcgagtcaggcatgcctccagcaccccgacgtggccgcctacaaagccaatcgcgatctgatctacaaacagctgcagcaggccgtcactggtatcagcaatgcggcccaggcgactgcaagtgatgatgcttcccaacaccagggcggtggtggcggagaactggcatatgccctcaataacttcgacaaacagatcatcgtggatccactctccttttccgaagagcgattccgccccagcctcgaggagcgactcgaatcaatcatctcgggcgccgcgttgatggctgactctagctgtacaagggacgatcgccgggagcgtattgtcgccgagtgcaatgcagtaaggcaagctcttcaggacttattaagtgaatacatggggaatgctggaaggaaggagcgttccgacgccctgaattctgctattgacaaaatgaccaagaagacccgggacctgcgccggcagctgcggaaagccgttatggaccatgtgagtgactcatttttggaaacaaatgtgcccctgctggtcctgatcgaggcagcgaagaatggtaatgaaaaagaagtaaaggagtacgcccaggtgttccgagagcacgcaaacaagcttatcgaagttgcgaacttagcctgtagcatatctaacaacgaggaaggcgttaaactggtccggatgtcagcttcacagctagaagccctgtgtcctcaggtcataaatgccgcgctagccctggccgcaaagccccagtcgaagcttgcccaggagaacatggacttatttaaagagcagtgggagaagcaggttcgagttctgactgatgccgtcgacgatataaccagtatcgatgatttcctggccgtaagcgagaaccatattctagaagacgtgaacaagtgcgttattgcattgcaagaaaaagacgtagacggcttggataggacagccggcgctattcgcggaagagctgcccgcgttatacatgtggtcaccagcgagatggacaattacgaacccggtgtatacactgagaaggtgctggaagcaaccaagctgctgtcaaatacagtcatgccccgattcaccgaacaggtggaggccgctgtggaagcgctgagtagcgatcctgcccagccaatggatgagaatgaatttatcgacgcgtctagactcgtgtacgacggcattcgggacatccgcaaagcagttctgatgattagaacccccgaggaactggacgatagcgacttcgagacagaagattttgatgtcagatcccggacatccgtgcaaacggaggacgatcagttgatagccggccagagcgcacgagctatcatggcccaactgccccaggagcagaaagcaaaaattgccgagcaagtggcgtcttttcaggaagagaagtccaaacttgacgccgaagtcagcaagtgggacgattctgggaacgacatcatcgtgctggcaaaacaaatgtgcatgatcatgatggagatgaccgatttcactagaggaaaaggacctctgaaaaacacgtccgacgtcatttctgctgccaagaagatcgcagaagctggctcaagaatggataagctcgggcgcacaatcgccgatcattgtccagatagtgcttgcaagcaggatctgctggcctacctacagagaatcgccctgtattgccatcaactgaatatatgtagtaaagtaaaggctgaggtgcagaacctgggaggcgaacttgtggttagcggcgtggactcggctatgtccctcattcaagccgctaagaatttgatgaatgccgtggtccagacggtgaaggcctcttacgtcgcttcgaccaaatatcagaaatctcagggcatggcaagtctgaatctgcctgccgtgagctggaagatgaaggcaccagaaaagaaacccctcgtgaagcgcgagaagcaagacgaaacgcagactaaaatcaaacgcgcctctcagaagaaacacgtaaatcccgtgcaggcactgtctgaatttaaagcaatggactcaatatag

SEQ ID NO: 23344 - DNA, 2412 bp, synthetic construct
  misc_feature 1..2412: note = Description of Artificial Sequence: Synthetic coding sequence
  source 1..2412: mol_type = other DNA
atgaaggccgccgccggcgagttcgccgacgacccctgcagcagcgtgaaaagagggaacatggttcgcgcagctagagccctcctttcggcggttactcgactccttatcttagccgacatggccgacgtctacaagcttttggtgcagctaaaggtcgtggaggacgggatcctgaagctcaggaatgccgggaatgagcaggatttgggcatccaatacaaggctctgaagcctgaagtcgataaactgaacatcatggccgccaagcgccaacaggagcttaaggacgttgggcaccgggaccaaatggccgccgcgcgcggaattctccaaaagaatgtgcccatactgtatacagccagccaggcttgtctgcagcatccagacgtcgccgcgtataaagctaatcgggatctgatttacaagcagctgcaacaagctgtcaccggaatctctaacgctgctcaagcaactgcctccgacgacgcatctcagcaccagggcggaggaggtggagaactggcttatgccctgaacaatttcgacaaacagattattgtcgatcctctgtccttttccgaggaaaggttccgaccatcacttgaggagagactagaatcaataatctctggcgccgctttgatggcagacagcagttgcacacgggacgatcgcagagagagaattgtcgcggagtgcaacgcggtgagacaggccctgcaggacttgctctcagaatacatgggaaatgccggaagaaaggagcgcagcgacgccctgaatagtgctatcgacaagatgacgaaaaagactcgggacctgaggagacagttgaggaaagctgttatggaccatgtaagtgactccttcttggagaccaatgtgccccttttggtgttaattgaagcagcaaaaaatggcaacgagaaagaggtaaaggagtacgcgcaagtttttcgggaacacgccaataagctcattgaggtggccaacctggcctgttcaatttcgaacaatgaggaaggcgtcaagttagtacgaatgtccgcttcccagctcgaggccctttgtcctcaagtgatcaatgctgctctggcacttgccgccaagccgcagagcaagctcgcacaggagaatatggacctgttcaaggagcaatgggaaaagcaagtgagggtgttgaccgatgccgtagacgacattactagcatagacgatttcctggccgtcagcgagaaccatatcctggaagatgtcaataaatgtgtgattgctctccaagaaaaggatgtggacgggttggatagaacggctggggcgatacggggaagagccgcacgtgtgatccacgtcgttacctccgagatggataactatgaaccgggtgtgtacacagaaaaggtcttggaggccactaagttattgtctaacaccgtgatgccacgatttacagagcaggtagaagccgcggtggaggcgctttcatccgatcccgctcagcccatggatgagaacgaatttatcgatgcctcacggctcgtatacgatggcatcagagacatacgaaaggctgtactgatgataaggacccctgaggagctggatgattccgactttgaaactgaagacttcgacgtgcggtccaggacctcagtccaaactgaagatgaccaacttattgcaggacaatctgcccgcgcaataatggcacagctcccccaagagcaaaaggcaaaaatcgcagagcaagtggccagcttccaagaagagaagtctaaattggacgcagaagtatcaaagtgggatgactcaggaaacgacatcatcgtcctggctaaacagatgtgtatgatcatgatggagatgacagattttacaagagggaaggggcctctgaaaaacacatcggacgtcatttctgccgcaaagaaaatagctgaggctggtagtcgaatggataaactggggcgaaccatcgccgaccactgcccagatagtgcatgtaaacaggatcttcttgcttacttgcagaggatcgccctgtattgccaccagttaaatatatgctccaaggtgaaagctgaggtacagaatctgggcggcgagctggtagtgtcaggagtcgattctgcgatgtctctgatccaggccgcaaaaaatctcatgaatgcagtggtgcagactgtgaaggcttcttatgtggcctccacaaagtaccagaagagccaagggatggcttccctgaacctgccagccgtaagctggaagatgaaagctcctgaaaaaaagcctttggtgaaacgggagaagcaggatgagacacagactaagatcaaacgtgcttctcagaagaaacacgtgaatcccgtccaggcactgtctgagttcaaagccatggattctatatag

SEQ ID NO: 23345 - DNA, 357 bp, synthetic construct
  misc_feature 1..357: note = Description of Artificial Sequence: Synthetic coding sequence
  source 1..357: mol_type = other DNA
atgaccgccgtgcacgccggcaacatcaacttcaagtgggaccccaagtctctcgaaatcagaacactggctgtcgaacggctcctggagccacttgtgacgcaggtcactacattggtcaatactaactctaaaggtccatcaaacaaaaagaggggcaggtctaagaaggctcacgtgttagccgcttctgtggaacaggccacggaaaattttcttgaaaagggcgacaagatcgcgaaggaaagtcaattcctgaaggaggagcttgtggccgcagtggaggatgtgcgaaaacagggggaccttatgaaagcggcggctggggaattcgctgacgacccttgctcttcttag

SEQ ID NO: 23346 - DNA, 420 bp, synthetic construct
  misc_feature 1..420: note = Description of Artificial Sequence: Synthetic coding sequence
  source 1..420: mol_type = other DNA
atgaccgccgtgcacgccggcaacatcaacttcaagtgggaccccaagtccctcgagatccgcaccctggccgtcgagcggctgctcgagcctctcgtgacacaagtgaccaccctggtaaatacgaactctaagggcccaagcaacaagaagcgagggaggtcaaaaaaggctcacgtcctcgcggcatccgtggaacaggcaacagaaaattttcttgaaaagggagacaaaatcgccaaagagagtcagtttctcaaggaagagctcgtcgccgccgtagaagacgtgaggaagcagggtgatctgatgaaagcagcagcaggggagttcgccgacgacccatgcagctcagtgaagcggggcaacatggtgcgggctgcccgggccctcttgtctgctgttactaggctgctgtag

SEQ ID NO: 23347 - DNA, 648 bp, synthetic construct
  misc_feature 1..648: note = Description of Artificial Sequence: Synthetic coding sequence
  source 1..648: mol_type = other DNA
atgaccgccgtgcacgccggcaacatcaacttcaagtgggaccccaaaagtctggaaattagaacactggctgttgagcgccttctcgaaccattggtgacacaagtgaccacactggtaaacacgaacagtaaggggcctagtaataagaagaggggacgaagcaagaaggcccacgtccttgccgccagcgtcgagcaggcaaccgaaaattttttggagaaaggtgacaagatagcaaaagagtcccagtttttaaaggaagagcttgttgccgccgtcgaagatgtccgcaaacaaggcgatctcatgaaggccgctgccggcgagttcgccgatgacccttgctccagcgtgaagaggggtaatatggtgcgcgccgctagagccttgctgtctgctgtgactaggctcctcatcttggccgatatggctgatgtgtacaagttgctcgtgcaactcaaggtggtggaggatggcatcctgaagctgcgcaacgccggcaacgagcaagaccttggaatacagtacaaagcgctgaagccagaagtggacaaattgaatatcatggcagcgaagcgacagcaggagctgaaggacgtaggtcaccgtgatcagatggccgcagcacgagggattttgcagtag

SEQ ID NO: 23348 - DNA, 306 bp, synthetic construct
  misc_feature 1..306: note = Description of Artificial Sequence: Synthetic coding sequence
  source 1..306: mol_type = other DNA
atgaccgccgtgcacgccggcaacatcaacttcaagtgggaccccaagagtctggaaattcggactctagctgtggagagactgctggaaccactggtaacacaggtgaccacacttgttaacacaaatagcaaaggcccatctaataagaagcgcggacgctccaaaaaagctcatgtcttagcagctagcgtggaacaagctacagaaaacttcttagaaaaaggagacaaaatcgccaaggagtcacagttcttgaaagaggaactggttgccgccgtggaggatgtacgcaagcagggatag

SEQ ID NO: 23349 - DNA, 372 bp, synthetic construct
  misc_feature 1..372: note = Description of Artificial Sequence: Synthetic coding sequence
  source 1..372: mol_type = other DNA
atgaccgccgtgcacgccggcaacatcaacttcaagtgggaccccaaaagcctagaaatacgtactctcgctgtggagaggcttctggaaccactggtgacccaggtgacaacccttgtgaacactaactccaaaggtcctagtaacaaaaagcgcgggcggagcaagaaagcgcacgttttggctgcttcggtggagcaggctacagagaactttctggaaaaaggcgataagattgccaaggagtcccagtttctgaaggaggagctcgtggcggccgttgaagatgtgagaaaacagggagatctcatgaaggccgcagctggtgaattcgccgacgacccgtgtagttctgtcaaaagaggcaattag

SEQ ID NO: 23350 - DNA, 471 bp, synthetic construct
  misc_feature 1..471: note = Description of Artificial Sequence: Synthetic coding sequence
  source 1..471: mol_type = other DNA
atgaccgccgtgcacgccggcaacatcaacttcaagtgggaccccaaatctttagagattcgaacccttgctgtggaaaggctgctggagcctctcgtcacccaggttaccacacttgtgaacaccaactcgaagggacctagtaacaagaagcgcggtagatcaaagaaggcacatgttcttgccgcctctgtggagcaggccactgagaactttctggagaaaggagacaagatagccaaagaaagccaatttctcaaagaggagcttgtagctgcagtggaggacgtccgaaagcagggagacctcatgaaggcagccgctggcgagttcgcggacgatccatgctcttccgtgaagagaggcaatatggtcagagccgcccgagctttactgtcggccgtcacgaggctcctgattttagctgacatggccgatgtgtataagctattggtccagctgaaagtgtag

SEQ ID NO: 23351 - DNA, 285 bp, synthetic construct
  misc_feature 1..285: note = Description of Artificial Sequence: Synthetic coding sequence
  source 1..285: mol_type = other DNA
atgaccgccgtgcacgccggcaacatcaacttcaagtgggaccccaagagtctggagatcaggacgctggcggtggaacggctgctggagcccttggtgactcaggtcacgactctggtgaacaccaattcaaaaggcccctcaaataagaagcggggccgcagtaaaaaggcccatgtactggctgcctccgtcgagcaggctaccgaaaatttcctagagaagggagataaaatcgctaaagaatcacagtttctgaaggaagaattggtcgccgccgtgtag

SEQ ID NO: 23352 - DNA, 2790 bp, synthetic construct
  misc_feature 1..2790: note = Description of Artificial Sequence: Synthetic coding sequence
  source 1..2790: mol_type = other DNA
atgaccgccgtgcacgccggcaacatcaacttcaagtgggaccccaaaagtctggagatccgcacgctggccgtggaaaggctcctcgaaccactggtgacccaggtgacaacactggtaaacaccaatagtaagggtccatccaacaaaaagcgcggacggagcaagaaggcccatgttctcgcagcatcagtcgaacaggcaacagaaaacttccttgagaagggggataaaatcgccaaggaatcgcaattcttgaaagaagagttagttgctgccgtggaagatgtccggaagcagggcgatctgatgaaagctgctgcaggggagtttgccgatgatccttgctcatctgtgaaaagggggaatatggtgcgagctgccagagctttgctttccgcggtgactcgcctgttaatcttggccgacatggccgacgtctataaactgctggtgcaattgaaggttgtcgaggatggcattctgaaattaaggaatgccggcaacgaacaagatctaggtattcagtacaaggctctaaaacccgaggtcgacaagctgaatattatggcggccaaacgccagcaggagttgaaggacgtgggtcacagagatcaaatggcagcagctcgaggcattttacagaagaatgtgcctattttgtacaccgcgagccaagcttgccttcaacacccagacgtagctgcatataaagccaaccgtgacctcatctacaagcaactgcaacaagcagtgaccggtatttccaacgccgctcaagccaccgcatcggatgatgcctcacagcatcagggggggggagggggggagctcgcctatgctttaaataactttgataaacagattatcgtcgacccactttcattctcggaagaaagatttcgcccaagcctggaagaaagactggagagtattatttcaggagccgcccttatggctgacagctcatgcacacgggatgaccgtagagaacgaatagtggccgagtgtaacgcggtaaggcaggccctgcaggacctgctttctgagtatatgggcaacgctgggaggaaggagcgctcagatgccctcaatagcgccatcgataagatgaccaagaagaccagagatctgaggcgacagctgcgtaaggctgtgatggatcacgtgtcagactccttcctagagacaaatgtccccctcctggttctcatcgaggctgcgaagaatggcaacgagaaagaagtgaaagagtacgcccaagtgttccgtgaacatgctaataagttaatcgaggtggccaatttagcttgcagcatcagtaacaacgaggagggcgtgaagctggtcaggatgagtgcgagccaactggaagccctgtgcccccaggtgattaacgcagcgcttgctttagctgccaaaccccagtccaagctagcccaggagaacatggatctcttcaaagagcagtgggagaaacaggtgcgggtactcacagatgccgtagatgacatcacctccattgacgatttcctagccgtctcagaaaaccatatcctagaggatgttaataagtgtgttatcgccttacaagagaaagacgtggatgggttagaccgcaccgctggagctattaggggccgggccgcgcgcgtcatccacgtcgtgacttcagagatggacaattacgaacccggcgtatacactgaaaaagtactggaggcaacaaagctcctgtccaatacagtgatgcctcggtttaccgagcaggtagaagcagccgtggaggccttgagttcagaccccgcccagccaatggatgaaaacgagttcatcgatgcctcaagacttgtgtacgacggaatccgggacattcgaaaggcagtgctgatgatccgcacacctgaagagctagatgatagtgactttgaaactgaagatttcgacgttcgctcaaggacttctgtccagacagaggatgatcagctgatagcggggcaatctgctcgagctattatggcccagctccctcaagagcaaaaagccaaaatcgccgagcaggtggccagcttccaggaggagaagagcaaactcgatgccgaagtatccaagtgggacgattctggaaacgatatcattgtgttggcgaaacaaatgtgcatgattatgatggagatgacagacttcacacggggaaagggtccactaaagaatacgagcgatgtgattagtgcagccaaaaaaattgccgaagcagggagccggatggacaagttggggcgaaccattgctgaccactgcccagactctgcatgtaagcaggacctactcgcctacctgcaacgcatcgcgctatattgtcaccaattgaatatctgttcgaaggtgaaggctgaagtgcagaatctcggtggggaactcgttgtgtcagggaattgcgacacttgtggtgcgctgcaggggctgaaggggtggccaccccctctgtgtgctacgcactgggtggactccgccatgtctctgatccaagctgcaaagaatcttatgaacgccgtggttcagaccgtcaaagcaagctacgtggcctccacaaagtaccagaagagccagggaatggctagtttaaatctgccggccgtttcttggaagatgaaagcacccgaaaagaaaccacttgtcaagagagagaaacaggacgagacccagacaaagatcaagagagcctcccaaaaaaagcacgtgaatccggtgcaggctttgagtgaatttaaagccatggattctatctag

SEQ ID NO: 23353 - DNA, 1611 bp, synthetic construct
  misc_feature 1..1611: note = Description of Artificial Sequence: Synthetic coding sequence
  source 1..1611: mol_type = other DNA
atgaccaagaagacccgggacctgcggcggcagctgcggaaggccgtcatggaccatgtctctgattcgtttctcgaaactaatgttccactactggtactgatcgaggctgctaaaaatggcaacgaaaaagaggtgaaagagtatgcccaagtatttagagaacacgccaacaagctgatagaggtggccaacctggcctgcagcatttcaaataatgaggagggtgttaaactggtacgcatgagcgcgtctcagctggaagccctatgccctcaggtgattaatgctgctctggccttagctgcaaaaccacagtccaaactggctcaggagaatatggatttgtttaaggagcagtgggagaagcaggtccgagtgctgactgacgctgtagacgatattaccagcatcgatgacttcctagccgtgagcgagaaccatatacttgaagacgtaaacaagtgcgtcattgctttacaggagaaggatgttgacggcctggataggacagccggggcaattagaggccgcgctgcgagagtaatccatgttgtgacgtccgagatggacaactacgagccaggcgtttacacagaaaaagtgctcgaagctacgaaactcctttccaacactgtcatgccaaggttcactgagcaggtcgaagctgccgtagaggcactatcatcagaccctgctcaacctatggacgagaacgagttcatagatgcttctcggttagtctacgatggaatacgagacatccgcaaggccgtcctgatgatccgaacacctgaagagctcgatgattcagatttcgaaacagaagactttgacgttcgatcgagaacttctgtacagactgaggatgaccagctgatagctgggcagtctgctcgggccataatggctcagctcccgcaggagcagaaagcgaagatcgcggagcaagtggcctcattccaggaggaaaagagcaagttagacgcggaggtgtcgaagtgggatgacagcggtaacgatatcatcgtgctcgctaaacagatgtgtatgatcatgatggagatgactgattttaccaggggaaaggggcccctgaaaaatacgagcgatgttattagcgccgcaaagaaaatcgctgaggccggatcccgtatggacaaactgggtagaacaattgccgaccattgtcctgacagcgcctgtaagcaggacctgcttgcgtacctgcagcgcattgctctgtattgccaccagctgaacatttgctcgaaagtgaaggctgaggtgcagaatctgggtggcgaactggtggtttccggagtggactccgctatgtccctcatccaggcagcaaaaaacctaatgaacgccgtagtgcagactgttaaggcatcctatgttgctagcacaaaatatcaaaagagtcagggcatggcttctctgaatttaccggccgtgtcttggaaaatgaaggcacctgagaagaagccacttgtcaagcgcgaaaagcaggatgagacgcagacgaagattaagagggcttcacagaagaaacacgtgaaccccgtacaggctctgtccgagtttaaggcaatggactcaatctag

SEQ ID NO: 23354 - DNA, 2676 bp, synthetic construct
  misc_feature 1..2676: note = Description of Artificial Sequence: Synthetic coding sequence
  source 1..2676: mol_type = other DNA
atgaccgccgtgcacgccggcaacatcaacttcaagtgggaccccaaatcactagaaatcagaacactggctgttgaacgcttgttggaacccctcgtaacgcaggtaaccacccttgtgaatacaaacagcaaagggccttcaaacaagaaaaggggcaggtccaagaaagctcatgtgctcgccgcctccgtcgagcaagccacagagaactttcttgagaagggcgacaagatcgccaaagaaagccagttcttaaaggaggaactggtggcagctgtcgaggacgtcaggaaacaaggggatctgatgaaagcagcagcaggtgagtttgctgacgacccttgctctagcgtgaagagaggaaatatggttagggcggccagggctttgctttcagccgtcacccgactgttgaaggttgtggaggatggtattctaaagttgcggaacgccgggaatgagcaggatttaggaattcagtataaggcactgaaacccgaagtcgataaactaaatatcatggccgccaaacggcagcaggagctgaaagacgtggggcatagggaccaaatggccgcagcacggggtatactccagaagaatgtgccaattctgtacaccgcatctcaagcatgcctccaacaccccgatgttgcggcctacaaggctaatcgcgacctgatttacaagcaactacaacaagccgtgaccggcatatccaacgcggctcaggctaccgcttcagatgacgcttcgcaacaccaggggggcgggggtggagaacttgcttacgctctgaataattttgataaacagattattgttgaccccctctccttcagtgaggagagatttcggccctcactcgaagagcggctggaatccatcatttccggagctgctctaatggcagactcatcctgcacccgggacgaccgtagagagagaatcgtggcagaatgcaacgccgtgcgccaggctctgcaggacctcctgtctgaatacatgggtaacgcgggacggaaggaaaggagcgatgccctgaattcagccatcgataaaatgaccaagaaaacgagggacctgcggagacagttaagaaaggcggtcatggatcatgtctccgactcttttctggagaccaatgtgccgttactggtcctgattgaggctgcgaagaacggtaacgaaaaagaagtgaaggagtatgctcaggtgtttagggaacatgccaataagctcatcgaggtggcgaatctggcatgtagtatctcgaataatgaagagggggtgaaattagtgaggatgtcggccagccagttggaagcgctgtgccctcaagtgatcaatgccgcactcgcactggccgcaaaacctcaaagcaagctggcgcaggagaacatggaccttttcaaagagcaatgggagaaacaggtccgggtgctgacagacgccgtcgacgacattacaagtattgacgactttctcgccgtatcggagaatcacattctggaagatgttaataaatgtgttatcgccttgcaggagaaagacgtggacggcctggatcgcacagccggggctataaggggtagagccgcaagagtcattcacgtggtgacctcagagatggacaattatgagccgggggtgtacacggagaaagtgttagaagctaccaagctgttgtcgaataccgtgatgccccgctttacagagcaggtcgaggcggcagtcgaagccctgtcctctgaccccgcacagccaatggacgaaaatgagttcatagacgccagccggctggtttatgatggaatccgcgatataaggaaagcagtcctgatgatccggacgccagaggagttggatgattctgattttgagacagaggactttgatgtgcggtctcgaacctctgtccagaccgaggatgaccagctaatcgctgggcagtctgctagagccatcatggcacagttaccacaggaacagaaggctaaaatagcagagcaggtggcaagctttcaagaagaaaagtccaaacttgacgctgaggtctctaaatgggatgactctggcaacgacattatcgtattggctaagcagatgtgcatgattatgatggaaatgaccgattttacccgcggcaagggacctctcaaaaatacctccgatgtaatctctgcggccaagaagatcgctgaagccggatccaggatggacaagctggggcggacgatagctgatcattgccccgacagtgcctgtaaacaagatctcctcgcttatcttcagaggatcgccctatactgccaccagcttaatatttgcagtaaggtgaaggccgaagtccagaatctaggcggtgagttggtggtctccggggtagactccgctatgtcactcatccaggcagccaagaatctgatgaatgcagtcgttcagaccgtcaaggctagctatgtcgcctcaacaaagtaccagaaaagtcaaggtatggcatccctgaacctcccggcagtttcatggaaaatgaaagcccccgagaagaagccgctggtgaagcgcgagaagcaagacgaaacacagacaaaaatcaagcgtgcgtcacagaaaaaacacgtcaatcccgtgcaggccctaagtgaatttaaggcgatggactccatttag

SEQ ID NO: 23355 - DNA, 2346 bp, synthetic construct
  misc_feature 1..2346: note = Description of Artificial Sequence: Synthetic coding sequence
  source 1..2346: mol_type = other DNA
atggccacccaggccgacctgatggagctggacatggccatggagcctgatagaaaagctgctgttagccactggcaacagcagtcttatttggattcggggatccactcaggggccacaaccacagcaccaagcctttctggaaagggcaatcctgaagaagaagatgttgacacttcacaggttctgtatgagtgggagcagggcttttcacagagttttactcaggagcaggtggccgacatcgacggccaatatgccatgacaagagcacagcgggttagggctgcaatgtttccagaaacgctagatgagggaatgcagattccttcaactcagttcgatgccgcccacccaacaaacgtccagagactggccgagccttctcagatgctgaagcatgcagtggtgaatctgatcaattaccaggacgacgctgaactggccacaagggctattcccgagctgacaaagctactgaacgacgaagaccaggtggtcgtcaataaggccgccgtcatggtgcaccagcttagcaagaaagaggccagccgacacgctattatgaggtctccccagatggtaagcgctatcgtaagaaccatgcagaacaccaacgacgtggaaactgctcgttgcactgcaggaactctgcacaatctgtctcaccacagggaaggcctgttagctattttcaagtcaggggggattccagcactggttaagatgctgggatcacctgttgactcagtgcttttttacgctattaccactttacacaatctgctgttacatcaagaaggggcaaaaatggcggtgagactggcaggaggcttgcagaaaatggttgccctgttgaataaaaccaatgtcaaatttcttgcaatcaccaccgactgtctccagatcttagcctatggcaaccaggaatccaagctgattatactggcctcaggcgggcctcaggccctggtaaacatcatgagaacctacacttatgagaagcttctctggacaaccagcagagtactaaaagtgttgtcagtctgtagtagcaataagcctgctatagtagaagcgggcgggatgcaggcacttggactgcacctaacagatccaagccaaaggctggtccagaattgcttgtggacgctgagaaacctgtccgacgctgccaccaaacaggagggaatggaagggctactgggtactctcgtccagctgctgggcagtgatgatattaatgtggttacctgcgccgccggaattctcagcaacttgacctgtaacaactacaagaataagatgatggtttgtcaggtcggcggtattgaggcattggtgcgtacagtccttcgggctggtgatagggaagatattactgagccagctatttgcgccctgcgccacctaacttcccggcaccaggaggcagagatggcccagaacgcagtgcgattacactacggactcccagtagtagtgaagctgctgcatcctccttctcattggcctcttatcaaagctaccgtgggtctgatcagaaacttagccctttgccctgcaaatcacgccccattgagggagcagggtgcgattccccgtctggttcagctgcttgtccgagcgcaccaggatactcagcgtcgcacctcgatgggcgggacacagcaacaatttgtggaaggggttcgcatggaggaaatcgttgagggctgcacaggcgcccttcatatcctggccagagatgtgcacaacagaattgtgatccgtgggctcaatacaatcccactcttcgtacaactgttgtattccccaatcgagaacatccagcgcgtggctgccggcgttctgtgcgaactggcccaggataaggaggctgcagaagcaatagaggccgagggcgccaccgccccactgacagaactcctccatagtcggaacgagggcgtcgccacctatgccgccgctgtgctgttcaggatgagcgaagataaaccacaggactacaagaaacgattatctgtcgagctgacttcctcactcttccgcaccgaacccatggcctggaacgaaacagccgacttaggcttagatataggggcgcagggcgaacctctgggctataggcaggatgatcccagctatcgatcgttccacagcggcggctatggccaggacgcccttggaatggacccaatgatggaacatgagatgggcggtcatcatcctggagccgattatcccgtggacggactaccagacttgggccacgcccaggacttaatggatgggctccctccgggcgactctaaccagctagcttggttcgataccgacctatag

SEQ ID NO: 23356 - DNA, 2346 bp, synthetic construct
  misc_feature 1..2346: note = Description of Artificial Sequence: Synthetic coding sequence
  source 1..2346: mol_type = other DNA
atggccacccaggccgacctgatggagctggacatggccatggagccggacaggaaagcagctgtgagccattggcagcaacagtcatatttagatagcggaatccactcaggggctaccaccactgcaccatctttgtcgggcaaggggaatccagaggaggaagacgtggacacttcccaggtactttacgaatgggaacaaggattttcccagtcattcactcaggagcaggtggcggatatagacggacagtatgcgatgaccagagcccagagagtccgagctgctatgtttccagagacgctggacgagggaatgcagatcccctccacccagttcgacgcagcccaccccaccaatgtgcagagactggccgagccttctcagatgctcaaacacgccgtggtgaatctgatcaattaccaggatgacgccgaactagcaacaagagctattcccgagctcaccaaactgttaaacgacgaagatcaggtagtggtcaataaagctgctgtcatggttcatcagctgtctaagaaggaggcatcaaggcacgcaattatgagaagtcctcagatggtgtccgctattgttcgcaccatgcaaaacactaacgacgtcgagactgccagatgtacggccggaaccctccataacctatcccatcacagagaggggttattggccattttcaagagcggcggtatcccagcacttgtaaagatgctgggaagcccagtcgatagtgttcttttctatgccatcacaacactgcacaacttacttctgcaccaggaaggagctaaaatggctgtgaggttggccgggggactgcagaaaatggtggctctgttgaacaagacaaacgtgaaattcctcgccatcacaaccgactgtctgcagattctggcatacgggaaccaggagtccaagctgattatcttggccagcggcgggcctcaggcactcgtgaatataatgaggacctatacatatgagaaactgctgtggactacatcccgtgtcctaaaggtcctatctgtctgcagcagtaacaaacccgcgatagtggaagctggcggcatgcaggcccttgggcttcatctgaccgaccccagtcaaaggcttgtgcagaactgtctttggactctaaggaacctgtcggacgcagccaccaaacaggagggaatggagggtctgctcgggaccctggttcaactgttaggctctgatgacattaacgtggtgacctgtgccgctggtatcttgtcgaatcttacctgcaataactacaagaacaagatgatggtatgccaggtgggggggattgaggccctggttcgcaccgtcctgcgagccggtgatagggaggacattaccgaacccgctatctgcgcattaagacaccttacgtcaaggcaccaggaggctgagatggctcagaacgcggtgaggttgcattatggtctccccgtcgtagtaaagcttcttcatcccccaagtcactggccccttattaaggccacagtaggactaattcgtaatttggctctttgtccagctaaccacgctcccttaagggagcaaggcgccataccaaggctagtgcaactgctggtgcgtgcccaccaggatactcagcgccgcacctcaatggggggtacccagcaacagttcgtcgaaggcgtgagaatggaggaaatcgtggagggttgtacaggagccctgcacatcctggccagagacgttcacaatcgtatcgtgatcaggggcctcaatactatccccttatttgtgcagctgctgtattctccgatcgagaacatccagcgcgtggccgcaggtgtcttatgtgagttagcacaggacaaagaggctgctgaagccatcgaagcagaaggcgcaaccgctcccttgaccgaattactgcactcacggaatgagggagtggcaacatacgccgctgccgtgctgtttcgaatgtctgaagacaagccccaggactataaaaagaggctaagcgtggagctgacctcttcgctcttcaggaccgagccaatggcctggaacgaaacagcagatcttggcctggatattggagctcagggcgagcccctgggttacaggcaggatgatccttcctatcgctcttttcactctggcggatatggacaggacgcgttaggaatggatcctatgatggaacacgaaatgggcggccaccaccccggtgctgattacccagttgatggtctcccggacctcggacacgcacaggacctgatggatgggctaccccctggggactcaaatcagttagcctggtttgatactgatctgtag

SEQ ID NO: 23357 - DNA, 2346 bp, synthetic construct
  misc_feature 1..2346: note = Description of Artificial Sequence: Synthetic coding sequence
  source 1..2346: mol_type = other DNA
atggccacccaggccgacctgatggagctggacatggccatggagcctgataggaaagctgcagtgtcgcactggcagcaacagagctatctggacagtggcatccatagcggcgccactacaaccgccccgtctctgagcgggaagggtaaccccgaggaagaggatgtcgataccagccaggtcttatacgaatgggaacagggctttagtcagtcctttacgcaggaacaagtggctgacatcgatggacagtacgcaatgactcgggcacaaagggtccgcgcagccatgtttcccgaaaccctggatgaggggatgcaaatccccagtactcaattcgatgccgcgcaccccacgaacgtacagcggttggctgaaccaagccagatgctgaaacacgctgtggtgaacctgatcaattaccaagacgatgctgaactggccaccagggcaatcccagagctgaccaaactgctgaacgacgaggaccaagtcgttgtaaataaagctgccgttatggttcaccagcttagcaaaaaggaagcttccaggcacgcaattatgcggtcacctcagatggtgagcgctattgtccgtaccatgcaaaacactaacgatgttgagacggcaaggtgtactgcagggacgctgcataatctgagccaccatcgggagggcttgttagcaatcttcaagtctggcgggatcccagctcttgttaaaatgctcggatcgccggtcgattctgtgcttttctatgcgattacaactctccacaatctgcttttacaccaggagggggcaaaaatggcggtgaggcttgctggaggcctccagaagatggttgcgctgctcaataagacaaatgtgaagttccttgcaatcacaacggattgccttcagattcttgcctacggtaatcaggagagtaagctgattatcctagcctcgggtggcccccaggccctggttaacattatgcgaacctacacttacgagaaattactttggacaacttccagagtgctaaaggtgctgagtgtttgctcatccaacaagcctgcaatcgtggaggctggcggcatgcaagcactcggcctccatctgacagacccatcccagcgcctggtccagaattgcctgtggaccctgcggaacctcagtgacgccgcgaccaagcaggagggaatggaaggcctactcggaactctggtccaacttctgggctccgatgacatcaatgtagtcacttgtgctgcaggcatacttagcaacctgacttgtaacaactataaaaacaagatgatggtgtgtcaggtagggggcatagaagccctagtcagaacagtcctgagagccggagacagggaagacatcacggagccggcaatatgcgccctgaggcacctcacaagcaggcatcaagaagcagagatggcacagaatgccgtccgtctgcattatgggctgcccgtggtcgtgaaattactccacccgccaagccattggcctcttatcaaagctactgtggggcttatccggaacctggctttatgccctgctaatcatgcacccctgagggagcagggcgctatccctagactggtgcagctgctggtgcgagcccaccaggatacacaacgacggacttcaatgggcggaacacagcagcagttcgttgagggagtccggatggaagaaatcgtggaagggtgcacgggggctctgcatattttagctcgggacgtacataataggatagtaattaggggtctcaatacaatccccctgttcgtgcagctattgtattcacctattgagaatattcaaagagttgctgccggcgtgctctgcgagctcgcacaggacaaggaagcagccgaggctatcgaggcagagggagcaacagcacctttaacagagcttctgcattcccgtaacgaaggagttgccacctacgctgccgccgtgcttttccggatgagcgaggacaaacctcaggactacaagaagcgtctctccgtggagctgacctcatctctgtttcgaaccgagccgatggcttggaatgagactgccgacctggggcttgacataggtgcccaaggtgagccacttggttataggcaggacgacccctcatacagatctttccatagcggtggatatggtcaggacgccctggggatggacccaatgatggagcacgagatggggggacatcacccgggcgcagactaccctgtggacggccttcccgacctgggacacgcacaagatttaatggatggtctgccacccggcgactccaatcaactcgcctggtttgacacagatctgtag

SEQ ID NO: 23358 - DNA, 2346 bp, synthetic construct
  misc_feature 1..2346: note = Description of Artificial Sequence: Synthetic coding sequence
  source 1..2346: mol_type = other DNA
atggccacccaggccgacctgatggagctggacatggccatggagcccgaccgcaaggctgcagtgtcccattggcagcagcaatcctaccttgattccggcatccactccggggcaaccaccacggccccttccctaagcggcaagggcaacccagaagaggaagatgttgacacaagccaggtcctatacgaatgggagcagggattcagtcagagctttacacaagaacaggtggccgatattgatggccagtacgctatgacaagggcacagcgcgttcgcgccgctatgttccctgaaactctcgacgagggaatgcaaattccaagtacccagttcgatgcggcacacccgacaaacgtccaacgcttggctgaaccaagccaaatgcttaaacatgccgttgtgaatctgattaactaccaagacgacgcggaattggccacaagggcaataccggagcttaccaagctcttaaacgacgaagaccaggtagtcgttaacaaggcagctgttatggtccaccagttaagcaagaaggaggccagcaggcacgcaatcatgcggtcaccacaaatggtgtccgcaattgtcaggacaatgcaaaatactaacgacgtggagactgcgcgctgcacagctgggactctgcacaatctgagccaccaccgggagggactgcttgcaatattcaaaagtggcggcattcctgccctagtgaaaatgctgggatctccggttgacagcgttctgttctacgctataacaactctgcacaatctgctcctccatcaggagggcgccaaaatggccgtgaggctggccggcggactccagaaaatggtggccctgcttaataaaaccaacgtgaaattcctcgccatcaccaccgattgcttgcagatcttggcgtacggtaaccaggagagtaaactcataattctggccagtggagggccccaggcactggttaacatcatgcgaacatacacttacgaaaaactcctctggactaccagccgcgtcctaaaggtgctctccgtatgctcgtccaacaagcctgcaatagtggaggcgggaggaatgcaggcactgggccttcatttaactgatccatcccagcgcctggtccaaaactgcttatggacacttcggaacctatccgatgcggccacaaaacaggaggggatggagggtctcctagggactcttgtgcagcttctgggaagcgatgacatcaacgtcgtgacctgcgccgctggaatcctgtctaaccttacatgcaataattacaaaaataaaatgatggtctgtcaggtgggtggaatcgaagccctggtaagaaccgttctgcgagccggcgaccgggaagatataactgaacccgctatttgtgccctgcggcacttgacgtcacgccaccaagaggctgagatggcccagaacgctgtgcgcctgcattatggcctgccagtggttgtgaaactcttacacccaccaagccattggcccctcatcaaagccacagtgggcttaatcaggaacttagccctctgcccagccaatcatgctcccttgcgagagcagggcgcaatacccagactggttcaattgctcgtacgagctcaccaagatacccagcgccgtacaagcatgggtgggacccagcagcagttcgttgagggagtgcgaatggaggagatcgtcgaggggtgcaccggagcccttcatatactcgcgagagatgtccacaacaggattgtcattcgcggcctgaataccataccactgtttgttcagcttctgtattcccccattgaaaacattcagagggtggccgccggtgtgctgtgcgagctagcccaggataaagaggccgctgaggcaatcgaggccgaaggagctacagcccccttaacggaactgctacacagccggaatgagggagtggccacctacgctgcagctgtcctgtttcgcatgtctgaggataagccccaggactataaaaagagactttcagtggaactgacttctagcttgtttcgaaccgagcctatggcctggaacgagaccgccgacttaggtctcgacatcggtgcacagggtgagcccttgggctaccggcaggacgatccatcctatcggtctttccattcaggcggctacggacaggatgctctggggatggacccaatgatggagcacgaaatgggcgggcaccacccgggggctgattatcctgtcgacggccttcccgatctcggccacgcccaggacttgatggatggactccctcccggggattcaaaccaactggcctggtttgataccgatctctag

SEQ ID NO: 23359 - DNA, 453 bp, synthetic construct
  misc_feature 1..453: note = Description of Artificial Sequence: Synthetic coding sequence
  source 1..453: mol_type = other DNA
atggccacccaggccgacctgatggagctggacatggccatggagcccgaccgtaaagcagcagtgagccactggcagcagcagagctatctggactctggaatccactccggggctaccactacagccccttcacttagtggaaagggcaatccagaagaggaggacgtggacaccagccaagtgctttatgaatgggagcagggcttctcccagtcttttacacaggagcaggtagctgacatcgacggtcagtatgccatgacccgcgcccagcgggtcagagcggccatgttccctgagactttggatgagggcatgcagattccgtcaacacagtttgatgctgcccatcctacaaacgtgcagaggttggccgaaccctcacagatgttgaagcatgctgtcgtcaacctgatcaattatcaagatgacgctgagctcgctacatag

SEQ ID NO: 23360 - DNA, 42 bp, synthetic construct; identical to SEQ ID NO: 9896
  misc_feature 1..42: note = Description of Artificial Sequence: Synthetic coding sequence
  source 1..42: mol_type = other DNA

SEQ ID NO: 23361 - DNA, 303 bp, synthetic construct
  misc_feature 1..303: note = Description of Artificial Sequence: Synthetic coding sequence
  source 1..303: mol_type = other DNA
atggccacccaggccgacctgatggagctggacatggccatggagccagacaggaaggccgccgttagtcactggcagcagcaatcatatctggattctgggattcactctggcgcaaccaccactgcaccaagtctctctggcaaaggaaaccctgaggaggaagacgtcgacacaagtcaggtgctatacgagtgggagcaaggtttcagtcagtcattcacccaggagcaggttgcagatattgatggccaatacgccatgacaagagcccagagagtcagggctgcaatgttcccttag

SEQ ID NO: 23362 - DNA, 327 bp, synthetic construct
  misc_feature 1..327: note = Description of Artificial Sequence: Synthetic coding sequence
  source 1..327: mol_type = other DNA
atggccacccaggccgacctgatggagctggacatggccatggagcccgaccgaaaagctgccgtgtcacactggcagcagcagtcataccttgatagcggaattcactccggagcaacaaccacagccccctcactcagcggaaagggtaaccccgaggaagaagatgtagacaccagtcaggtactctacgagtgggaacaaggctttagtcagtcttttacacaagaacaggtggctgacatagacggtcagtatgccatgacccgagctcagagagtccgcgcagccatgtttcctgagacgcttgatgaaggaatgcagtag

SEQ ID NO: 23363 - DNA, 2325 bp, synthetic construct
  misc_feature 1..2325: note = Description of Artificial Sequence: Synthetic coding sequence
  source 1..2325: mol_type = other DNA
atggagctggacatggccatggagcccgaccggaaggccgccgtgtcacactggcagcagcaatcataccttgactcgggcatccattcaggtgccactaccaccgccccgtccctcagtggcaaagggaatccggaagaagaagatgtggatacctcccaggtgctctatgaatgggagcagggtttttcacaatccttcacccaggaacaggtggctgacatcgatggacagtacgctatgacaagggcacaaagggtgcgtgcagctatgttcccggagacactggacgaaggcatgcagataccctctacacagtttgatgcagcccaccccactaatgtgcagagactagccgaacctagccagatgctcaagcacgcagtcgtgaacctgatcaactaccaggatgacgctgaactagcgacccgtgcaatccctgagctgactaaattattgaatgatgaggaccaggtggtggtgaacaaagccgctgtgatggtccaccagctatctaaaaaagaggcctcaagacacgccatcatgcggagcccccagatggtgtcggccatcgttcgcacaatgcagaacactaacgatgttgagactgcacgatgcactgctgggacgctgcacaatttaagccatcacagagaggggctccttgccatcttcaagtctggaggtatccctgcccttgtgaagatgctcgggtctcctgttgactcagtccttttctatgcaatcactactttgcacaatctgcttctacaccaggaaggagcaaaaatggccgtgcgcctggcaggcggactccagaaaatggtcgccctcctgaacaaaacaaatgtgaagttcctggctattaccacggattgtctccagatcctcgcgtacggaaaccaagagtccaaattgataattcttgcctccggggggccacaagccttagtgaacataatgcgcacctacacttatgaaaaactcctgtggaccacaagccgcgtgcttaaggtactcagtgtgtgctccagcaacaagccagcaatagtggaagcaggcgggatgcaggccctaggtcttcacctgactgacccgtcacagcgcctggttcaaaattgcctgtggaccctgcgtaacctgagtgacgcagccacgaagcaggagggaatggaaggcctcttagggaccttagtgcagctgctcggcagcgacgacatcaacgttgtgacttgcgcagccggcattctgtccaatctcacctgtaataattacaagaataaaatgatggtttgtcaggttggagggatcgaggctttggtgaggactgtcttacgggctggggatcgtgaggacataaccgagccagctatctgtgcactgcgacaccttaccagccgccaccaggaagccgaaatggcgcaaaacgcagtgagattacattacggcctcccagtggtggtgaagctgttgcaccctccttctcattggccgttgattaaagccaccgtaggcctgatacggaatttagccctgtgtcccgcgaatcacgctcccctacgcgagcaaggggcaattccaaggctcgtgcagctactggtaagggcacaccaggacacgcagcgaagaacctcaatgggcggaactcagcaacaatttgtcgaaggggtgaggatggaggagattgtcgaaggctgcaccggagcattgcacatcctcgctagggatgtgcacaacaggatagtcatccgagggctcaatacaattcctctctttgtgcagctcctgtatagcccgattgagaacatccagcgcgtcgccgctggagtgctgtgcgaactggcacaggacaaggaagccgccgaagccatcgaagccgagggagccacagcccccctgacggaactgctacacagccggaatgaaggtgtcgcaacctacgcagctgcggtattattcaggatgtccgaggacaagcctcaagattacaaaaaaagactatcagtggaactgactagcagtctgtttaggaccgagcccatggcgtggaatgagacagcagacctgggtctagacattggagcacagggggagccgctggggtacaggcaggacgaccccagttaccgtagttttcatagtggtggctacgggcaggatgcccttggaatggatcccatgatggagcatgaaatgggagggcatcatcccggcgcggattaccctgtggatgggctgccggacctgggacatgctcaggacctcatggacggcctgccacctggtgacagcaaccagttggcatggttcgacaccgatttatag

SEQ ID NO: 23364 - DNA, 1020 bp, synthetic construct
  misc_feature 1..1020: note = Description of Artificial Sequence: Synthetic coding sequence
  source 1..1020: mol_type = other DNA
atgtggcagctgtgggccagcctgtgctgcctgctggtgctggccaatgctcgatccagaccttctttccaccctctttccgacgaactggtgaattacgtgaacaaaagaaacacaacatggcaagctggtcacaatttttataacgtggatatgtcctatctgaagcgcctatgtgggacctttctgggtggcccaaaacctccacagagagtgatgtttacagaggatttgaagcttcccgccagtttcgacgctagggagcaatggccacagtgtcctactattaaggagattcgggatcagggcagctgtggcagttgctgggcctttggtgccgttgaagccatctcagaccgaatctgtatccataccaatgctcatgtgtccgtcgaggtgagtgcggaagatctcttgacatgttgcggcagtatgtgtggcgacggctgtaacggaggataccctgcagaggcctggaacttctggaccagaaaaggactcgtctctgggggattgtacgagagccacgtcggctgccggccttattccattcccccgtgcgagcatcacgttaacggtagcaggcctccttgtacaggtgaaggggatacgcccaagtgtagtaagatatgcgagcctggctattcacctacttataagcaagataaacactacggttataattcttactccgtgtcgaactcggagaaggacatcatggccgaaatctacaagaacggccccgtcgaaggggctttttccgtttattcagacttccttctttataaaagtggagtgtaccagcacgtgacaggggaaatgatgggcggccacgcaatacggatcttgggatggggcgtggaaaacgggaccccttactggctggtggcaaactcctggaacaccgactggggtgacaatggattttttaaaatactcagaggacaggatcactgcggtattgagtccgaagtggtagctggcatcccccgtaccgatcagtactgggagaaaatctag

SEQ ID NO: 23365 - DNA, 1020 bp, synthetic construct
  misc_feature 1..1020: note = Description of Artificial Sequence: Synthetic coding sequence
  source 1..1020: mol_type = other DNA
atgtggcagctgtgggccagcctgtgctgcctgctggtgctggccaacgctcggtctcgaccttcctttcaccctttatcagacgagctcgtaaactacgtgaacaaacgtaacacgacctggcaagccggtcacaacttttacaatgttgatatgtcgtacctcaagcgcctgtgcggaacctttcttgggggtcccaagccccctcaacgagtgatgtttacagaggatctaaaattgcccgcatcgtttgacgcacgggaacaatggccacagtgccccactattaaggaaatccgggatcagggatcatgtggaagctgctgggccttcggggccgtggaggcaatatccgatcgaatctgtatacacacaaatgctcatgtgtctgttgaagtgtcagccgaagatctgctcacttgctgcggatcgatgtgtggtgatggctgcaacggaggctatccagctgaggcttggaatttctggacacggaaaggcctggtgagtggcggcttgtacgagagccacgtcggctgtagaccctactcgatccccccttgcgagcaccacgtaaatgggagtagacctccatgtaccggggagggagacactccgaagtgttcaaagatctgcgagccaggttattcaccaacatacaagcaggataagcattatggctacaattcctactcagtgtcaaattccgagaaggatataatggctgagatttataaaaatggaccggtggagggggctttttcagtgtactccgacttcctgctctacaagtcgggtgtgtaccaacacgtcaccggggagatgatgggcggtcacgcaattaggatcctgggctggggggtcgagaacgggactccatactggctagtggccaactcctggaacacagattggggcgataacgggttctttaaaatacttagaggccaagatcactgcggcatagaatctgaggtggtcgccgggatacccaggacggaccagtattgggaaaaaatatag

SEQ ID NO: 23366 - DNA, 333 bp, synthetic construct
  misc_feature 1..333: note = Description of Artificial Sequence: Synthetic coding sequence
  source 1..333: mol_type = other DNA
atgtggcagctgtgggccagcctgtgctgcctgctggtgctggccaatgctcgctccagaccttcttttcacccactgtccgacgagctggttaattatgttaacaagagaaatactacatggcaggcaggacataatttctacaatgtcgatatgtcctatctgaagaggctgtgtggtacctttctaggggggcccaagccccctcagagagtaatgttcaccgaagatctaaagctgccagcctcctttgacgctcgggaacagtggccccagtgccctacgattaaagaaattcgagaccagggtagctgtggctcttgctggctgtag

SEQ ID NO: 23367 - DNA, 1020 bp, synthetic construct
  misc_feature 1..1020: note = Description of Artificial Sequence: Synthetic coding sequence
  source 1..1020: mol_type = other DNA
atgtggcagctgtgggccagcctgtgctgcctgctggtgctggccaacgcccggtctagaccctcatttcatccattaagcgacgagttagtgaactacgtgaataagcgtaatacaacttggcaggccgggcataatttttacaatgtagatatgagctatctgaagcgcctttgcgggacatttctgggtggacctaagccacctcagcgagtgatgttcaccgaggacttaaaactccccgcctctttcgatgcacgcgagcagtggccccagtgccctacaatcaaagagatccgcgatcagggatcttgtgggtcatgctgggcatttggcgctgtggaagctatttcggatcgcatttgtatacacaccaatgcccatgtgtccgtcgaggtatcagcggaagacctgcttacctgttgcggctcaatgtgtggggacggctgtaacggcggctaccccgctgaagcgtggaacttttggacacgtaaaggactcgtgagcggggggctgtacgagtctcacgtgggctgtcggccttattctatccctccctgtgaacaccatgtaaacggctccaggcctccctgtaccggggagggagatacacccaagtgctctaagatttgcgagcctggatatagccctacttacaagcaggacaaacactacgggtataattcctacagcgtatcgaatagtgaaaaggacatcatggccgagatttataagaacggccctgttgagggcgccttcagtgtttacagcgattttcttctttacaaaagcggggtctaccagcatgtgactggtgagatgatggggggacatgcgatccggatcctgggctggggtgtggaaaacgggaccccctactggttagtggccaattcttggaacaccgactggggcgacaacgggttctttaaaatcctgagagggcaagatcactgtgggatcgaatctgaggtggtagcaggcatcccgaggacagaccagtactgggagaaaatctag

SEQ ID NO: 23368 - DNA, 1020 bp, synthetic construct
  misc_feature 1..1020: note = Description of Artificial Sequence: Synthetic coding sequence
  source 1..1020: mol_type = other DNA
atgtggcagctgtgggccagcctgtgctgcctgctggtgctggccaacgccaggagtcgcccaagttttcatcccctctccgacgagcttgttaactacgttaacaagagaaacaccacctggcaggcaggccataacttctacaatgtggatatgtcctacttgaaaaggctctgtggcaccttcctcggcgggcctaagccaccgcagcgggtgatgttcacagaagatctgaagttgcctgcatcatttgacgcgcgcgagcagtggccccaatgtcctaccattaaggagattcgcgaccagggctcctgtggctcctgctgggccttcggcgccgtcgaagctattagtgatagaatctgtatccataccaatgctcatgtgagtgtggaagtgagcgcagaggatctcctgacctgttgtggatcgatgtgcggggacggatgcaacggcgggtaccctgccgaggcttggaatttctggacccgcaaggggctggtgagcggaggtttatacgagtcacacgttgggtgtcggccttacagcatccctccttgcgaacatcatgtgaatggatccagacctccatgcactggcgaaggcgatacccctaaatgcagcaagatatgcgaaccaggctattccccgacttataagcaggacaagcattacgggtataatagctactcagtgtctaattcggagaaggacatcatggccgaaatctataagaacggacccgtggagggcgcattttctgtgtactccgatttcttgttatacaaatctggcgtgtaccagcatgtgaccggcgaaatgatggggggacatgctattcgtattctgggatggggcgtggagaatggcaccccttattggctggttgcgaactcctggaataccgattggggggacaatggtttcttcaaaattctgagaggccaggatcactgcggtatcgagtccgaggttgttgctgggattccaagaaccgaccaatactgggagaaaatatag

SEQ ID NO: 23369 - DNA, 1020 bp, synthetic construct
  misc_feature 1..1020: note = Description of Artificial Sequence: Synthetic coding sequence
  source 1..1020: mol_type = other DNA
atgtggcagctgtgggccagcctgtgctgcctgctggtgctggccaacgctagatctcgtccttcatttcatcccttgtcagatgaattagttaactatgtaaataagcgaaatacaacgtggcaagccggccacaacttctataatgtcgatatgtcctaccttaagcgcctgtgtgggacttttttaggaggccccaaacctccccagcgggtcatgtttaccgaagatttaaaactcccggcttcattcgacgcccgagaacaatggccacagtgcccgaccattaaggagatacgcgatcaaggcagctgcggtagctgttgggccttcggtgccgtggaagcaatttccgatcgaatttgcatacataccaatgcccacgtgagcgtcgaggtgagtgccgaggacttgctcacatgttgcggctcaatgtgcggcgacggctgcaatggcggatatcctgctgaagcctggaacttctggactaggaagggcctcgtcagcggaggactttacgagtcccatgtgggctgccggccgtatagcattccgccatgtgagcaccatgtaaacgggtcaaggcccccttgtacaggcgaaggagacacacctaaatgtagcaagatctgtgaaccagggtatagccctacctataaacaggataagcactacggatacaattcttatagtgtgagcaactctgagaaagacatcatggccgagatctacaagaacggccccgtcgagggcgcgttttccgtgtattcagatttcctgctgtacaaatcaggagtgtaccaacatgtgactggagaaatgatgggtggtcacgcaattagaattttgggttggggcgttgagaacgggacaccttattggctggttgcgaatagctggaacacggactggggcgacaatggcttcttcaaaatcttgaggggccaagaccactgcggtatcgagtctgaggtggtggctggaatacctaggaccgatcagtactgggagaagatctag

SEQ ID NO: 23370 - DNA, 1020 bp, synthetic construct
  misc_feature 1..1020: note = Description of Artificial Sequence: Synthetic coding sequence
  source 1..1020: mol_type = other DNA
atgtggcagctgtgggccagcctgtgctgcctgctggtgctggccaacgcacgcagccggccatcattccaccctctgagcgacgagctggtcaattatgtaaacaaacgaaacactacatggcaggcaggacacaacttctacaatgtcgacatgagctacctcaaaagactttgtgggacttttctgggaggccccaaacccccccagcgtgtgatgttcactgaggatcttaagttgcccgcaagcttcgatgctagagagcagtggccacagtgccccaccatcaaagaaattcgggaccagggctcttgtgggagctgttgggcctttggcgctgtggaggcaatatctgaccgtatttgtattcacacgaatgcacatgtttccgttgaagtatctgctgaggacctcttgacttgttgtggctccatgtgcggtgacggatgtaacggcggatacccagctgaagcctggaatttctggacccgcaaggggcttgtttctggtggcctttacgaatcgcacgttggttgtcggccctactcaatcccgccgtgcgaacatcatgttaatggaagtaggccgccatgcacgggcgaaggcgacacacctaagtgttctaagatctgcgaaccgggatactcaccgacctataaacaggataagcattacggatataatagttattccgtgtcgaacagtgagaaggacatcatggccgagatctacaaaaacggacccgtcgagggcgctttttccgtttatagtgattttttactttacaagagcggcgtctaccagcatgtcacaggagagatgatgggcgggcacgcgatcaggatactcgggtggggtgtggaaaacggcactccttattggctcgtagctaactcatggaacacagactggggcgacaacggctttttcaaaatcctcagggggcaagatcactgcggcatcgaaagcgaagtggtcgcagggatcccccggacagaccagtattgggaaaaaatttag

SEQ ID NO: 23371 - DNA, 1020 bp, synthetic construct
  misc_feature 1..1020: note = Description of Artificial Sequence: Synthetic coding sequence
  source 1..1020: mol_type = other DNA
atgtggcagctgtgggccagcctgtgctgcctgctggtgctggccaacgcccgctcaaggccctctttccatccactgagtgacgagctcgtcaactacgtcaacaagagaaataccacatggcaggctggccacaatttctacaacgtcgacatgagttatttgaaacgcctgtgtggcaccttccttggtggtcccaagcctccccagcgcgtgatgttcaccgaggacctgaagttacctgccagcttcgacgccagagaacaatggccacagtgccctacaattaaagagattcgagaccaaggaagttgcgggtcctgctgggcctttggggccgtcgaggcgataagtgaccggatatgcattcataccaacgcacatgtaagcgtggaggtgtccgctgaagatctcttgacctgctgtggctccatgtgcggcgacggctgtaacggggggtaccctgcagaagcttggaatttttggacgaggaagggcctagtctccggaggcctgtacgagtcacacgtgggctgccgtccctatagtattcctccttgcgagcatcacgtgaacggcagcagaccgccttgtactggagaaggtgacacaccaaagtgttccaagatctgcgagccgggctattctcctacatacaagcaagataaacactatggctacaattcctatagcgttagcaatagcgagaaagatataatggccgagatttataagaatggacccgtcgaaggcgcgtttagcgtgtactctgactttctgttgtataagagcggggtgtaccagcatgtgacaggcgaaatgatggggggccacgccatcagaatacttggatggggagtggaaaatgggactccatactggcttgtggctaattcttggaacaccgactggggcgataatggctttttcaaaatcctcagggggcaagaccattgtggcattgaaagtgaagtggtggcagggatcccacgcacagaccagtactgggaaaaaatctag

SEQ ID NO: 23372 - DNA, 1020 bp, synthetic construct
  misc_feature 1..1020: note = Description of Artificial Sequence: Synthetic coding sequence
  source 1..1020: mol_type = other DNA
atgtggcagctgtgggccagcctgtgctgcctgctggtgctggccaacgcccgcagccggcccagctttcacccgttgagcgatgagctcgttaactacgttaacaagcgcaatacaacttggcaagccggacacaatttctataacgtagatatgtcgtacctgaagagactctgtggtacgtttttgggcggcccgaagcctccccaacgcgtaatgtttactgaggacctgaagttacctgccagtttcgacgccagagaacagtggcctcaatgccccacaatcaaggaaattagggatcaaggaagctgcgggtcatgctgggcctttggggctgttgaagccatttccgaccggatatgtattcacaccaatgcacatgtatccgtagaggtgtccgcagaagatctgctgacctgttgcggttcaatgtgtggtgatggatgtaatggcggctatccagccgaggcgtggaatttctggacccggaaggggcttgtgagcggagggctctacgaatctcacgtggggtgcaggccttactctattccgccttgcgaacatcatgtgaatggtagcagacccccctgcaccggggagggcgacaccccgaagtgttccaaaatctgcgaaccaggctattcccccacctataagcaggacaaacattacggatataacagttattctgtctccaacagcgaaaaggatattatggccgaaatctacaagaacggaccagtcgaaggagccttcagcgtttattcggattttctgttgtataagagcggggtttatcaacatgtgacaggcgagatgatgggagggcacgcaattcggatactgggctggggcgtggagaacggcaccccctattggctggtagcgaacagttggaacacggattggggcgacaacgggttcttcaaaatccttcgagggcaggatcactgcggcatcgaatctgaagtcgtcgcaggaatcccaagaacagaccagtactgggagaagatttag

SEQ ID NO: 23373 - DNA, 831 bp, synthetic construct
  misc_feature 1..831: note = Description of Artificial Sequence: Synthetic coding sequence
  source 1..831: mol_type = other DNA
atggacatgaaccggcgggccagctgcctgctgcccgacctgtgcggccagggctgggggtggcgcctgttcccagctagctgcgcttatcttggctctgttccctggcgcgtgtggggattggggggcctgctggcacctctcgccgcggcaggtggaggttccactagtgggctgggacatctgggtagcacacaatggtctggtgagctcgtcgttctcttaagtgaggtcttcataagaggctgtcttttcagctgcaatggcggttatccagccgaggcttggaatttctggacacggaaggggctggtgagcggagggctgtatgaaagccacgtcggctgcaggccatattctattcctccttgtgagcatcacgtcaatgggagtagacccccgtgtacgggggagggcgatactcccaaatgtagcaaaatatgtgagcctggttattcaccgacctacaaacaagataagcactatggctacaatagctattctgtgtccaattctgagaaagacattatggctgaaatatataagaacggacccgttgagggcgcattttccgtatacagtgactttctgctttataagagcggtgtataccaacatgtgaccggcgagatgatgggaggccatgctattagaatcctgggctggggagtggagaacgggaccccctactggctggtcgccaacagctggaacaccgattggggagataatggcttctttaaaatcctacgggggcaggaccattgcggaatcgagagcgaggtggtggctggtattccgcgtacagaccagtattgggagaaaatttag

SEQ ID NO: 23374 - DNA, 738 bp, synthetic construct
  misc_feature 1..738: note = Description of Artificial Sequence: Synthetic coding sequence
  source 1..738: mol_type = other DNA
atgcccggcgccggccccctgagcatcccctgccggatgagctgggctttcggtgctgttgaagccatctctgatagaatttgtattcacactaatgctcacgttagtgtcgaggtgagcgctgaggacctgctgacctgctgcggctctatgtgcggcgacggatgtaatggtggctaccccgctgaggcctggaatttttggactcgtaagggcttggtgtcagggggactctacgaatcacacgtcgggtgtcgcccatattccatccctccttgcgagcaccacgtgaacgggagcagacccccatgtacaggcgagggcgacactccaaaatgtagcaaaatctgtgaaccaggctactcacccacttataagcaagacaaacattatggctacaactcctatagcgtgagcaattccgaaaaagatataatggcggaaatttacaaaaacggaccggtcgaaggcgctttttccgtgtactctgatttcctcctgtacaagtctggcgtatatcaacacgtgaccggagaaatgatgggaggtcacgccatcaggattctcggatggggcgtcgaaaatgggactccctactggctggtagctaacagttggaacaccgactggggcgacaatgggttcttcaagattttgcggggccaggatcactgtggaatcgagtcagaggttgtggctggtatacctaggaccgaccagtattgggaaaagatttag

SEQ ID NO: 23375 - DNA, 1239 bp, synthetic construct
  misc_feature 1..1239: note = Description of Artificial Sequence: Synthetic coding sequence
  source 1..1239: mol_type = other DNA
atgcagcccagcagcctgctgcccctggccctgtgcctgctggccgcacctgccagcgctctggtgcgcattcccctccacaagtttacctctatacgcagaacaatgtctgaagtaggcggaagcgtggaagacctgatagctaagggccccgtgagtaaatactcccaagctgtgcctgcagttaccgaaggtcccattccggaggttctgaaaaactatatggacgcccaatactatggcgaaattgggattggaacaccgccacagtgttttaccgtcgtgtttgacacaggatccagcaacctgtgggtaccgtctatccattgcaaattactggacattgcctgctggatccaccataaatataactctgataaatccagcacctatgtcaagaatggcacatcttttgatatccactatgggtctgggtccctttctggctatctcagccaggacactgtatccgtgccttgtcagtctgcgtcttctgcctcagcactgggcggggtgaaagtagagaggcaagtgttcggtgaggccacgaaacagcccggcatcacgttcattgccgccaaattcgatggaattctgggtatggcatatccgagaatatctgtcaataatgttctgccagtgttcgataaccttatgcagcagaagctggtcgaccaaaatatcttttcattctatctttcccgagacccagacgctcagcccggtggcgaacttatgctgggcggaaccgactcaaagtactacaaggggagcctttcatatttaaacgtaaccagaaaggcttactggcaggtacatctcgaccaggttgaggtagctagcggtctgacattatgcaaggagggatgcgaagccatcgtggacacgggaacaagcctgatggtgggcccggtggatgaagtgcgcgaactgcaaaaagccattggtgctgttcccctgattcaaggcgaatatatgattccctgcgagaaggtgtctactctgccggctataacattaaagttgggagggaaggggtacaaactctctccagaggattatacgctgaaggtaagtcaagccgggaaaaccttgtgtttgtcaggcttcatgggcatggatatcccaccgccctctgggccactatggatccttggtgacgtcttcattggacgctactacaccgttttcgacagagataataatagagtcggattcgcggaggctgctcgtctctag

SEQ ID NO: 23376 - DNA, 1002 bp, synthetic construct
  misc_feature 1..1002: note = Description of Artificial Sequence: Synthetic coding sequence
  source 1..1002: mol_type = other DNA
atgaaccccaccctgatcctggccgccttctgcctgggcatcgccagcgccacactcacatttgatcactcgcttgaggcccagtggaccaaatggaaagcaatgcacaaccggctatatgggatgaacgaggaggggtggcgcagggcagtctgggaaaaaaacatgaagatgattgaactgcacaaccaggagtatcgagagggcaaacacagctttaccatggccatgaatgccttcggggacatgaccagcgaggaatttcggcaggtgatgaatgggttccaaaacaggaagccccgaaaagggaaggtttttcaagagccgctgttttatgaagctccccggtccgtcgattggagagaaaagggttatgttaccccggttaagaatcaggggcagtgtggcagctgttgggcgttcagcgccacaggggctctggagggccagatgttcaggaagacagggcggctcatatcactgagcgaacagaacctagttgactgctctggtccgcaggggaacgaaggttgcaatgggggtctgatggactatgcgtttcaatatgtgcaggataacggcggtctggatagcgaggaaagctacccatatgaagctacagaagagtcatgcaaatacaatccaaagtactcggtcgctaacgacactggattcgtggatatcccaaaacaggaaaaggctctgatgaaagccgtggccacagtcggtcccattagtgtggctatcgatgctggtcacgaaagtttcttgttctacaaggaagggatctactttgaaccagattgttcatccgaagacatggaccacggcgtgctggttgttggatatggcttcgaatcgactgaaagcgataacaataaatattggctggtcaaaaattcctggggagaggagtggggcatgggtggatacgttaaaatggctaaagaccgccggaatcactgcggcatcgcgagcgcggccagctacccaaccgtgtag

SEQ ID NO: 23377 - DNA, 678 bp, synthetic construct
  misc_feature 1..678: note = Description of Artificial Sequence: Synthetic coding sequence
  source 1..678: mol_type = other DNA
atgaaccccaccctgatcctggccgccttctgcctgggcatcgcctctgcaacattgacctttgatcactctctggaggcccagtggactaagtggaaggcaatgcacaaccgcttgtatggcatgaatgaagaggggtggcggcgggccgtgtgggaaaagaatatgaaaatgatagaactccataatcaagaataccgcgaaggtaaacattcattcaccatggccatgaatgcttttggagacatgacctctgaggagtttcgacaggtgatgaacggctttcagaatcggaaaccaaggaagggcaaagtgtttcaagaacccttattctacgaggccccgagatccgtcgattggcgtgagaaggggtatgtgacacccgtaaaaaatcaggggcagtgtgggtcttgttgggcgttctctgcaactggcgctctggaagggcagatgttcaggaaaaccgggaggctcatttcattgagtgaacagaaccttgtcgactgttccggtccacagggaaacgagggctgcaacggaggactgatggattatgcatttcaatacgttcaggacaacggcggcttagactctgaggagagctacccatatgaggccacagtgtccggagctccatgccatcattctagctcggcatttgggcggtggaccctgtag

SEQ ID NO: 23378 - DNA, 1002 bp, synthetic construct
  misc_feature 1..1002: note = Description of Artificial Sequence: Synthetic coding sequence
  source 1..1002: mol_type = other DNA
atgaaccccaccctgatcctggccgccttctgcctgggcatcgccagtgcgacactgacattcgatcactctctcgaagctcaatggaccaagtggaaggccatgcacaaccggctgtatgggatgaacgaggaaggctggaggagggcggtgtgggaaaaaaatatgaagatgatcgagctgcacaaccaggagtaccgggaaggaaagcacagttttacaatggcgatgaacgcttttggagatatgactagcgaggagttccggcaggtcatgaatgggtttcagaatagaaagccacgcaagggaaaggtgttccaagagcctctgttctatgaagctcccagatccgtcgattggagagagaagggatatgtcacaccagtgaagaaccaaggacagtgcggatcctgttgggctttcagtgccacaggtgcattggagggacagatgttcaggaagacgggaagactgattagtttaagtgaacagaatctcgtcgactgcagcggcccacaagggaacgagggttgcaatgggggactgatggactacgcctttcagtacgttcaggataatggaggccttgattccgaggaatcatacccctatgaggccacagaggaatcatgcaagtacaacccaaagtattcggtggcaaatgacactggatttgtagacatccccaaacaggagaaggctttaatgaaggctgtcgcaactgtgggacccatatcagttgcgattgacgccggtcatgaaagctttctattctataaggagggcatctacttcgaacccgactgttcaagtgaggacatggatcacggcgtcctcgtggttggctacggatttgaatctaccgaaagtgataataacaaatactggctcgtaaagaattcatggggcgaggaatggggaatgggtgggtacgttaagatggctaaagaccggcgtaatcactgcggaatcgcaagtgccgcaagctacccgaccgtgtag

SEQ ID NO: 23379 - DNA, 120 bp, synthetic construct
  misc_feature 1..120: note = Description of Artificial Sequence: Synthetic coding sequence
  source 1..120: mol_type = other DNA
atgaaccccaccctgatcctggccgccttctgcctgggcatcgcctcagccaccctcacattcgaccacagtctggaagcacagtggactaaatggaaggctatgcacaacaggttatag

SEQ ID NO: 23380 - DNA, 444 bp, synthetic construct
  misc_feature 1..444: note = Description of Artificial Sequence: Synthetic coding sequence
  source 1..444: mol_type = other DNA
atggccgacgagctgagcgagaagcaggtgtacgacgcccacaccaaggagattgacctggtgaatcgagacccaaagcacctgaacgatgacgtcgtaaaaatcgactttgaggatgtgattgcagagccagaaggcacgcatagttttgatgggatttggaaagccagctttacaacatttaccgtgacaaagtattggttctataggctactttccgcgttgtttggcatcccaatggcactgatctggggcatttactttgcaattcttagcttcctgcatatctgggctgtggtaccctgcattaagagcttcctcattgaaatccagtgcatttctagggtgtatagcatatatgtgcacacggtgtgtgaccccttatttgaagccgtgggcaaaattttctccaatgtgcgaattaatctccagaaggaaatttag

SEQ ID NO: 23381 - DNA, 444 bp, synthetic construct
  misc_feature 1..444: note = Description of Artificial Sequence: Synthetic coding sequence
  source 1..444: mol_type = other DNA
atggccgacgagctgagcgagaagcaggtgtacgacgcccacaccaaggagatcgatctggtcaacagggatcctaagcacctgaatgatgacgtggtgaagatcgatttcgaggacgttatcgccgagccagaaggaacacattcattcgatggaatatggaaagcctcttttacaactttcactgtcaccaagtattggttttacagactactgtctgccctgttcggcatccctatggctcttatatgggggatatactttgccatcctttccttcctacacatctgggctgtggttccatgtatcaagagtttcctgatcgaaatccagtgcatctctcgcgtgtacagcatctatgttcacactgtgtgtgatcctctttttgaagctgtgggcaagattttctccaacgtaagaatcaatctgcagaaagagatatag

SEQ ID NO: 23382 - DNA, 537 bp, synthetic construct
  misc_feature 1..537: note = Description of Artificial Sequence: Synthetic coding sequence
  source 1..537: mol_type = other DNA
atgagcggcggcaagtacgtggacagcgagggccacctgtacaccgtccctatccgggaacaagggaacatatataaacccaacaacaaggctatggccgatgaactaagcgagaaacaggtttatgatgcccacacaaaggagattgaccttgtaaatcgagatcccaaacacctcaatgacgatgtcgtaaagatagatttcgaggatgtgatcgctgagcctgaaggaacccattcttttgatgggatttggaaagccagcttcactacattcaccgtgactaagtactggttttatcggctgctgagcgcgttgtttggtatccctatggccttgatttgggggatttacttcgccatcctgtctttccttcacatttgggccgtcgtaccttgcattaaatctttcttaattgaaatacaatgcatttcaagggtctactcgatctacgtgcacaccgtgtgcgaccccctgttcgaagccgtgggaaaaattttcagtaacgtcaggattaatttgcaaaaagagatctag

SEQ ID NO: 23383 - DNA, 345 bp, synthetic construct
  misc_feature 1..345: note = Description of Artificial Sequence: Synthetic coding sequence
  source 1..345: mol_type = other DNA
atggccggcggcaaggccggcaaggacagcggcaaggccaaggccaaggcagtttcccgcagccagcgagctggcctgcagttcccagtaggaagaatacaccgtcatttaaaaaccagaactaccagtcatggccgcgttggcgctaccgccgcggtgtattctgccgccatactggagtatctgacagcggaggttcttgagctggctggaaatgccagcaaggatctcaaggtgaaacggatcacacccaggcacctgcagctcgccataagaggcgacgaggagctggattccctgattaaagccacgatcgctgggggagagaagcggcgctgcagctag

SEQ ID NO: 23384 - DNA, 339 bp, synthetic construct
  misc_feature 1..339: note = Description of Artificial Sequence: Synthetic coding sequence
  source 1..339: mol_type = other DNA
atgggcctggagaccgagaaggccgacgtgcagctgttcatggacgatgacagttactcccatcatagtggcctcgagtacgcagatccagaaaagttcgccgatagcgatcaggacagagatccccacaggctgaattctcacctgaaggattttaacgctttttgtaaggatttgcctaatgggtccgcgttttcagccgacaacatggaagagtgcgacaggtgttaccattgctcgatcgtctatgaacgcaggaccatgctgctcttttgccaacctgcaaccgagcctgggctaaatacttggaccccaggcctcgaaatcggcattttatag

SEQ ID NO: 23385 - DNA, 342 bp, synthetic construct
  misc_feature 1..342: note = Description of Artificial Sequence: Synthetic coding sequence
  source 1..342: mol_type = other DNA
atgggcctggagaccgagaaggccgacgtgcagctgttcatggacgacgatagctactcccaccatagcgggttagaatacgcggaccctgaaaaatttgccgacagcgatcaggatagggatccacaccgtctgaactcccacttgaaattgggatttgaagatgtaattgcagagcccgttaccactcacagctttgataaggtgtggatatgcagtcatgccctttttgaaatttcaaaatatgtgatgtacaagtttctgacagtgtttctcgccatccccttagcattcatcgcgggaatcctgttcgccacactgtcctgcctacatatttggtag

SEQ ID NO: 23386 - DNA, 1038 bp, synthetic construct
  misc_feature 1..1038: note = Description of Artificial Sequence: Synthetic coding sequence
  source 1..1038: mol_type = other DNA
atgcagcggctggtggcctgggaccccgcctgcctgcccctgccccctcctccccccgcctttaaaagcatggaagtcgcaaatttttattatgaggcagactgtcttgctgcagcatacggtggtaaagccgccccagcagctcccccagccgccagacccggccctcgtccgcccgctggcgagctcggatctatcggtgatcatgaacgcgctatcgacttttctccttacctcgagcccttgggggccccacaggcccctgcccctgccacagcaacagacaccttcgaggctgctccccctgcccccgctcctgcccccgctagctcaggtcagcaccatgactttctgagcgacttgttttctgatgactacgggggcaagaattgcaaaaagcccgcagaatacggctacgtgagcctgggtcgtcttggagccgccaagggcgccctacaccctggatgctttgcccctctgcatccaccgcctccaccaccacccccacccgccgaactgaaagcagaacctggtttcgagcccgcggattgcaagagaaaagaggaagcaggtgcacctggcgggggcgccggcatggcagccggatttccgtatgccctccgagcatacctggggtatcaagcagttccctctggctcttctggaagtctgagtacgtcaagttccagctccccaccaggaaccccttctcccgcagacgcgaaagcgccgcctaccgcctgctatgccggagccgctccagctccgtctcaagtgaagagcaaagccaagaagaccgttgacaagcattccgacgaatacaaaatccggcgcgagcgaaataacatcgccgtgcggaagagccgcgataaggccaaaatgcgaaacctggaaactcagcataaagtgctcgagttaactgctgaaaatgagcgattgcagaaaaaagtcgaacagcttagtcgggagctctctactctgcggaacctgtttaaacagctgcccgaacctctgctggctagtagcggacattgttag

SEQ ID NO: 23387 - DNA, 2184 bp, synthetic construct
  misc_feature 1..2184: note = Description of Artificial Sequence: Synthetic coding sequence
  source 1..2184: mol_type = other DNA
atggagggcgacgccgtggaggccatcgtggaggagagcgagaccttcatcaaaggaaaagaacgcaaaacctatcagaggaggcgggaggggggtcaggaagaggacgcttgtcaccttcctcagaatcagacagatggaggtgaggtagtccaggacgtgaattcgtctgtgcaaatggtgatgatggaacagctggaccctacactcttgcagatgaagaccgaagtgatggaaggtactgtagcacctgaagccgaggctgccgtggacgacacacagataatcactctgcaagttgtcaatatggaggaacagcctattaacatcggggagctccagctggtccaggtgcctgtgccagttacggtgccagtggccacaacctccgtggaagagctccagggcgcctacgagaacgaagtcagcaaggaaggcctcgcagagtccgagccaatgatctgccacacactccccctgcctgagggttttcaggtagtgaaggttggagcgaacggggaggtagaaacgttagagcagggagagttacctcctcaggaagatccttcctggcaaaaagacccggactaccagcctcctgctaaaaagacaaaaaagacaaagaaatcgaagctgagatacaccgaggaaggcaaggacgttgacgtttccgtgtacgactttgaggaagagcagcaggagggcctgctgagcgaagtaaacgcagagaaggtcgtcggtaacatgaaacctccgaagcccactaaaatcaaaaagaagggagttaagaagacatttcagtgcgaattgtgcagctatacctgtccgagaaggagcaacctggataggcacatgaaatctcacaccgatgagcggccacataagtgccatctctgcggacgagcctttaggactgtgactttgttacgcaatcacctaaatactcataccggcacccggccgcataagtgcccagactgtgatatggcctttgtaacttctggtgagttggtgcgccacaggagatataaacatactcacgaaaagccgttcaagtgttctatgtgtgattatgcttctgtggaagtatctaagctaaaacgccacattcgcagccacactggggaacgacccttccagtgcagcttgtgcagttatgcctctagggatacttataagctcaagcgccatatgagaacgcactccggcgagaagccctatgaatgctatatatgtcatgctcgattcacccagagtggcactatgaaaatgcacatactccagaaacacaccgagaacgttgcgaagtttcactgcccgcactgcgacactgtcatagcaagaaagagcgacctaggcgtgcatttaaggaaacagcactcttacatcgaacagggtaagaaatgtagatactgcgacgccgtgtttcatgagaggtacgccctgatacagcaccagaaatctcataagaacgaaaagcgatttaagtgcgaccagtgcgattatgcttgtcggcaggagcgccatatgatcatgcacaaaagaacacacactggggaaaagccttacgcttgttcccactgcgacaagacctttcggcaaaagcagctgctggatatgcactttaagcgctatcatgacccaaactttgtgcccgccgccttcgtgtgcagtaagtgcggcaagaccttcactcggcgcaacactatggccagacacgcagacaactgcgctgggccagatggagtggagggcgagaatggcggagaaaccaagaaatccaaaaggggtcgaaagcgcaaaatgcggagcaaaaaggaggattcatccgatagcgaaaacgccgagcctgatctagatgataacgaggacgaagaagagccagctgtcgaaatcgaacccgagcccgagccacagcccgtaactcctgcccctccacctgcaaagaagcgccggggccgtcccccaggccgtacaaaccaacctaagcaaaaccagccaaccgcgattatccaagttgaggaccagaatacaggggctatcgaaaacattatcgtggaggtgaaaaaagagccggacgcagaacccgcagagggtgaggaagaagaggctcagccggccgctacagacgctcccaacggtgatctgacccccgagatgatcttgtccatgatggaccgatag

SEQ ID NO: 23388 - DNA, 1200 bp, synthetic construct
  misc_feature 1..1200: note = Description of Artificial Sequence: Synthetic coding sequence
  source 1..1200: mol_type = other DNA
atggccttcgtgaccagcggcgagctggtgcggcaccggcggtacaagcacacacacgaaaagccatttaagtgttctatgtgcgattatgcgtccgtggaggtgtctaaattgaagcggcatattagatcccacactggagaaagaccgtttcaatgctctctgtgcagttacgcctcccgcgacacttataaacttaagcggcacatgcgtacgcatagcggcgagaaaccatatgagtgttatatttgtcatgcgcggttcacacagagcggcacgatgaagatgcacattctccagaagcacaccgaaaacgtcgcaaagtttcactgcccgcattgcgacaccgtcatcgctagaaaaagtgacttgggagttcacctgcgtaagcagcattcttatattgaacaggggaagaagtgccgttactgcgatgccgtgtttcacgagaggtatgcgctcattcagcaccagaaatcccacaagaacgaaaagagattcaagtgtgatcagtgcgattatgcctgtcggcaagaacgtcatatgattatgcacaagcgcacccacacaggggagaagccatatgcctgcagccactgtgataagacttttcgacagaaacagttgctggacatgcacttcaaaagataccatgatcctaacttcgtacccgccgcattcgtttgttcaaagtgtgggaagacgttcacccgcagaaacacgatggcgagacatgccgacaactgcgccggacctgacggagtggaaggggaaaatggcggcgaaactaaaaaatcgaagcgaggacgaaaaaggaagatgaggtcaaagaaagaagactcaagtgactctgagaatgcagaacccgacctcgacgataacgaggatgaggaggagcccgctgtcgagatcgaaccggagcctgagcctcagcctgtgacacccgctccacctcccgccaaaaagcggagaggacgtcccccagggagaactaaccagcctaagcagaaccagcctaccgctatcatccaagtggaagatcaaaatacaggcgccatagaaaacatcattgtggaggtcaaaaaagagcctgatgcggaaccagccgagggggaggaggaggaggctcagccggccgctactgatgcaccaaacggagacctgacacctgagatgattctgtcaatgatggatcggtag

SEQ ID NO: 23389 - DNA, 1128 bp, synthetic construct
  misc_feature 1..1128: note = Description of Artificial Sequence: Synthetic coding sequence
  source 1..1128: mol_type = other DNA
atggagcgggccagctgcctgctgctgctgctgctgcccctggtgcatgtgtctgcaacaacccccgagccgtgtgagttggatgacgaggacttccggtgcgtgtgtaatttttccgagccacagccagactggtccgaggcatttcagtgtgtctcagcggtggaggttgaaatccacgcaggcgggctaaatctcgaacccttcctcaagcgggttgatgcagacgctgatcctaggcaatatgctgatacagtaaaggctcttcgagtgagacggctgaccgtgggtgctgctcaggtccccgcgcagctgctagtgggcgccttacgtgtcctagcctactcccggctgaaggaactcacactcgaagatcttaagatcactggtacgatgcctcccctgcctctcgaggctaccggactcgcactgagtagcttgaggctaagaaacgtgtcctgggctaccggcaggagctggctggccgagctccagcagtggctgaagcccgggttaaaagtcctgagcattgcccaggcacacagtcccgccttctcatgcgaacaagtcagagccttccctgccctgacctctttggacctctctgataaccccgggctgggggaacgaggcttaatggccgcactgtgtccgcataaattccccgcaattcagaatttggcactgagaaacaccggcatggaaacacctactggagtctgtgccgcactcgctgctgccggagtccagccccattctctcgatctttcacataattcactgagggccacggtgaatccatctgctccccgctgcatgtggtcctccgcgctcaattctctaaatctttcctttgctgggctggaacaggtcccgaaggggcttcccgccaagcttcgagtgctcgatctaagctgcaatagattaaatagagccccacaaccggacgagcttccagaggtcgacaacctgactctggacggtaacccctttctggtaccgggtacagcgttaccccacgaaggctcgatgaatagcggtgtggtgcccgcatgcgcccggagcaccctgtctgtcggcgtgtccggaacgctggttctgttgcagggcgcacggggttttgcctag

SEQ ID NO: 23390 - DNA, 1128 bp, synthetic construct
  misc_feature 1..1128: note = Description of Artificial Sequence: Synthetic coding sequence
  source 1..1128: mol_type = other DNA
atggagcgggccagctgcctgctgctgctgctgctgcccctggtgcatgtctcagccacaacacctgaaccatgtgaactcgatgatgaggacttccggtgcgtgtgcaacttttccgaaccacagcctgactggtctgaagctttccagtgcgtttctgccgtggaggtggagattcacgccgggggactaaacctggaaccatttctgaaaagggtggatgccgacgctgacccccggcagtatgccgatacggtgaaggcactacgcgttcggcgcctcacagtgggggctgcacaagtcccagctcagcttttggtgggagctctgagggttctcgcctactcacggcttaaagagttgacactggaagacttgaagattacaggcaccatgccacctctccctctcgaggccaccggcctggctctgagtagtttgcggttgcggaatgtgtcatgggctactggccggagctggctcgctgaactccagcaatggctgaagccgggcttgaaagttttaagtattgctcaggctcatagcccagctttttcctgcgaacaggtgcgtgcattccccgctttgacatccctagatctctctgacaatcctggactgggggagagaggcctgatggcggccctatgcccgcacaagtttccagccattcaaaacctggccttacgtaatacaggcatggagacacccactggggtatgcgctgcccttgcagccgctggagtgcagcctcacagtctagatttatctcacaattcacttcgcgccactgtcaatccaagcgcgcccagatgtatgtggagtagcgccctgaattcactgaacctgagtttcgccggcctcgaacaagttcccaagggcctgccagcaaagctccgtgtccttgacctgtcgtgtaatagattgaaccgagcgccgcaacccgatgaactccctgaagtagacaacttgactctggacggcaaccccttcctggtcccaggcacagccctgccccacgagggttctatgaacagcggagtggtgccggcctgtgcccgaagcaccttgtctgtgggcgtgtctgggactctggtccttctccagggcgcaaggggctttgcctag

SEQ ID NO: 23391 - DNA, 402 bp, synthetic construct
  misc_feature 1..402: note = Description of Artificial Sequence: Synthetic coding sequence
  source 1..402: mol_type = other DNA
atgagcttcccctgcaagttcgtggccagcttcctgctgatcttcaacgtgagcagtaaaggtgcggtctcaaaggaaatcaccaacgccctcgaaacctggggggcgttaggccaggacatcaacttggacatcccaagctttcagatgtccgatgacatcgatgacataaagtgggaaaagacctccgataaaaagaagattgcccagttccgcaaggaaaaggaaaccttcaaagaaaaggacacctacaagctgtttaaaaacggaactttgaagataaaacatcttaagaccgatgatcaggacatttataaggtttcaatttatgacaccaagggcaagaacgtcttggaaaagatcttcgacctgaaaatccaaggaaagtgcagtttcccatag

SEQ ID NO: 23392 - DNA, 1056 bp, synthetic construct
  misc_feature 1..1056: note = Description of Artificial Sequence: Synthetic coding sequence
  source 1..1056: mol_type = other DNA
atgagcttcccctgcaagttcgtggccagcttcctgctgatcttcaatgtgagtagtaagggtgcagtaagcaaagaaataaccaatgcactcgaaacctggggcgcgttggggcaggacattaacctggacatcccttcttttcagatgtcagacgatattgacgacatcaaatgggagaagacaagtgacaaaaaaaagattgcccaattccgcaaagaaaaggaaacgttcaaagagaaagatacctacaaactgttcaaaaacggaacgctgaaaatcaagcacttgaagacggatgatcaggatatttacaaggtctctatttacgacactaagggcaagaatgtactggagaagatttttgacctgaagattcaggagcgagtgtctaaaccgaagatctcctggacctgtattaacacaacactgacctgcgaggtcatgaatggcacggaccccgagttgaacctgtaccaggatggaaagcatctgaaactcagtcaacgggtcattacgcataaatggacaacatctctcagtgcaaaatttaagtgcacagctggaaacaaggtgagcaaagagtccagtgtagagcccgtttcctgtccggagaagggtctggatatttacctgataatcggtatctgtggcggcggatcacttctaatggttttcgtcgccttgctggtgttttacatcacaaaacggaaaaagcagcgctcaaggcgcaacgacgaggagttggagaccagagctcatcgcgttgccacagaagagaggggacgaaagcctcaccagatccccgctagcactccgcagaaccctgctacctcacaacatcccccgccaccccctggtcaccggtcacaggctccctcccataggcctccacctccgggccacagagtgcaacatcagcctcagaaaagacccccggcgccatcaggaactcaggtgcaccaacaaaaagggcccccgttgcctcgtcccagagttcaacccaagccgccgcacggcgccgctgagaacagcctctctcccagttctaactag

SEQ ID NO: 23393 - DNA, 2544 bp, synthetic construct
  misc_feature 1..2544: note = Description of Artificial Sequence: Synthetic coding sequence
  source 1..2544: mol_type = other DNA
atgcacctgctgggcccctggctgctgctgctggtgctggagtacctggcgttcagcgatagctccaagtgggtcttcgaacatcctgagaccctctacgcttgggaaggagcctgtgtgtggatcccttgtacataccgcgccctcgatggcgacctggaatcgttcatcctttttcacaatcccgagtataacaaaaatacaagtaagttcgacggcaccaggctatacgagtctactaaagacggcaaggtcccctccgaacagaaacgcgtgcagttcctgggcgacaagaacaaaaattgtaccctgtccatacaccctgtccatcttaacgacagcggacagctcggccttcgcatggaaagcaagacagagaagtggatggagagaatccatctcaacgtctccgagcggccattccccccccacatccaactcccgcccgaaattcaggagagccaggaggtgactctcacctgtcttcttaacttcagctgttatgggtatcccatccagctgcagtggttgctggagggtgtgccgatgcgacaagctgcagtgacgagcaccagcctaaccataaaaagcgtttttacacggagcgagttaaaattctctcctcagtggtcccaccatggaaaaattgtgacatgtcagctgcaggacgcagacgggaagtttttgtccaatgataccgtgcagctgaacgtcaagcacacacctaaactggagatcaaagtgacaccctccgacgctatcgtgagggagggagattctgtcaccatgacctgcgaagtgtcaagctcaaaccctgagtacacaacagtgagctggctgaaagatggtacctctctcaaaaaacaaaatactttcaccttgaacctgcgcgaagttacgaaggatcagagcggcaaatactgttgtcaggtaagcaacgacgtcggccctgggcggtctgaggaagtttttctgcaggtgcaatacgctccagagccaagcactgtgcagatattgcactcccctgcagtcgagggctctcaggtggagttcttatgcatgagtctggctaaccccctgcccactaattacacctggtaccacaacggcaaggagatgcaggggcgcactgaggagaaagtccacattcctaagatcctgccttggcacgcagggacctattcttgcgtggccgagaatattcttggtactggacaacgcgggccaggtgctgaactggacgtgcagtacccgccgaagaaagttaccaccgtcatccagaatcccatgcctatcagagaaggcgatacggtcacccttagttgtaactataacagcagtaatccttcagtcaccagatacgaatggaagccgcacggagcctgggaggaaccgagcctgggagtacttaagattcaaaacgtgggatgggacaacacaacaattgcctgcgctgcctgcaactcctggtgttcctgggcctcacccgtggctctcaacgtgcagtacgccccccgcgacgtgcgggtcagaaagatcaaacctcttagtgagattcacagcggtaactccgtaagtctccagtgcgatttctccagctcccacccaaaagaagtgcaattcttctgggagaagaacggtcgactcctgggaaaggaatcccaactgaatttcgattcaatctccccagaggacgccgggagctactcctgctgggttaacaattctatcggacaaactgcaagcaaagcatggactctggaggtcctgtatgctcctcgacggctaagagtgtctatgagtcctggggatcaggtaatggagggcaaatctgccaccctgacttgtgagtcagacgccaaccctcctgtaagccactacacctggttcgattggaacaatcagagtctgccttaccacagtcagaagctgagactcgaacctgtgaaagttcagcactctggagcatattggtgccagggcacaaattccgtgggcaaaggccgctctccactctcaactctgaccgtctactacagccctgagacaataggtcgaagagtagctgttggtctggggagctgcctggcgattctgattcttgccatctgcggcctgaaactacagaggcgatggaagcgaacacaaagtcagcagggactacaagaaaatagctccgggcagtccttctttgtaagaaacaagaaagttcggcgagcccctctctcggaaggaccacacagcctggggtgttacaaccctatgatggaagatgggattagctacaccacactcagatttccagagatgaacatccctcgcaccggcgatgccgaatcaagtgagatgcaacgacctccaccagactgtgatgacaccgtgacgtacagtgcactccacaagagacaggttggagattatgagaacgtcattcctgactttccggaagacgaaggcattcactattcagagctgatccagtttggggtcggcgagcgtcctcaggcacaggagaacgtagactacgtgatactcaagcattag

SEQ ID NO: 23394 - DNA, 1989 bp, synthetic construct
  misc_feature 1..1989: note = Description of Artificial Sequence: Synthetic coding sequence
  source 1..1989: mol_type = other DNA
atggagagcaagaccgagaagtggatggagcggatccacctgaacgttagtgagagaccatttccaccgcatatccagttgcctccagagatacaggagtcccaggaggtgacattgacctgtctcctgaacttctcctgttatggttatcctatccagctgcagtggctccttgagggggtccctatgaggcaggccgctgtaacctctaccagtctgacaatcaaaagcgtgtttacccgttccgagctgaagttctctcctcagtggagtcaccacggaaaaattgttacctgccagctccaagacgccgacggaaagtttttatccaatgacactgtccagcttaacgtcaaacatacacctaagctggagattaaagtaacacccagtgatgctattgtgagagaaggtgattcagtgaccatgacatgcgaggttagttcaagcaaccccgagtatacaaccgttagttggttgaaggacggtacctccctgaagaaacagaatacctttactctaaatctccgtgaggttacaaaggaccagtccggtaagtactgttgccaggtctcaaatgacgtgggccctgggagatctgaggaggtgtttttgcaggtgcagtatgcccccgagccatcaacggtccaaatcttgcactcacccgcggttgaaggaagccaggtcgaatttctctgcatgtccctggctaatccgctacccaccaactacacctggtaccacaacggaaaagagatgcagggtagaacggaggaaaaggtgcacatcccgaagatactgccttggcacgccggcacatactcctgtgtggctgagaacatcctgggtactgggcagaggggccctggggccgaacttgacgtccagtatccacctaaaaaagttacaacagtcatccaaaaccccatgccaattagggagggcgataccgtgaccctgagctgtaactacaattccagcaatccgtctgtgacccggtacgaatggaaaccgcacggcgcttgggaagaaccaagtctgggggtgctgaaaatccagaatgtgggatgggacaataccacaattgcatgtgccgcttgcaacagctggtgtagctgggcgtctcccgtggcgctgaacgtgcaatacgcaccgagagatgtgcgagttagaaaaatcaaacccctgtccgagatccatagtggcaactcggtgagtctccagtgtgatttctcttcaagccatccaaaggaggtgcagtttttctgggagaaaaatggaagactgctcggaaaggagtcccagctaaacttcgattctattagtccagaggacgcgggctcttactcgtgctgggtcaacaatagcataggccagaccgccagtaaagcctggaccctcgaagtgctatacgctccgcggcgcctccgggtatcaatgagcccaggagatcaggtgatggaaggcaagagtgccactctgacatgtgagtcggacgccaatccccccgtttcccactacacatggtttgattggaacaaccagtccctcccttaccatagccagaaactgcggctggagcccgtgaaggtgcagcactctggggcatattggtgccaaggcactaacagcgtgggcaaagggcggtctcccttatccactctcacagtgtactattccccggaaaccatagggcgccgggtggccgttgggcttggcagttgcctggccattttgattctggccatttgcggcctcaagctgcaacgaagagatgcggagtcttctgagatgcaaagaccaccccctgactgcgacgataccgtgacgtacagcgcactgcataaacgccaggtaggggattatgagaacgtaatcccggacttcccagaagacgagggcattcactactccgagctgatccagttcggcgtgggggagagaccccaggcccaggaaaacgtggattacgtgatactgaagcattag

SEQ ID NO: 23395 - DNA, 2013 bp, synthetic construct
  misc_feature 1..2013: note = Description of Artificial Sequence: Synthetic coding sequence
  source 1..2013: mol_type = other DNA
atgcacctgctgggcccctggctgctgctgctggtgctggagtacctggcattttcagactcatccaaatgggtgtttgagcatcctgaaaccctgtacgcctgggagggagcctgtgtgtggattccatgtacgtaccgggccttggacggggacctggagagcttcatcctattccataatcctgagtataacaaaaatacttctaagtttgacggcacacgtctctacgaatcaacaaaggacggcaaagtcccttccgagcagaaaagagttcagtttctaggagataagaacaagaattgtacactgtctatccaccctgtgcatctgaatgactcaggccagcttggtctgcgcatggagtccaagacggagaagtggatggagcggatccatctcaatgtctcagagcggccatttccacctcatattcagctcccccctgaaatccaggaatcgcaggaggtcaccctgacgtgtttgctcaacttctcctgctacggatatccgatccagctacagtggctcctagagggtgtgcccatgaggcaggctgcggtgaccagcactagcttgacaattaagagtgtgtttacacggagtgaactgaaattttccccacagtggagccatcatggcaagatcgttacctgtcaattgcaggatgccgacggcaagttcctgagcaacgacaccgtgcagctcaacgttaagcacccccctaagaaggtcaccactgttattcaaaacccaatgcctattagagagggtgataccgtgacacttagttgcaactataacagctccaacccctctgtgacaaggtatgaatggaagcctcatggcgcctgggaggagcccagccttggcgtcctcaagatccaaaatgtgggatgggataataccaccattgcctgcgccgcctgtaattcctggtgtagctgggccagccctgttgccctcaacgtgcaatatgctccccgggacgtacgggtcaggaagataaaaccgctcagcgagatccattcaggaaactctgtcagcttgcagtgcgacttcagctcttcccaccctaaagaggtgcagttcttttgggagaaaaacgggcggttgctcgggaaagaaagtcaactcaacttcgactctatcagccctgaggacgccgggtcctactcctgttgggtgaataactcaatcggacagaccgcctccaaagcctggaccctggaggtgctgtacgccccaaggaggttgagagtctctatgtctcctggcgatcaggttatggaaggtaaatcagccacactgacctgcgagtccgacgccaaccctcctgtgtctcactacacctggttcgactggaataaccagtcgttaccctaccatagtcagaaactacggctggaacccgtgaaggttcagcactctggcgcttactggtgccagggcacgaacagcgtgggcaaggggagatcccccttgagcaccctcacagtatattacagtcctgaaacaataggccgacgcgtggctgtcggacttgggagttgtctcgcaatcttaatccttgctatttgtggacttaaacttcagagaaggtggaagcgcacacagagccagcagggactgcaggaaaacagcagcggccagtccttttttgtgagaaacaagaaggtccgtcgcgctccactgagcgagggaccccatagtcttggctgctataatcctatgatggaagatgggattagctacacgactctgaggttccccgagatgaacattcccaggacaggagatgccgaaagcagcgagatgcaacggcctcccccagattgtgacgatacagtgacctattctgccctgcacaaacgccaggtgggcgactacgagaacgtgatcccagatttcccggaggacgagggcatacattatagtgagctcatacagttcggcgttggcgagagacctcaggcgcaggaaaatgtcgactacgttatcctcaaacattag

SEQ ID NO: 23396 - DNA, 2028 bp, synthetic construct
  misc_feature 1..2028: note = Description of Artificial Sequence: Synthetic coding sequence
  source 1..2028: mol_type = other DNA
atgagcctgtggctgctggagggcgtgcccatgcggcaggccgccgttacaagcacatcccttacaatcaagtccgtctttactaggagtgaactcaaattctctccacaatggagccaccatggaaagatagtgacatgccagttacaagacgccgatggaaagtttctaagcaacgacaccgtccagctgaatgtaaaacacactcccaaactcgagatcaaagtcacaccatccgacgctatagtgagagagggggactcagtgactatgacttgcgaagtttcaagctctaacccagaatacaccactgtctcttggctcaaagacgggacaagtctgaaaaaacagaacactttcactctgaatctcagggaagttaccaaggatcagtctggcaaatactgttgtcaggtgagcaatgacgtaggcccaggccgatctgaagaagtgttcctccaggttcagtacgccccagagcccagcacagtgcagatcctgcacagtccggcagtcgagggtagccaagtcgagttcctctgcatgtctctggctaatcctctgcccaccaattacacctggtaccataatggcaaggaaatgcagggccgaactgaggagaaagtccatattcctaaaatcctaccctggcacgccggaacctacagttgtgtcgctgaaaacatcttagggacaggacagagggggccaggcgccgagctggatgtacagtatccacctaaaaaggtgacaacggtgatacaaaaccctatgcccatcagggagggcgacactgtgactctgtcatgtaactacaatagctcgaacccttctgtaaccagatacgaatggaagccacatggagcttgggaagagccaagcctcggagtgctcaaaattcaaaacgtcgggtgggacaataccaccatcgcctgtgcagcttgtaactcctggtgtagctgggcaagccccgtggccctgaacgtgcagtacgccccgcgcgacgtgagagtcagaaagattaagcctcttagcgagattcattcagggaactccgtgtccctccagtgcgatttctcttcttcacaccccaaagaggttcagttcttttgggaaaagaacggcagactgctcggcaaagagagccagctaaacttcgactctatcagcccagaggacgcaggttcatattcctgttgggtcaataattcaatcggccaaactgcctccaaggcctggaccctggaagtgctttacgcaccaagacggctcagggtatcaatgtccccaggggaccaggtaatggagggcaagtctgcaaccctcacttgtgaaagcgatgccaaccctccagtcagccactatacttggttcgactggaataatcagagcttgccatatcactcacagaaactgcgtctagaacctgtcaaggttcagcatagtggggcatattggtgccagggcaccaacagcgtagggaagggcagatcacctttgtccacgctcacagtatattactctcctgagaccatcgggcggagggtcgctgtcggcctgggttcctgcctagcaatactcattttagcaatttgcggactaaagctgcagagaaggtggaaacggacacagtcccagcaggggttacaagaaaattcttcagggcagagctttttcgtaagaaacaaaaaagtccgccgagcgcctttatccgaggggccccattcactggggtgttacaaccctatgatggaggacgggatatcatacaccactttaaggtttcccgaaatgaatattcctagaaccggcgacgccgagtcaagcgagatgcagcgccctccgccggactgcgatgacacagtcacttacagcgccctgcacaagagacaggtgggcgactatgagaacgtaatccctgacttccctgaagacgagggtatccactattccgagctgatacaatttggagtgggcgagagaccccaggcacaggaaaacgttgactacgtgattttaaaacactag

SEQ ID NO: 23397 - DNA, 2280 bp, synthetic construct
  misc_feature 1..2280: note = Description of Artificial Sequence: Synthetic coding sequence
  source 1..2280: mol_type = other DNA
atgcacctgctgggcccctggctgctgctgctggtgctggagtacttggcgtttagcgacagctctaagtgggtgttcgagcaccctgagaccctctacgcatgggaaggggcctgtgtgtggatcccatgcacctaccgggctttggatggggacctggaatcttttatcctgttccacaatcctgagtacaataaaaatacgagcaaatttgacggtactcggttgtacgagtcaacaaaggacggaaaagtcccatccgagcaaaagcgggttcagttcctgggagacaagaacaaaaattgtaccctgtccatccaccctgttcatctgaatgactccggacagctggggctgcgcatggagagcaaaaccgagaaatggatggaacgaatccaccttaatgtgtctgagcgcccctttcccccacacatccagctgccaccagagatccaggagtcccaagaggtcacactgacttgtcttctcaatttttcctgttacgggtatccaatacagttgcaatggctgttggagggggtcccgatgagacaggccgccgtgacaagtacgagcttgactattaagtctgtgtttacaagatctgagctgaagttctctccacaatggtcacatcacggaaagatagtgacctgccaactgcaggatgccgatggtaagtttctgtctaacgatactgtccagcttaatgtcaaacacacaccgaagcttgaaataaaggtcaccccttccgatgcgatcgtgagggaaggggactccgtgacaatgacgtgtgaggtatcatcctccaaccctgagtataccaccgtgtcctggttgaaagacgggacatcactgaagaagcagaataccttcaccctcaatttgcgggaggtgactaaggaccagagcggcaagtattgctgtcaggtcagcaacgacgtgggcccagggaggagcgaggaggtgttcctgcaggttcaatatccccctaaaaaggtgacaacggtcatccagaacccgatgccaatccgagaaggagacactgtcacactttcttgtaattacaacagttccaatccatcagtaacacgctatgagtggaagccgcacggagcctgggaagagcctagtctaggggtacttaagatacagaacgtggggtgggacaacaccacaattgcctgtgccgcctgcaatagctggtgcagctgggctagtcctgtcgcactgaacgttcagtacgccccaagagacgtccgggtgagaaaaatcaagcccctgtccgaaattcatagcggaaatagcgtgtccctccagtgcgattttagcagcagccatcccaaggaggtgcaatttttctgggagaagaacggacgccttctggggaaagaatctcagttaaattttgattccataagcccagaagatgcaggctcttactcttgttgggtgaacaattccatcgggcagactgcgagcaaagcgtggaccttggaggtgctgtatgcaccgcgccgactgagggtgagcatgtctcctggagaccaggtgatggaaggtaaatcggctaccctgacgtgcgagagcgatgccaatccacctgtcagccactacacatggttcgactggaataatcagagtctgccttaccacagccaaaaactgcgcctggagccagtgaaagttcagcactctggagcatattggtgccagggaacaaatagtgtggggaagggccggtctcctctgagcaccctaacagtctactactccccggaaacaattggccggcgcgttgctgttggcctggggtcatgtcttgctatacttatactagccatttgtggcctcaagctccagcggcggtggaaacgcacacagagccaacaagggttacaggagaactccagtggccagtcctttttcgtaagaaacaagaaagtacgtagggctcccttgtccgagggacctcacagcctaggatgctacaatcctatgatggaagatggaatctcatatacaacactaaggttcccggagatgaacatcccaaggacgggagatgcagagtcctcagagatgcagagacctccccccgactgtgatgacactgtgacctatagcgctctgcacaaaagacaagtgggagactacgaaaacgtgatcccagatttcccagaggacgagggtatccactatagtgagttgatccagtttggcgtcggagaacggccccaggcacaggaaaatgtcgactatgtcatactcaaacactag

SEQ ID NO: 23398 - DNA, 2256 bp, synthetic construct
  misc_feature 1..2256: note = Description of Artificial Sequence: Synthetic coding sequence
  source 1..2256: mol_type = other DNA
atgcacctgctgggcccctggctgctgctgctggtgctggagtacctggcattcagtgattctagtaaatgggtcttcgagcatcctgagaccctgtatgcttgggagggcgcatgcgtgtggatcccctgcacttatagggctctcgacggtgatttagaaagttttatcttatttcacaatcccgaatataacaaaaacacatccaagttcgatggaacccggttatatgagagcaccaaagacggcaaagtgccatccgaacaaaagcgagtgcagttcctgggcgacaaaaacaaaaactgcaccttgtcaattcatcctgtgcatctaaacgactctgggcagctgggcctgaggatggagtcaaaaacagaaaagtggatggaaaggatccatctgaacgtctcagagcggcctttcccaccccacattcagctaccccccgagattcaggagtcccaggaggtcacgctgacatgcctgctaaatttttcgtgttatgggtatcctattcaactgcagtggcttctcgagggagtacctatgcggcaggccgcagtcacttctacatcactgacaataaaatctgtcttcacaagatctgagttgaagttctctcctcagtggtctcatcacgggaaaattgtcacatgccagctgcaagatgcagatggaaaattcctgtcaaacgatacagtccagctgaatgtgaaacacacccctaaactggaaatcaaggttacccctagtgatgccattgttcgtgaaggtgactcagtcacaatgacttgtgaggtttcctcttctaaccccgagtacacaaccgtttcttggctgaaggacggtacttcattaaagaagcagaacacctttactctaaatctcagggaggttactaaggatcagtccggcaagtactgctgtcaggtgtctaacgacgtgggtcctgggagatccgaggaagtattccttcaagtccagtatgcccctgaaccttcaaccgttcaaattttgcattctcctgcagtcgagggcagccaggtggagttcttatgtatgagcctcgccaatccattgcctactaactatacttggtatcataacgggaaagaaatgcagggccgtactgaagagaaagttcatattcctaaaatcctaccctggcacgctggtacgtacagctgcgtggctgagaacatcctgggtaccggacagcgcgggccgggggctgagttggacgtacagtacccacccaaaaaagttacaaccgtgattcaaaaccccatgcctatccgcgagggcgatactgtcaccctttcatgcaactataactctagtaacccttctgtcacgagatatgagtggaagccgcacggagcatgggaagaaccctctctgggggtgttaaagattcaaaacgttggttgggacaacaccactatcgcatgtgccgcttgcaattcctggtgctcatgggctagtcccgtcgcactcaacgtacagtacgccccaagggacgtgcgcgtgaggaagattaagcctctttccgagatccacagcgggaacagtgtgtccttgcagtgtgatttctccagcagtcaccccaaagaggtgcaattcttctgggagaaaaacggcaggctgctgggaaaggaatcccaactcaacttcgactctattagtccggaagacgccggctcctactcttgctgggttaacaatagcattggccagaccgcctcaaaggcatggactctggaagtcctttacgcgcctcggcgcctgcgagtctctatgtccccaggtgaccaggtgatggaggggaagtcagctacactcacgtgcgagagcgatgccaacccccccgtatcccattacacctggtttgactggaacaaccagagccttccctaccactcccagaaactccgactggagccagtcaaagttcagcactccggggcgtactggtgccaggggaccaattcagtcggcaagggacgcagtccccttagtactctcacagtatactattctccagagaccattggcaggcgtgttgctgtgggcttgggcagctgtttggccattcttattctagctatctgcggtttaaaattacagcgcagatggaaacgaacgcagtcccaacagggactgcaggaaaactcgagtgggcagtctttctttgttcggaataaaaaacgttgtcgggtgctgcgcgacgcggagacctcaccaggattgagatag

SEQ ID NO: 23399 - DNA, 783 bp, synthetic construct
  misc_feature 1..783: note = Description of Artificial Sequence: Synthetic coding sequence
  source 1..783: mol_type = other DNA
atggcccggccccacccctggtggctgtgcgtgctgggcaccctggtagggttgtctgctactccggcacctaagtcatgtccagagcggcattactgggcccaaggcaagctgtgctgtcagatgtgcgagcccgggactttcctggtcaaggattgtgatcaacatagaaaggcagcccaatgcgacccctgtattccgggagtgtcctttagccccgaccaccacactagaccccattgtgaatcttgcagacattgcaactccggtctgctcgtgagaaattgtaccatcaccgccaatgctgagtgtgcctgtagaaacggatggcaatgccgcgataaagaatgcaccgagtgcgacccactgcctaatccgtcactgaccgccaggtcctcacaagcactctctccccatcctcagcctacccacttgccatacgtgtctgagatgcttgaagcccgaacagcagggcatatgcaaaccctggccgacttcagacaacttcccgcccggaccctttcaacccactggcctccgcagagatcattgtgttccagcgatttcatccggatacttgtcattttttctggcatgtttctagtttttactcttgcgggggccctgttcctccaccaacgccggaagtataggtctaacaagggagaaagtcccgtggagccggccgaaccctgccactattcttgtccccgggaggaagaaggctcgaccatccctattcaggaagattataggaaaccagaacccgcatgcagcccttag

SEQ ID NO: 23400 - DNA, 1158 bp, synthetic construct
  misc_feature 1..1158: note = Description of Artificial Sequence: Synthetic coding sequence
  source 1..1158: mol_type = other DNA
atgctggtgcggcggggcgcccgggccggcccccggatgccccggggatggacggcattgtgtctgctttccttattgccttccggctttatgtccctcgataacaacgggacagccaccccagagttaccaacacaggggacattctctaacgtgtccactaacgtatcttaccaggagactactactccaagtacgctggggagcactagccttcaccctgtaagtcagcatgggaatgaagctaccacaaacatcaccgaaactaccgtgaagttcacttcgacatcagtgattacatccgtgtatggcaacactaacagtagcgtgcagtcacagacgtccgtgatctccactgtgttcacgacacccgccaacgtgagtactccagagacaaccctgaagccttcgctttctcctgggaatgtgtctgatctgtccaccacgtccacgtctctcgctaccagccctactaaaccctatacctcatcaagtcctatattgagtgatataaaagccgaaatcaaatgctctggcatccgcgaagtcaaactgacacaagggatctgtttggaacaaaataagacatcctcgtgtgccgaatttaagaaggaccggggcgaggggttggcgcgcgtgctgtgcggagaagagcaggcagatgctgatgccggcgctcaggtctgttccctgctcctggcccagagcgaggtgaggccccagtgcctactccttgtgctggccaacagaaccgagattagcagtaaacttcagcttatgaaaaagcaccagagcgatctcaaaaagctggggatcttagactttactgagcaagacgtggcttcacaccaatcttacagccaaaaaactctgatcgcactggttacaagtggagcactgctggctgtgctgggtatcactggctactttctcatgaacagaaggagctggagtccgacaggagagcgcctgggtgaagacccctattacacggaaaatggaggcggacagggttattcatccgggccgggcacttcccctgaggctcagggcaaggcctccgttaaccgcggtgcgcaggagaacggaacaggccaagccacttcccgtaatggccactctgctagacagcacgtcgtcgctgacacagagctttag

SEQ ID NO: 23401 - DNA, 987 bp, synthetic construct
  misc_feature 1..987: note = Description of Artificial Sequence: Synthetic coding sequence
  source 1..987: mol_type = other DNA
atgctggtgcggcggggcgcccgggccggcccccggatgccccggggatggacagccttatgcctgctgtccttgcttccttcagggttcatgtcccttgataataacggcactgctactcccgaactgcctacccagggcacattctcaaacgtcagcaccaatgtaagttatcaggagaccactactccatctacactaggcagcacctctctccaccctgtgtcacaacacggcaacgaggctaccactaatatcaccgagactaccgttaaattcaccagtacctcagtgatcacgtccgtttatggtaacacaaacagctcagtacagagccagacaagcgttatcagtaccgtgtttaccacacctgcaaacgtgtccacgccagaaacgaccttaaaaccttccctatcacccgggaatgtgtcagatcttagtactaccagtacaagcctggccaccagtccaactaaaccctacacttccagctccccaattctgtccgatatcaaagccgaaattaagtgctccgggatccgggaagtgaagcttacccaggggatctgtcttgagcagaacaagacatctagttgcgcagaattcaagaaggatcgcggtgagggtttggcaagagtcctctgcggcgaggaacaggcagacgccgatgccggagcacaggtatgctctctgctcctggcccagtcagaagtgcggccccagtgccttcttttggtgcttgcaaaccgcaccgagatttcttctaaacttcagcttatgaagaagcaccaatccgacctcaaaaagctaggcattctcgattttaccgaacaggatgtcgcaagccaccagtcctattcgcaaaaaacactgattgccctggttacatccggcgcccttctggccgtacttggcatcaccgggtactttttgatgaaccggcgctcctggagccctaccggcgaacgactggagcttgagccctag

SEQ ID NO: 23402 - DNA, 684 bp, synthetic construct
  misc_feature 1..684: note = Description of Artificial Sequence: Synthetic coding sequence
  source 1..684: mol_type = other DNA
atggacttcggccccggccggctgttccggttcttcagctactgcgttgtggcccatatccagctggccgtcttcttcttttccgtggggatcctcgaaaccagaattctccttgctgatggggcagaatttaaaaaggacagaggagaggggctcgcacgggtgctgtgcggcgaggaacaggccgacgccgacgccggggcccaagtgtgcagcctcctgctggcgcagtcggaagtgagacctcagtgtcttctcctagtcctcgccaatagaacggagatctcaagcaaacttcagctgatgaagaaacaccagagtgaccttaaaaagctgggcatcctggatttcacagagcaagatgtggccagccaccagagctattcgcaaaaaaccttaatcgccctggtcaccagtggcgcgctgctggcggtcctcggtataaccggatactttctgatgaaccgtaggtcatggtctcctacaggagagcgcttaggagaagatccatactatacagagaacggaggcggacagggatattcaagtggacctggcacaagcccagaagcacagggcaaagcatccgtgaatagaggcgcccaggaaaatgggactggccaggcaaccagccggaatgggcacagcgcacggcagcacgtggttgccgatactgagctgtag

SEQ ID NO: 23403 - DNA, 1068 bp, synthetic construct
  misc_feature 1..1068: note = Description of Artificial Sequence: Synthetic coding sequence
  source 1..1068: mol_type = other DNA
atgagcctggacaacaacggcaccgccacccccgagctgcccacccagggtaccttctctaatgtatctacgaatgtctcttaccaggaaactactactcccagcacgctcggaagcactagcctgcatcccgtgagtcaacacggcaacgaggccaccacaaatatcactgagacaacagtgaaattcacttcaaccagtgtcatcacatccgtctatgggaataccaactcctcagttcaaagccagacgtccgtaatctcaactgtgttcacaacgcctgctaacgtaagtacaccagagactaccttgaaaccttctttgagcccaggaaacgtctctgatctgtcaactacatcaacctccctcgctacttctcctacaaaaccctatacctcttccagtccaatcttaagtgatatcaaggccgaaatcaagtgctcagggattcgcgaggtgaagttgactcagggaatttgtctggaacagaacaaaaccagttcctgcgcagagttcaaaaaagacagaggtgaaggtctggccagagtcctctgcggcgaagaacaggcagatgccgacgcaggggctcaggtctgcagtctcctactcgcgcagtccgaggtgcggccccagtgcctactcctagttctggccaaccgcactgagatatcctccaagctgcagcttatgaaaaagcaccagagtgacctcaaaaaactggggattcttgattttaccgagcaggacgtagcctcccatcagagctattcacaaaagacactgattgcgctggtcaccagtggtgctttactcgccgttttgggcattacgggttacttcctgatgaaccgtagatcgtggagccctacaggggaaaggctcggcgaggacccttactatacagagaacggaggaggtcagggctacagttctggccctgggactagccccgaggcgcaggggaaagctagcgtaaaccgcggcgcacaggaaaatgggacagggcaagcgacatcacgaaatgggcattccgcccggcagcacgtggtcgcggacacagaactctag

SEQ ID NO: 23404 - DNA, 753 bp, synthetic construct
  misc_feature 1..753: note = Description of Artificial Sequence: Synthetic coding sequence
  source 1..753: mol_type = other DNA
atgttcctgcagatgtaccccaccaagaagctgcagcacctggtgcctttagaggtgccggcctgtacactgtgcttgaacatggcaatgcggcctcagcagacctcacaggctgaaattaagtgcagcggcattagggaggttaaactaacccagggtatctgcctcgaacagaacaaaacgtcaagttgtgctgagttcaagaaggaccgaggggaaggtctggcccgggtgctgtgcggagaggaacaggctgatgctgacgccggtgctcaggtttgttcactactgctcgcccagtccgaggtaagaccccagtgcttgctgttggtgctcgcaaatcgcaccgagatatcctcgaaactgcagttgatgaaaaaacatcagtcggacctcaaaaagctcgggattctggattttacggagcaggacgtggctagccatcagagctatagccaaaagacactgattgctctcgtgacatccggcgccctgttagctgttctgggaatcactggctattttttaatgaatcggcgatcctggtccccaactggcgaacgcctcggtgaagacccgtattatactgagaacggaggaggtcaagggtactcaagtggtcctggcacctcacctgaagcacagggcaaggcttctgttaatcgcggcgcacaggaaaacggaaccggacaggcgacgtcacgtaacggacacagcgcaagacagcatgtggtggcggatacagagctttag

SEQ ID NO: 23405 - DNA, 516 bp, synthetic construct
  misc_feature 1..516: note = Description of Artificial Sequence: Synthetic coding sequence
  source 1..516: mol_type = other DNA
atggagcacagcaccttcctgagcggcctggtgctggccaccctgctctcccaagtgagccctttcaagatacccatagaggagctggaggatagagtgttcgtgaattgtaatacctcaattacttgggtggagggcactgtgggcacattgctgagtgatatcactcgcctcgatctgggcaagcggatcctagacccccggggaatctacagatgtaatgggacggacatctataaagataaagaatctacagttcaggtccattaccgcatgtgtcaaagctgcgtcgagttggatcccgctacagtggctgggattatcgtgactgatgtgatcgcaacactcctgctggcccttggtgtcttttgttttgcgggacacgaaacaggccgcctgtccggagcagccgatactcaggcgttgttaagaaatgatcaagtctatcagcccctgcgagaccgggacgacgctcagtacagccatctgggcggtaattgggcgaggaataagtag

SEQ ID NO: 23406 - DNA, 384 bp, synthetic construct
  misc_feature 1..384: note = Description of Artificial Sequence: Synthetic coding sequence
  source 1..384: mol_type = other DNA
atggagcacagcaccttcctgagcggcctggtgctggccaccctgctgtcccaagtgtctccgttcaaaattcccattgaggagctggaagatcgggtcttcgtgaattgcaatacgagtattacttgggttgaggggaccgtgggcaccctactgtcagacataacaagactggacctgggcaaaaggatcctggacccacgaggaatttatcggtgtaatggcacagatatctacaaagacaaggaatccaccgtccaagtgcattataggaccgcggacacccaggctctcctgcggaatgatcaggtttaccagccactgagggacagagacgatgcgcagtactcacatctgggaggtaactgggctagaaataagtag

SEQ ID NO: 23407 - DNA, 1377 bp, synthetic construct
  misc_feature 1..1377: note = Description of Artificial Sequence: Synthetic coding sequence
  source 1..1377: mol_type = other DNA
atgaaccggggcgtgcccttccggcacctgctgctggtgctgcagttggccctgctgcctgcggcaactcagggaaagaaggtcgttctcggcaagaagggcgacacggtggagctgacctgcacggcttcacagaaaaagtcaatccagtttcactggaaaaattctaaccagattaagattctcggcaaccagggctcctttttaactaaggggccctcaaagttaaacgacagggctgacagtaggcgctccttgtgggaccaagggaacttccctctcattatcaagaacttgaagatcgaagatagcgatacatacatttgtgaagtcgaggaccagaaggaagaggttcaattgcttgtgtttggactgactgccaattctgacacacatctcctccagggtcagagtctgactctaacccttgagtctcctcccggaagcagcccctctgttcagtgccggtcgccccgcggaaagaacatacaagggggcaagaccctcagcgtcagccagctggagctgcaggactctgggacatggacctgtaccgtgctccagaaccagaaaaaagtggaattcaagattgatatcgtcgttcttgcttttcagaaggcctccagcatagtttacaaaaaagagggagagcaggtggagtttagtttccctctggctttcacagtagagaagttaaccggcagcggcgaattgtggtggcaggccgaacgtgctagctccagcaaaagctggatcacctttgatttgaagaacaaggaggtgagcgtgaagagggtcactcaagatcctaagcttcagatgggaaagaaactgccgctgcacctaaccctgccccaggcactgccccaatatgcaggttccggaaacctgaccttagcgttagaggccaagactggcaagctgcaccaggaggtcaaccttgtcgtcatgcgggcaactcagctccagaaaaatctgacttgcgaggtgtggggaccaacgagcccaaaactgatgctctcgctcaaactggagaataaagaggcaaaggtgtctaagcgggaaaaagctgtctgggttctgaatcctgaggctggtatgtggcagtgcctattgtcagactctggccaggttctgctggaaagcaatatcaaggtattgcccacttggtccacccccgtgcagccaatggccttgatcgtactgggaggtgttgcaggactgttactattcatcgggctagggattttcttctgtgtacgctgtcggcaccgccgaagacaggccgaacgcatgagccagattaagcggctgcttagcgagaaaaagacctgtcagtgcccgcacaggttccagaagacgtgtagtccgatctag

SEQ ID NO: 23408 - DNA, 723 bp, synthetic construct
  misc_feature 1..723: note = Description of Artificial Sequence: Synthetic coding sequence
  source 1..723: mol_type = other DNA
atgatcgagacctacaaccagaccagcccccggagcgccgccaccggtttgccaatctctatgaaaatcttcatgtacctcttgacagtctttctcatcactcaaatgattggatccgcgctgtttgcagtgtatttgcatcgccgtctcgacaagatagaggacgaaagaaacctgcatgaagatttcgtcttcatgaaaactatccagcgctgcaacaccggagagcggtccctctcacttctgaactgcgaggaaatcaaaagtcagtttgaagggtttgtgaaggatatcatgttgaacaaagaagagacaaagaaggagaatagttttgagatgcaaaaagttcttcaatgggctgaaaagggctattatactatgagtaacaacctcgtcactctcgagaatggcaaacagctgacggttaaacgtcaaggactctactacatttatgcgcaggtcactttctgctccaatcgcgaagcgtcgtcacaggccccttttatcgctagcctgtgtctgaagtccccggggcgttttgagagaattctactgcgcgccgcaaacactcactctagcgccaaaccttgcggacagcagtcaatccacttagggggcgtgttcgaattgcaaccaggtgcaagtgtttttgtgaacgtgacagacccgtcacaggtgtcccatgggaccggattcacgtcctttgggctgctgaagctgtag

SEQ ID NO: 23409 - DNA, 786 bp, synthetic construct
  misc_feature 1..786: note = Description of Artificial Sequence: Synthetic coding sequence
  source 1..786: mol_type = other DNA
atgatcgagacctacaaccagaccagcccccggagcgccgccaccggtttgcctatctctatgaagatcttcatgtaccttctcactgtttttctgattacccagatgatcggttctgccctgttcgcagtgtacttgcaccgtcgtctggataaaatcgaagacgagcggaatctccatgaggatttcgtgtttatgaagacaatacagcgctgcaacaccggcgaaagaagtctcagcttgctcaactgcgaagagatcaaaagccagtttgaggggttcgtgaaagacatcatgctcaataaggaggagacaaaaaaggagaactcattcgaaatgcaaaagggagatcagaacccacagatcgcggcacatgtgatttctgaagcctccagtaagactacctcagtgttgcagtgggccgagaaaggatactatacaatgagcaacaatctggtcaccctggagaacggaaaacaattgacagttaagagacagggcctgtactacatttatgcccaggtgacgttctgctccaatcgtgaagctagcagccaggccccgtttatcgcttctctatgcctgaaaagtcctggaaggtttgagcgaattctgctcagagcagcgaatacccacagcagtgccaaaccctgtgggcagcagtctattcaccttggcggcgtgttcgagctgcagccgggcgcatccgtgttcgtgaatgtaacagacccgagtcaagtgagtcacggcaccggttttaccagttttgggcttttgaaattgtag

SEQ ID NO: 23410 - DNA, 612 bp, synthetic construct
  misc_feature 1..612: note = Description of Artificial Sequence: Synthetic coding sequence
  source 1..612: mol_type = other DNA
atggtgcggctgcccctgcagtgcgtgctgtggggctgcctgctgacagccgtgcacccagagcccccaaccgcctgtagagagaagcaatatttaatcaacagccagtgttgttcattgtgtcaacctggacagaagctggtgtcggactgcaccgaattcacagagacagagtgcttgccttgcggcgagtctgaattcctggatacttggaaccgggagactcactgccaccaacacaagtactgcgaccccaacttgggactgagagttcagcagaaagggacctctgagacggacactatctgcacatgcgaggagggctggcactgtacttccgaggcgtgcgaatcctgcgtcctgcaccgcagctgtagtccaggattcggtgtgaaacagattgccacaggggtcagcgacacgatctgtgagccatgccccgtcggatttttttcgaacgtatcatcagcttttgaaaagtgccatccctggactagaagccctggaagcgccgaatctcccggcggagacccgcaccacctcagggatccagtatgccatccccttggcgccgggctatatcagaagggaggccaggaagcgaaccagtag

SEQ ID NO: 23411 - DNA, 786 bp, synthetic construct
  misc_feature 1..786: note = Description of Artificial Sequence: Synthetic coding sequence
  source 1..786: mol_type = other DNA
ggccggagccccctgcggacccgggaccgggtgctgaccaactgggaagacgggcttactgtcgcttatggcgccgtgaagctcattcagtctctgtcactgcaacctgttggctggcaacaaaattggggcctctcttcgcccccaaccatgcttctcccaagcagggctcagtcccccacagaattaccccttgcccctcttgcagaacctaacacaggctgctcttccctcctgagctggcactccaccaggggggaacttcacctgtgggcgttggggttgggccagatgggcggtagcaaatgcgggtctccgctctctcctctggcacctactttggaagcactcagacggccgtggtgtggccagcagggagcaggcggcacacgaggtatctctacagaccccccaagcggaaaaggggggcgcgcgtggggccgcgaccccctccctagggaaggcttattgagaggtaccgcggcccccgcggctggcggggaccttactccctgcctgtctagaccgccaacaccttccaggaatccaaggcggtccatcttccctaccatcttcctggcccctacattactgttgcaatgtcggagattatatatggatgccaatagaagcccgaggcgtatggccaaaagagtggcaagccagtgccgcagagatagcgaggcagcccctacccaggaatgtggccacgtcgggaagcaggccgtagggcagcgcgcctggtgctgttgctgctgcggagttcgtgtgaggggatggcattag

SEQ ID NO: 23412 - DNA, 834 bp, synthetic construct
  misc_feature 1..834: note = Description of Artificial Sequence: Synthetic coding sequence
  source 1..834: mol_type = other DNA
atggtgcggctgcccctgcagtgcgtgctgtggggctgcctgctgacggccgtgcatcctgagccccctacagcatgtcgcgagaagcagtatctcatcaattcacagtgctgctccctgtgccagcccggccagaagcttgtgtccgattgtacggaattcaccgagaccgaatgtcttccctgtggtgagagcgagttcttagacacatggaatcgggagacccactgccatcagcataaatactgtgacccaaatctgggtcttcgcgtgcaacagaaaggcacgtcagagaccgataccatctgcacatgtgaggaaggttggcattgcacttccgaggcatgcgaatcgtgtgtcctgcatcgatcttgtagtccaggattcggggtaaagcagatcgctacaggagtttcagacaccatttgcgaaccctgccccgtgggatttttctcgaacgtctcctcagctttcgagaagtgccatccctggacttcttgcgaaacgaaagatctggttgttcaacaggccggcaccaataagaccgacgtcgtctgtggacctcaggataggctgcgggctcttgtcgtgatccccattatcttcggaatactcttcgccatcctgctggtgttagttttcatcaagaaagtagctaaaaagcctacaaacaaagccccccatcccaaacaggaaccacaggagatcaattttcctgatgatctgccaggatccaatacagccgcacctgtccaggaaacgctgcacggttgccagcctgtcacccaagaggatggcaaggagtctaggataagtgttcaagagagacaatag

SEQ ID NO: 23413 - DNA, 1086 bp, synthetic construct
  misc_feature 1..1086: note = Description of Artificial Sequence: Synthetic coding sequence
  source 1..1086: mol_type = other DNA
atggacaagttctggtggcacgccgcctggggcctgtgcctggtgccactcagcctggctcagatcgatttgaatattacatgtagatttgccggagtcttccacgtcgaaaaaaacggacgatattctataagcagaaccgaggcggcagacttgtgtaaagcttttaattctaccttgcctaccatggcccaaatggagaaggccctttcaatcgggtttgagacctgcaggtacgggttcatagagggacatgttgtaatcccaagaatacaccccaattccatttgtgctgcgaacaatacgggcgtgtacatcttgacctctaacacttcccagtatgacacttactgcttcaacgcttctgcgccacccgaggaggactgcacttcagtcacagatctgcccaatgctttcgatgggcccattaccattacaatagtgaacagggacggaactaggtacgtgcagaagggcgaataccgaacaaacccagaagacatatatccttcaaaccccactgacgacgacgtgtccagtggttccagctctgaacgtagtagcacaagtggtggatacattttctacaccttttcaaccgtgcatccgatccctgatgaagattcaccctggattactgattccacggaccggatccctgccacccgggaccaggacacgtttcaccccagcggaggcagccacactacccatggctccgaatcggacggacatagccatggcagtcaggagggaggagctaatactacatctggcccaatcagaaccccccagattccagaatggctgatcattctggcgtcactactagcactggccctgatcctagctgtctgtatagccgtgaactcacgcagaagatgtggacagaaaaaaaagctcgtgattaactccggaaacggtgcagtcgaggaccggaagccaagcggactgaacggcgaggcctctaagtcccaggaaatggtgcacctcgtgaacaaggagagctctgaaacccccgatcagtttatgacagccgacgaaacccggaatcttcaaaatgtggatatgaagatcggtgtttag

SEQ ID NO: 23414 - DNA, 420 bp, synthetic construct
  misc_feature 1..420: note = Description of Artificial Sequence: Synthetic coding sequence
  source 1..420: mol_type = other DNA
atggacaagttctggtggcacgccgcctggggcctgtgcctggtgcccctttctctcgcccagatcgacctcaatattacctgcaggttcgcaggagtgttccacgtcgagaagaacggccgatatagtatctctagaacagaggcagctgatctgtgtaaagcctttaattcaactttgccaacgatggctcagatggaaaaggccttgtctatcggcttcgagacgtgcagcctgcactgtagccaacagtcaaaaaaagtgtgggcagaggagaaagcttctgaccagcagtggcaatggtcatgcggaggccagaaggctaagtggacacagaggagaggacaacaggtatccggtaatggcgccttcggggagcaaggcgtcgtgaggaactctcggcctgtgtacgactcatag

SEQ ID NO: 23415 - DNA, 1023 bp, synthetic construct
  misc_feature 1..1023: note = Description of Artificial Sequence: Synthetic coding sequence
  source 1..1023: mol_type = other DNA
atggacaagttctggtggcacgccgcctggggcctgtgcctggtgcctctgagtttggctcaaattgacctgaatataacctgccggtttgctggagtttttcatgttgagaagaacgggcgctacagtatatcccgcactgaggctgccgatctctgtaaagccttcaattcaactctccccacaatggcccagatggagaaggctttgagcatcgggttcgaaacgtgtcgctatggatttattgagggccatgtggtgatccctcggattcaccccaactcaatctgtgccgccaataacacaggggtttacatactgaccagcaacacttcacagtatgatacctactgcttcaacgcgagtgcgcctcctgaagaagactgcacttctgttacagacctgcccaacgcattcgatggcccaattacaattaccatagtgaacagggacgggacgcgatatgtccagaagggtgagtacagaaccaatcccgaggacatctatcctagtaatccaaccgatgacgacgtctcgtctggttcatcctccgagcgctcttctacctctggcggctacattttttataccttcagcactgtgcacccaatcccagacgaagactccccctggattaccgactcaactgaccgaattcctgcgactcgacatagccatggatctcaggaaggcggtgcaaacaccaccagcggcccaatcaggacaccgcagatccccgaatggttaatcatcttggctagcctactggcactcgctctcatcctagctgtatgtattgccgtgaactcccgtcgccgctgcggccagaagaaaaagttggtgattaatagcggcaacggcgccgtggaggacagaaaaccatcaggactaaacggggaggccagcaaaagtcaagagatggtccaccttgtgaataaagagtctagcgaaacccccgaccagttcatgaccgctgacgagacaagaaatctccagaacgtggatatgaagatcggcgtctag

SEQ ID NO: 23416 - DNA, 1191 bp, synthetic construct
  misc_feature 1..1191: note = Description of Artificial Sequence: Synthetic coding sequence
  source 1..1191: mol_type = other DNA
atggacaagttctggtggcacgccgcctggggcctgtgcctggtgccgctgtctcttgcgcaaatagacctcaacattacctgccggtttgcaggcgttttccacgtggagaaaaacggccggtatagtatttcaaggacggaagccgccgacctgtgcaaagctttcaattcaacattgccgaccatggctcaaatggagaaggcactcagcattggatttgagacttgtaggtatggcttcatcgaaggccacgttgtaatccccaggatccaccctaactcaatctgcgccgctaacaatacgggcgtctacatcttgacaagcaacacatcgcaatacgatacttattgttttaatgcatccgctccacccgaggaggattgtacatcagtcactgacctccccaatgcgttcgacgggcccataaccattactatagtcaatcgggatggcacccgatacgtccaaaagggggagtatcgcaccaatcctgaggatatctaccctagtaacccgaccgatgatgacgtgtcaagcgggagctctagcgaacggtcatccacgagcggaggatatatcttctatacctttagtacggtgcaccccatacccgatgaagattccccctggattactgactccacagacagaatccctgccaccaatatggacagcagccactccatcaccctgcagcctaccgctaaccctaatacaggtctggtggaggatctggaccgaaccggccccctgtctatgactacccggcgggaccaagatacatttcacccctctgggggctcgcacaccacacacggatctgaatccgatggccactcccacggcagccaggagggcggggccaatacaactagtggccccattaggaccccccagattccagaatggctgataatcctagcctctcttttggcattggccctgattctcgctgtgtgcattgccgtgaattccaggcgcaggtgtggccaaaagaaaaaactcgtcatcaactccggtaacggggccgttgaggatagaaaaccctccggcctgaacggcgaggcttccaagtcccaggagatggtccatctggtcaataaggagtcatcagagacaccagatcagtttatgactgccgatgagacaagaaacctacagaatgtggatatgaaaatcggagtctag

SEQ ID NO: 23417 - DNA, 2100 bp, synthetic construct
  misc_feature 1..2100: note = Description of Artificial Sequence: Synthetic coding sequence
  source 1..2100: mol_type = other DNA
atggacaagttctggtggcacgccgcctggggcctgtgcctggtgccactctcattggcccagattgatttaaatattacctgcaggtttgcaggtgttttccatgtggagaagaatggtcgctattccatttcacgaacagaagcagcggacctgtgtaaggcttttaactccacactgccaaccatggcccagatggagaaggccctaagcataggatttgaaacctgtcgatacggcttcatcgagggccacgtggtgatcccccgcatccatccgaacagtatctgcgccgcgaataatactggcgtatacattctcacctcgaacacgtcccagtacgacacttactgttttaacgcttccgccccccctgaagaagactgcacctcagtgacagaccttcccaacgctttcgatggaccaattacaattacgatagtgaatcgggacggaactagatatgtgcaaaagggagaatatagaaccaaccctgaggatatctatcccagcaatcccactgacgatgacgtttccagcggatcctcgtctgagaggtcgagtacatctgggggctacattttttacactttttctacagtgcaccccatacccgacgaggactccccttggataactgattccacagaccggatcccggctacttctacctctagtaacaccatttcggctgggtgggagcctaacgaagaaaatgaagatgaaagagacaggcatctgagtttttctggatccggaatagacgacgatgaagactttatatctagcactattagtaccaccccacgcgctttcgatcacacaaagcagaatcaggattggacccaatggaacccgagccactcaaaccctgaggtgctgctccagaccactacacggatgaccgacgtagaccgcaacggcaccacagcatacgagggtaattggaaccctgaggcccaccctccactgattcaccatgagcaccacgaagaggaagagactcctcattcgacctctactatccaggccaccccatcgtctactaccgaagaaactgcaacgcagaaggagcagtggttcggaaatcgttggcacgagggctacagacagacaccgaaggaagactcccacagtaccactggcacagcggcagcctctgcccatacttctcaccccatgcagggaaggaccacaccttctccagaggactcaagttggactgactttttcaatccgatcagccatcccatgggtcggggacaccaagccggtcgtagaatggatatggatagcagtcattccattacattgcagccaaccgctaatcccaacacagggttggtggaggatctcgacagaacgggcccactctcaatgaccacacagcagagcaacagccagtctttcagcacctcccatgaaggtctggaggaagacaaggaccacccgacgaccagcacgttgaccagctccaatagaaacgatgtcaccgggggccgaagggatcccaaccactccgagggctccacaacccttctcgaggggtataccagccattacccccacacaaaagagagcaggactttcatccctgtgacatccgctaagaccgggtcctttggcgtgacagccgtgacagtgggcgatagtaacagcaatgtcaatcgcagtctgtccggagaccaggatacctttcacccatctgggggcagccacacaacccacggttccgaatcagacggacatagccacgggtcccaggaagggggggctaatacaacaagcggtcctatacggactccacagatcccagagtggctgatcatcctggccagcctactagctctggcacttattcttgccgtgtgtattgcggtcaacagtcgacggagatgcggtcagaagaaaaagctggtgattaactctggaaatggcgccgtcgaagatagaaaaccaagtgggctaaatggcgaggccagtaagtcacaggaaatggtacacttagtgaacaaagaatcctcggagactcccgatcaattcatgacggccgatgaaactcgcaacctccaaaatgttgacatgaagatcggagtgtag

SEQ ID NO: 23418 - DNA, 243 bp, synthetic construct
  misc_feature 1..243: note = Description of Artificial Sequence: Synthetic coding sequence
  source 1..243: mol_type = other DNA
atggacaagttctggtggcacgccgcctggggcctgtgcctggtgcccttgagccttgcacagatcgatctcaacattacatgcagatttgccggagtttttcacgtcgaaaaaaatggcaggtattctatcagtcggacagaagcagcagacctctgcaaggcttttaattccactctgcctaccatggctcagatggagaaggctctgagcatcgggttcgagacctgttcatctacttag

SEQ ID NO: 23419 - DNA, 2229 bp, synthetic construct
  misc_feature 1..2229: note = Description of Artificial Sequence: Synthetic coding sequence
  source 1..2229: mol_type = other DNA
atggacaagttctggtggcacgccgcctggggcctgtgcctggtgcccctgtccctggcacaaatcgatctcaacatcacatgtcgatttgccggtgtcttccatgtggaaaaaaacggacgctactctatctcacggaccgaagcagctgatctctgcaaagcattcaattcgacgctgcctaccatggctcagatggaaaaagcattgtccataggtttcgaaacctgcagatacggctttattgaaggccacgtggtcattcccaggatccacccaaattccatttgcgccgccaacaacaccggggtgtacatcttaacatctaacacctcccagtacgacacgtattgtttcaacgcttctgcccccccagaggaggactgtacgtccgtcaccgacctgccgaatgccttcgatgggcccatcacaattactattgttaacagagatggcactaggtatgttcagaaaggagaataccgcaccaaccccgaggatatctacccttcaaaccctacagacgatgatgtaagcagtgggtcgagctctgagcgatcctctactagcggagggtatattttttatacctttagcactgtgcatccaatccctgacgaggattctccgtggataaccgattccactgacaggataccagccacaacccttatgtccacctcagcaacagcaactgagacagccaccaagagacaagaaacatgggactggttcagctggctgtttttgccctctgaatccaagaatcatctccacacaacaactcagatggcagggacaagctccaacactataagcgcgggttgggagcccaacgaagagaatgaggatgagagagatcgtcacctgagcttctccggctctggtatcgatgatgatgaggattttatctctagcacaattagcactactccacgagcgttcgaccacacaaagcagaaccaggattggacacagtggaatcccagccattccaatcccgaggtcctgctacagaccaccaccaggatgaccgatgtcgaccgaaacggaacaactgcttatgaaggcaattggaacccagaggcacacccacccttgatccaccatgagcatcatgaggaagaagagacgcctcacagtacctcaactatacaggccaccccctcatctacaacagaggaaacagccacacaaaaagaacagtggtttggaaacaggtggcatgaaggctatcgtcagacacccaaagaggattctcactccacaactggcaccgcagcagctagcgcccacacatcccaccctatgcaaggcaggaccacaccaagccctgaagacagctcctggactgatttctttaatccaatctcacaccccatgggcagaggtcaccaggcgggtcgacggatggacatggacagctcccattccattaccctgcagcccactgcgaacccaaatactggcctggttgaggacctcgatcgcaccgggcctctttcaatgacaactcagcaatctaatagccagagcttctccacttctcatgaaggtctggaggaagataaggatcaccccacaacttcaacactgacctcctcaaacagaaatgacgtcaccgggggtcgtagggatcccaaccacagtgagggatctacgaccctcctcgaggggtacactagtcattacccccatactaaggaatccaggaccttcattccggtgacctcagcgaagacaggttctttcggggtgaccgccgtcacagttggagattctaactcgaacgtcaacagatctctaagcggagaccaggataccttccacccgagcggtgggtcacacaccacgcacgggtccgaatctgatggacatagtcatgggtctcaggagggtggggctaatactacttctgggccaattcgcacgccccaaatccctgaatggctgatcattctagcttctttgttagctctggctttaattcttgcagtctgcattgcagtcaactcccggcgtcgctgtgggcagaagaaaaaactggtaataaactctgggaacggtgctgtcgaagaccgtaaaccttccggcttgaacggggaagcaagcaaaagccaggagatggtgcacctggtgaataaagagagttctgagacaccagaccagtttatgactgctgatgagacgaggaaccttcaaaatgtggacatgaaaatcggcgtgtag

SEQ ID NO: 23420 - DNA, 2145 bp, synthetic construct
  misc_feature 1..2145: note = Description of Artificial Sequence: Synthetic coding sequence
  source 1..2145: mol_type = other DNA
atggacaagttctggtggcacgccgcctggggcctgtgcctggtgcccctttcactggcccagatagacttgaacatcacctgccgatttgctggcgtctttcatgttgagaaaaacggccgctactccatcagccgtactgaggccgctgacctctgtaaggccttcaacagcacactgcctacgatggcacaaatggagaaagccttgtccattggctttgagacctgtaggtatggctttatcgaaggtcatgtggtcatccctaggattcatccaaatagtatctgtgctgctaacaatactggggtctatatcctgacttctaacacttctcagtacgatacatattgtttcaacgcttccgcccccccagaggaggattgtactagcgtgaccgacttgccaaatgcctttgacggacccatcactattaccatcgtcaacagagatggtactcgctatgttcagaagggcgagtaccgtacgaatccagaagatatttacccaagtaatccaacagatgacgacgtctcttctggctccagcagcgagagatccagcacttcagggggttacatcttttacaccttctctacggtgcacccaatccccgacgaggatagcccttggattactgatagtacggacagaatcccagctaccacattgatgtccacgtccgccactgcaacagaaaccgctactaaacgacaagaaacctgggattggttctcttggttgtttttgccttctgaatccaagaatcacttacacactaccactcagatggccggaactagttcgaataccatcagtgcaggctgggagccgaacgaggagaacgaagatgaacgggaccgccatctcagcttttcgggcagtggaatcgacgacgatgaggactttatttctagcactatcagtaccactccaagagctttcgatcacactaagcagaaccaagactggacgcaatggaacccttctcactccaatcccgaggtacttttgcaaacaaccactaggatgacggctgatgtggataggaacgggaccaccgcctacgaagggaattggaaccccgaggctcacccccctttaatccatcacgagcaccatgaggaagaggaaactccccacagtacatccacaatccaggctactccaagcagcactaccgaagaaacagcaacgcaaaaagaacagtggtttggaaacagatggcatgagggctatcggcagactcctaaggaggattcacacagcactaccggcactgcggccgcctccgcgcacacttcccatcccatgcaaggtcgcactaccccatcccctgaggacagttcttggaccgacttctttaacccaatctcccaccccatgggccgaggccatcaagcaggtaggcgtatggatatggactcctctcattctatcaccctgcaaccaaccgctaatcctaataccggcctggtggaggacctagatcggacaggaccacttagcatgactacacgaaatcggaatgatgtgacagggggacgcagggatcccaaccactctgaaggtagcacgacgcttttagagggctatacctctcactatccgcatactaaagaaagccgcacttttattccagtgacttctgctaaaaccggcagcttcggagtgaccgctgtcactgtgggcgacagcaattctaacgtgaaccgctctttgagtggcgaccaggataccttccatccgtcgggcggaagccatacaacccatggctctgagagcgacggacatagtcatggctcacaagaaggaggcgcaaataccacttcagggcccatcagaacaccccagatacctgaatggcttataattctggcctctctcctggccctagcattgatcttggccgtgtgtattgcagtcaattcgcgtagacgatgcggacaaaagaagaagctcgttataaactctggaaacggcgctgtggaggacagaaaaccttcaggactgaatggggaggccagcaagagtcaggaaatggtacaccttgtgaataaggaatccagtgagacgccagatcagtttatgacagccgacgagactcgcaacttgcagaacgtcgatatgaagatcggtgtctag

SEQ ID NO: 23421 - DNA, 1482 bp, synthetic construct
  misc_feature 1..1482: note = Description of Artificial Sequence: Synthetic coding sequence
  source 1..1482: mol_type = other DNA
atggacaagttctggtggcacgccgcctggggcctgtgcctggtgcctctaagccttgcacagattgacctcaacatcacatgcaggtttgctggcgtgttccatgtggaaaagaacggaaggtacagcatcagccggacggaggcagccgacctatgtaaagctttcaattccacgcttcccaccatggcccagatggaaaaagccttgtccattggctttgaaacctgtcggtatggtttcatcgagggccacgtggtaatcccccggattcacccgaattcaatttgtgcagccaacaacaccggcgtgtacattttgacatcaaacacctcacagtacgacacttactgttttaatgcctccgcccctccagaggaggactgtacctccgtaacggacttgcctaatgcctttgacggccccataactattaccattgttaaccgggatgggacacgctacgtccagaagggcgaatatcggaccaacccagaggacatctacccaagtaatcctactgacgatgacgtctcgtccgggagctcgtccgaacgatctagcacatctggagggtacatcttctatacattttctactgtgcacccaatacctgatgaagattctccctggatcactgacagcaccgaccgtatccctgccaccaacatggacagctctcattctattaccttgcagccgacagccaatccaaacactggcctcgtagaagatctggaccgcaccggccccttgtctatgaccacccagcaaagcaattctcaaagtttcagcacctctcacgagggtctggaggaggacaaggatcacccaaccaccagtaccctgacctcttccaatcggaacgacgtcaccggaggccgtcgcgacccaaaccacagcgagggatctacaactctgctcgaaggttacacgagccattaccctcacactaaagagtctcgtacattcatccccgtcacctctgcgaagacaggcagttttggcgtaactgccgtgacggttggggatagcaattctaatgtcaaccggtccctatccggagaccaggacacattccatccatcagggggctcccacactacgcacggaagtgaatccgacggccacagccacggatcccaggaggggggggccaatacaacgtccgggcccatacgtaccccacagattccagagtggctgattatactcgcctctctgctagcactcgcacttattctggcagtgtgcatcgccgtaaacagccggcggaggtgtggccagaagaaaaagttagttattaactccggtaacggggctgtggaggacagaaaacctagcggcctgaacggcgaggcatccaagtcacaggaaatggtgcacctagtgaacaaagaatcctccgagactccagaccaatttatgaccgctgacgaaacgagaaacctgcaaaacgtggatatgaagatcggagtatag

SEQ ID NO: 23422 - DNA, 1290 bp, synthetic construct
  misc_feature 1..1290: note = Description of Artificial Sequence: Synthetic coding sequence
  source 1..1290: mol_type = other DNA
atggacaagttctggtggcacgccgcctggggcctgtgcctggtgccacttagtctcgcccagatagatctcaacatcacatgtcgctttgcaggcgtgttccacgtggaaaagaacggcagatactcaatttctcgaaccgaagccgccgatctgtgcaaagccttcaactccacactgcccaccatggcccagatggagaaggccctttctattggattcgaaacatgtcggtacgggttcatagagggacacgtcgtcatccctaggatacatccgaattcaatctgtgcagcaaacaacaccggtgtgtatattctcaccagcaatactagccagtatgatacctactgcttcaacgcaagcgcccctccagaagaggactgcacgagtgtgacagaccttccaaacgcattcgatgggcctatcaccatcaccatcgtgaatcgcgacggcacacgatatgtccagaagggtgaataccggacgaacccagaagatatatatccatccaaccccaccgatgacgacgtttctagtggttcctccagcgaacggtcctccaccagtggtggttacatcttttacaccttttctaccgtccatcccataccagacgaggactctccatggatcactgattccactgacaggatccccgccacaaataggaatgatgtcactggcgggcgcagggatcccaaccacagtgagggctcaacgactctgctggagggctacactagccattacccacatactaaggagagtcgaactttcattcctgtgacgagtgctaagacgggctcctttggagtcactgcggtcaccgttggcgatagtaatagcaatgtgaatagatcactctcaggcgaccaagacacattccacccctccgggggttctcatactacccatgggtctgaaagtgacggccattcgcacggctcgcaagagggtggcgccaacaccacgagcggaccaatcaggaccccacagatacccgagtggctcatcatcctcgcctccctgctggcactggccctgattctggctgtctgtatcgcagtgaactcacgacgccgttgcgggcagaaaaagaagctggtgatcaattccggcaacggtgcggttgaagaccgaaagccctcagggctgaacggtgaagcttccaagtcccaggagatggttcatctcgtcaacaaggagagcagcgagacccctgaccagtttatgacagcagacgagacacggaatctgcagaatgtcgacatgaaaatcggagtgtag

SEQ ID NO: 23423 - DNA, 2025 bp, synthetic construct
  misc_feature 1..2025: note = Description of Artificial Sequence: Synthetic coding sequence
  source 1..2025: mol_type = other DNA
atggacaagttctggtggcacgccgcctggggcctgtgcctggtgccattgtctctcgcacagatcgatctcaatattacatgccggtttgccggcgttttccatgtcgagaaaaatgggcggtattctatcagcaggaccgaagccgccgatctctgtaaagcctttaactcaaccctccctaccatggctcaaatggagaaggccctgtctattggattcgagacctgccggtacggattcatagaagggcatgtggtgataccacgtatccaccccaatagcatctgtgctgccaacaatactggagtatacatcctgacttccaacacttcacagtacgacacctactgtttcaatgcatccgcgccgcccgaggaggattgtacttccgtgaccgaccttcccaacgcttttgatgggccaatcacgattactattgttaaccgggacggaactcgctacgtacagaagggagaatatcggacgaatcctgaagatatctaccctagcaatcctaccgatgacgacgtatccagcggtagtagttcagaacgctcctcaaccagtggcggctatatcttttacacgttttcaacagtgcaccccattccagatgaagacagtccatggataaccgactctaccgatcggattcccgctactacgcttatgtcaaccagcgctaccgccaccgagactgctacgaagcgccaggagacgtgggattggttctcttggttgtttctgccttccgaaagtaagaaccaccttcacaccacaacgcagatggcggggacatcctccaatacaatttcggcggggtgggaacctaacgaagagaacgaagacgaaagagataggcatcttagcttctctgggagcggtatcgatgacgacgaagactttatcagcagcaccatcagcacaacaccccgagccttcgatcacaccaagcagaatcaggactggacacagtggaaccctagtcactctaaccctgaagttctgctgcagacaacaacccgcatgactgacgtggatcggaatggaactactgcctacgagggtaactggaacccagaagcgcatcctcctctgatccaccacgaacaccatgaggaggaagagacccctcactcaaccagtacgattcaggcaaccccctcctcaaccaccgaagagaccgccacacagaaagaacagtggtttggtaaccgatggcacgagggataccggcaaaccccaaaggaggactcccactccaccacagggaccgccgcggcatccgctcatacctcccatcctatgcaggggcgcacaactccttctcccgaggattcttcctggacagatttctttaatccaatcagtcacccgatgggtcgtgggcaccaagctggccggcgcatggacatggacagttcacacagcatcactttacagcctaccgccaatccaaatactggcctggtcgaagacctggacagaaccggaccactatcaatgactacgcagcagtcaaacagtcagagtttctcaacctctcatgaggggctggaagaagacaaagatcatcccacaacctcaacgcttacctctagtcgggaccaggacactttccaccccagtgggggctcgcatactacacacggatcggagtcagacggccacagtcacggcagtcaggaaggaggagccaatactaccagcggacccatccgtactccccagatcccagagtggctcattattctagcaagtttgctggccctggccttgattctcgccgtgtgtatcgcggtgaactcccgaagaaggtgcgggcagaaaaaaaagcttgttattaattctggcaatggagccgtagaggaccgcaaacccagtggcctaaatggcgaagcctccaagtcacaagagatggtacacttggtgaataaggaatctagcgagactcccgatcagttcatgacagcagatgagacccgcaacctgcagaatgtcgacatgaagattggcgtttag

SEQ ID NO: 23424 - DNA, 2100 bp, synthetic construct
  misc_feature 1..2100: note = Description of Artificial Sequence: Synthetic coding sequence
  source 1..2100: mol_type = other DNA
atggacaagttctggtggcacgccgcctggggcctgtgcctggtgcccctgagcttggcacagattgacctcaatatcacctgcaggtttgctggtgtgttccacgtcgagaaaaatggccgctacagtatctcccggacggaggcagctgacttgtgcaaggcattcaatagtactctccccacaatggcccagatggaaaaagccctctctataggcttcgagacatgccgttatggattcatagagggccatgtggtgatcccacgtatccatcccaattcaatttgcgctgcgaacaataccggcgtctatattctcacatctaacacttcacagtacgacacctactgctttaatgcgtcagctccccctgaggaggattgcacctccgtgactgacctgccgaatgcattcgacgggcctataaccatcaccatcgtgaacagggacggaacccggtatgtgcagaaaggtgaatacaggacaaatcccgaagacatttacccaagtaatccgaccgatgacgatgtgtcctctgggtcctcaagtgagaggtcatcaacctctgggggttacatattttacacattcagcactgtccatccaataccagatgaggattctccctggatcactgattctaccgacaggatcccggcgaccaccctgatgtccacctccgcgaccgctactgaaacggctactaagcgccaggaaacctgggattggttcagttggctgtttctgccctcagaaagtaagaaccatcttcatacgacaactcagatggctggaacctcttccaacacaattagtgccgggtgggagccaaacgaagagaatgaggatgaaagagatagacatctgagcttcagtggctcgggaatcgacgacgacgaagactttatatctagcaccatctccacgaccccgcgcgctttcgatcataccaagcagaaccaggactggactcagtggaatccctctcacagtaaccctgaagtactgcttcagactacaactcggatgacggacgtggatcggaacggaactacagcatatgaaggaaactggaaccccgaggcccatccccctctgatacaccacgaacaccacgaggaagaagaaacaccccactctacatctaccaccgcatcggcacacacatcacatcctatgcaagggagaacgacccctagccctgaggactcttcatggactgattttttcaacccaatctcacaccctatggggcgaggacatcaagccggacggcgcatggacatggactcaagccactcaattaccctccagccaaccgccaatcccaacacaggcctggtagaagacctggataggacaggcccccttagcatgacaacccagcagtctaactctcagtcattctcaaccagccacgaaggcctcgaggaagataaggatcatccaacgacgagcaccctgacctcatctaatagaaacgatgttaccggcggtaggagggatcctaaccacagcgaagggtctacgaccctattagaaggttacaccagtcattacccgcacaccaaagagagcaggactttcattcccgtgactagcgccaaaaccggctcatttggagtcacagcagtcacagttggtgattctaattcaaatgttaatcgcagcctgagtggtgaccaagacactttccatccaagtggcggctcccacaccactcacggatctgagagtgacggccactctcacgggagccaggagggaggagctaacacaacaagcgggcccattcggacgcctcagattcccgaatggctgataatcctggcgtcactactggctcttgccctgatcctggctgtgtgtatcgccgtgaacagcaggagaaggtgcggacagaagaaaaaactggtgataaactctggcaatggggccgtggaagataggaagcccagtggactgaatggggaggcatccaagtcacaagagatggttcacctggttaacaaggagagctctgagaccccagatcagttcatgactgctgacgaaactcggaatctccagaatgtagatatgaagattggagtgtag

SEQ ID NO: 23425 - DNA, 237 bp, synthetic construct
  misc_feature 1..237: note = Description of Artificial Sequence: Synthetic coding sequence
  source 1..237: mol_type = other DNA
atggacaagttctggtggcacgccgcctggggcctgtgcctggtgcccttgtcgctggcgcaaatcgacctcaacattacctgcaggttcgccggcgtttttcacgttgagaagaatgggagatatagtatttcaagaactgaggcagccgacttatgcaaagcgttcaactctactttgccaacaatggcccagatggagaaggccttgtcaattggattcgagacatgccgctag

SEQ ID NO: 23426 - DNA, 885 bp, synthetic construct
  misc_feature 1..885: note = Description of Artificial Sequence: Synthetic coding sequence
  source 1..885: mol_type = other DNA
tgagacaagttctggtggcacgccgcctggggcctgtgcctggtgccactttcactggctcagatcgacctgaacataacctgtcgctttgccggcgtattccatgtagaaaaaaacggaaggtattccatttcacggaccgaggccgctgatctgtgcaaagctttcaattcaacactccctactatggcccaaatggaaaaggctctgagtattgggtttgagacctgtcgatacggctttattgagggccatgtggtcattcccagaattcatcccaattctatctgtgctgcaaataacactggagtttatatccttacatccaacacatcacaatacgacacctattgttttaacgcctccgcccctcctgaagaagattgtacttctgtcaccgacctccctaacgcctttgatggccccattacaatcaccatcgtaaatcgcgacggtactaggtacgtgcaaaaaggcgaatatcgtacaaaccccgaggacatttacccttcaaaccctactgatgatgatgtttcttccggctcatccagtgagagatcatcaacaagcggaggatatattttctacacattcagcaccgtccaccctatcccagacgaggactctccttggatcacagatagtaccgacagaatccccgctacacgagaccaggacactttccacccctcagggggatcccacactacccatggctccgaaagtgatggtcactcccacgggtcgcaagagggcggcgccaatacgacctccggccccattagaacccctcagataccggagtggctgatcatactggcttccctgctggcgctggcgctaatccttgccgtgtgtattgccgtgaactcccgaaggagttag

SEQ ID NO: 23427 - DNA, 918 bp, synthetic construct
  misc_feature 1..918: note = Description of Artificial Sequence: Synthetic coding sequence
  source 1..918: mol_type = other DNA
atgtggcccctggtggccgccctgctgctgggcagcgcctgctgcggatccgcccagctgctttttaacaagaccaaatctgtcgaattcacattctgcaatgacactgtggtgatcccatgtttcgttaccaatatggaagcacagaacactacggaggtctacgtcaaatggaaatttaagggccgcgatatttacacattcgacggggcgttgaacaaatctacagtgcctacggattttagcagtgctaaaattgaggtctcacaactgttaaaaggagacgcctccctcaagatggacaagagtgatgcagtctcccacaccggcaactacacatgtgaggttactgagctaaccagggaaggagagaccattattgagctgaagtaccgggtggtaagttggttctcacccaacgaaaatattctcatcgtgatcttccccattttcgctatcctgctgttctggggacaattcgggataaagacactcaaatacagatccgggggcatggatgagaagactattgcacttctggtagccggtctagtcatcaccgttatcgtgatagttggagcgatcctgttcgtgcccggtgaatatagtctgaagaatgcaacgggactggggctgatcgtaacgtctactggtatcctgattctgctacattactatgtattttctaccgcaataggcttaacaagtttcgttattgctattctggtgatccaggttatcgcctatatcctggcggtcgtcggactctccctatgtatcgccgcgtgtattcctatgcacggcccattgcttataagtggcctgtctatcctggctcttgcccagctactgggcctggtttacatgaaatttgtggcgagcaatcagaagacaattcagccccctcgcaacaactag

SEQ ID NO: 23428 - DNA, 972 bp, synthetic construct
  misc_feature 1..972: note = Description of Artificial Sequence: Synthetic coding sequence
  source 1..972: mol_type = other DNA
atgtggcccctggtggccgccctgctgctgggcagcgcctgctgcgggagcgcacagctccttttcaacaagacaaagagcgtcgagttcactttctgtaacgatactgtggtaattccctgtttcgttacaaacatggaagcacaaaatactaccgaggtgtacgtaaagtggaaattcaagggtagagatatctatacttttgacggtgctcttaacaagtctactgtacccacagacttcagttccgctaaaatcgaagtatcccagctccttaagggagatgcttctctgaaaatggacaagtctgacgctgtgtcacacacagggaactatacttgcgaagttaccgaacttacccgagagggagaaacaattattgagcttaaatacagggtcgtgtcctggttctcgccaaatgaaaacatcctcatcgtaatcttcccaattttcgccatcctgctgttttggggccagtttgggattaagacattgaaatatcggtccggtggcatggatgaaaagaccatcgcactcctggttgcaggtttggtgatcacagttattgtgatcgtaggtgcgatccttttcgtgcctggcgaatattctcttaagaacgccaccggactaggtctgattgtaacctccacggggatcctcatcctcctacactactacgtgttctccaccgccatcgggctgacgtcgttcgtgattgccattttagtcatccaggtgatagcatacatcctggcagtcgtggggctgtcactgtgtatagccgcatgcatccctatgcacgggcccctgcttatcagcggcttatctatactggctttggcccaactactcggcttagtgtacatgaaattcgttgcatccaaccaaaaaacaatccagccccctcggaaagcagtagaggaacccctgaacgcctttaaggaatccaaaggtatgatgaatgatgagtag

SEQ ID NO: 23429 - DNA, 1488 bp, synthetic construct
  misc_feature 1..1488: note = Description of Artificial Sequence: Synthetic coding sequence
  source 1..1488: mol_type = other DNA
atgcccatgggcagcctgcagcccctggccaccctgtacctgctggggatgctcgtggcctcgtgcctgggtcgactttcttggtatgaccctgattttcaagctagactcactaggtcaaattcaaagtgtcaggggcagctggaggtgtacttgaaggatggttggcacatggtatgttctcagtcctgggggcgctcgtccaagcagtgggaagacccttcgcaggcctcgaaggtgtgccagagattgaactgcggcgtgcctctgagtctggggccctttcttgtgacttacacccctcagagctctatcatttgctacgggcagcttggctcttttagcaactgtagccactctcgtaatgatatgtgtcacagcctcgggcttacctgcctggaaccacaaaaaaccacaccccccaccactagacccccccccactacaactccagaacccaccgccccaccgaggttgcagctcgtggcccagtccggaggacaacattgcgccggcgtagtggagttttactccgggtccctaggtggtactatctcctatgaggcacaggataaaacgcaagaccttgagaatttcctgtgcaacaacctgcagtgcggcagttttctgaagcatctgccggaaaccgaggcaggaagggcacaggacccgggcgaacctcgggagcaccaaccgctgcccatacagtggaaaatccaaaactcctcttgtactagcctagaacattgcttccgaaagataaagccccagaagtctggccgtgttctggctcttttgtgcagcggttttcagccaaaggtgcagtcaagactggtgggaggaagctccatttgcgaaggcaccgttgaggtgcgccagggcgcccagtgggccgccctatgtgactccagttctgctcgcagcagtctcaggtgggaagaagtttgcagggagcagcagtgcgggtccgtgaactcctacagggtgctggacgccggcgaccccaccagccggggtctgttttgcccacatcagaagttgagccagtgccacgaactatgggagaggaactcttattgcaagaaggtattcgtcacctgtcaagatccgaatcccgcggggttggccgcgggtaccgtcgcaagcattatcctcgctctcgtgctgctggtggtactgctcgttgtgtgtggccccctggcctataaaaagcttgtcaaaaagttccgccagaagaaacagcgacaatggattggtccaaccggtatgaaccagaacatgtccttccacaggaatcatactgctaccgtgagaagtcacgctgagaatcccacagcgagtcacgtagataacgagtactcccagcctccgaggaatagccacttgtctgcgtatcccgccttggaaggcgcgctgcaccgttctagcatgcagccagacaactcaagcgactccgactatgatttacacggcgcgcagcgactgtag

SEQ ID NO: 23430 - DNA, 582 bp, synthetic construct
  misc_feature 1..582: note = Description of Artificial Sequence: Synthetic coding sequence
  source 1..582: mol_type = other DNA
atgcccgaggagggcagcggctgcagcgtgcggcggcggccctacggctgcgtgctgagggccgccctagtgccactcgtcgctggactcgtgatatgtcttgtagtatgcatccagagattcgcacaggctcaacagcagctgcccctcgagtcattaggatgggatgtggccgaactgcagcttaatcacacaggccctcaacaggatcctagactctattggcaggggggtccagctctgggacggagcttcctccatggccctgagctagacaagggccagctccggatccacagagacggcatctacatggtgcatatccaggtgaccctcgcaatatgctctagcactaccgccagcagacatcaccctaccaccttggctgtgggcatttgctcaccggcttccagatctatcagcctcctgaggctgtcttttcaccagggatgcaccattgcctctcagagactgactccactggctcgcggggacactctttgcacaaatctgacaggtacgctgctaccatcgagaaacactgatgagacattcttcggggtccagtgggtgcgtccatag

SEQ ID NO: 23431 - DNA, 627 bp, synthetic construct
  misc_feature 1..627: note = Description of Artificial Sequence: Synthetic coding sequence
  source 1..627: mol_type = other DNA
atgcccgaggagggcagcggctgcagcgtgcggcggcggccctacggatgcgtactaagggcagcactggtccccctggtggccgggttggtcatctgcctggtggtgtgtattcagagattcgcccaggcccaacaacagttgcccttggaaagccttggttgggatgtggctgagctgcagctcaatcatacagggccccagcaagacccaaggctgtactggcagggcggccccgccctgggtcgctcattcctgcacggtcctgagctggataagggacagctgcggatccatagggacggaatctacatggtgcacatacaagtgaccctggctatatgctcctcaaccactgcctcacgccatcaccctaccactctggcggtaggaatctgttctccagcgtccagatcgatttccctgctgcggttgtcctttcaccagggcctgtttggcttctggaattggggcctgaaagttaagtgcttccttcgccacttaatctggacagctcactgcttcatccctctcacccaactggttttcatgcaagctctacagtcatggcgaaaccaccattgttcacacttcacggacgaagagaataggggggtcaacagatag

SEQ ID NO: 23432 - DNA, 1305 bp, synthetic construct
  misc_feature 1..1305: note = Description of Artificial Sequence: Synthetic coding sequence
  source 1..1305: mol_type = other DNA
atgagcgccgacggcgccgaggccgacggcagcacccaggtgaccgttgaggaaccagtgcagcaaccaagcgttgtggatcgcgtggcctccatgcccctcattagcagcacatgcgacatggtgagcgcggcatacgcctccactaaggaaagttaccctcatatcaagaccgtttgcgacgctgccgaaaagggggtgcgcactcttaccgctgcggcagtcagcggcgcacagccgatcctaagtaagttggagccacagattgccagcgcctcggagtatgcccacagagggttagataaactggaagagaatcttccaatcttgcaacagcctacagaaaaggtcctcgctgataccaaagagctggtctcctccaaggtgagcggtgcccaggaaatggttagcagtgcaaaagataccgtggcgacacagctgtccgaggctgtagatgctactaggggagccgttcagtcaggtgtggacaaaaccaaatctgtcgtgacaggaggcgttcagtcagtcatgggatccaggttgggccaaatggtgttgtcgggagtggacaccgttctgggcaaatccgaagaatgggcggacaaccacctcccccttactgacgccgagctggcacgtattgctacctcacttgatgggtttgacgtggcatctgtccagcagcaacggcaagagcagtcctatttcgtaagactaggatctctttccgagcggctgagacagcatgcctacgagcacagcctcggcaagctgcgggccaccaagcagagggcccaggaagcacttttacagttgagccaggtactgagccttatggaaactgtgaaacagggcgtcgaccagaaactggtcgaagggcaggaaaagctccatcagatgtggttatcatggaaccagaaacagcttcagggccctgagaaggagccaccaaagccagaacaggtggaatcccgagccctcacgatgtttagggatatcgctcagcagctacaggccacatgtactagtttgggatcaagtatccagggtctgcctaccaacgtgaaggatcaagtgcaacaggccagacgtcaggtcgaagacttgcaggctaccttctcatccatacacagctttcaggacctgtccagctccattctcgcccaaagtcgagagagagtagctagcgccagggaagccctggatcacatggttgagtatgtagcccaaaatacccccgtcacctggcttgtgggcccttttgcccccggaataactgagaaggctccagaggagaagaaatag

SEQ ID NO: 23433 - DNA, 567 bp, synthetic construct
  misc_feature 1..567: note = Description of Artificial Sequence: Synthetic coding sequence
  source 1..567: mol_type = other DNA
atgcccggcggccccggcgtgctgcaggccctgcccgccaccatcttcctgctattcctgctgagcgccgtataccttgggccaggatgccaggctctgtggatgcacaaggtacccgcctcattaatggtgtccctgggggaggacgcccacttccagtgtccccataattcgtccaataatgcaaacgtgacatggtggcgggttctgcacggtaactacacttggccccctgagttcctcggccccggagaggacccgaatgagccacccccccgacccttcctagacatgggcgagggaacaaaaaatagaatcatcacagcagaaggcatcatcctgctgttttgcgcagtggtgcctgggacgctgctccttttccgcaaaagatggcagaatgaaaaactcggcctagatgcaggggatgaatacgaggacgagaacctgtacgaagggttgaacctggatgattgttccatgtatgaggacatcagtcgcggactgcaaggcacctatcaggatgttggaagccttaatataggagacgtgcagctggagaaaccctag

SEQ ID NO: 23434 - DNA, 867 bp, synthetic construct
  misc_feature 1..867: note = Description of Artificial Sequence: Synthetic coding sequence
  source 1..867: mol_type = other DNA
atgggccacacccggcggcagggcaccagccccagcaagtgcccctacttaaatttctttcaactgctggtgctggcagggctgtcccacttctgctcgggcgtcattcacgtgacaaaggaggtgaaagaagtggccactttatcatgtggccacaatgtttctgtcgaggagctcgcccagaccagaatctattggcagaaggaaaagaagatggtgctgacgatgatgtccggtgacatgaatatctggcccgaatataagaatcggaccatctttgatattacgaacaatctgtctatcgtcatcctggcactcagaccaagtgacgagggaacgtacgaatgcgtagtcctgaaatacgaaaaagacgctttcaaacgtgaacaccttgccgaggtgactttgtccgttaaagcagatttccctactccatctatctcagattttgagattcctactagtaatatccgacggataatttgcagcacatcaggaggctttcctgagccgcacctttcttggctggaaaacggcgaagaacttaatgctattaacacgacggtgtctcaggatccagaaacagagctgtacgctgtgtcctccaagcttgacttcaatatgactaccaaccattcctttatgtgtcttattaaatacggccacttgcgggttaatcaaacatttaactggaatactacaaagcaggagcatttcccggacaacttgctgcccagctgggctattactcttatatcagtaaacggcatatttgtgatttgttgccttacctattgttttgcaccccggtgtcgggagcggcggaggaacgagcgtttacgacgcgaatctgtaagacccgtttag

SEQ ID NO: 23435 - DNA, 489 bp, synthetic construct
  misc_feature 1..489: note = Description of Artificial Sequence: Synthetic coding sequence
  source 1..489: mol_type = other DNA
atgggccacacccggcggcagggcaccagccccagcaagtgcccctatctgaacttttttcagctgctggtactcgctggcctgagccatttttgctccggcgtgatccacgtaactaaagaggtgaaagaagttgctaccctctcttgcgggcacaacgtcagcgtggaagaacttgcacagactcgcatatactggcagaaggaaaagaaaatggtgcttacaatgatgtctggtgatatgaatatttggccagaatataagaaccgcaccatctttgatataacaaataatctgagcattgtaatcttggccctgcgtccatctgatgagggcacttatgagtgtgtggtgcttaagtacgaaaaagacgcctttaaacgcgagcacttggctgaggtgaccctgtcagtcaaaggcttcgccccccggtgtcgggagcgaagaagaaacgaaagattaagacgggaaagcgtgcgccctgtgtag

SEQ ID NO: 23436 - DNA, 771 bp, synthetic construct
  misc_feature 1..771: note = Description of Artificial Sequence: Synthetic coding sequence
  source 1..771: mol_type = other DNA
atgggccacacccggcggcagggcaccagccccagcaagtgcccctacctgaattttttccaactcctggtgctggctggcctgtcccacttttgcagtggcgttatacacgttaccaaggaggtgaaagaggtggccactttatcctgtggccacaacgtcagcgtcgaagaactggctcaaacccggatatactggcagaaagagaaaaagatggtcttgactatgatgtcaggcgacatgaacatttggcccgagtataaaaatagaactattttcgatattacaaacaatctgagcatcgtgattttggctctcagacccagtgatgagggtacatatgagtgtgtcgtcctgaagtacgagaaggatgcttttaagcgcgaacacctggccgaagtaacactctccgtgaaagccgacttccctacacccagcatcagcgactttgaaatcccaactagcaatatacgacgaatcatctgcagcacctcaggaggattccctgaacctcacctgtcttggctcgaaaacggagaagagctgaatgccatcaacacgacagtcagtcaggaccccgaaaccgagctctacgcagtgtcaagcaagctggacttcaacatgaccactaatcatagctttatgtgcctgatcaagtacgggcatctgagggtcaatcagacatttaactggaacacaagctttgcgcctcgatgccgggaacggaggagaaacgagaggttacggagggagtcagttcgccccgtttag

SEQ ID NO: 23437 - DNA, 867 bp, synthetic construct
  misc_feature 1..867: note = Description of Artificial Sequence: Synthetic coding sequence
  source 1..867: mol_type = other DNA
atgggccacacccggcggcagggcaccagccccagcaagtgcccctacctgaacttctttcagctgctcgtgctagcaggactgtctcacttctgctcgggggttatccatgtcactaaggaagtcaaagaggtagccactctgtcttgcgggcacaacgtgagcgtagaagaattggcccagacgcggatttactggcagaaagaaaagaaaatggtccttaccatgatgtctggggacatgaatatttggcccgagtataaaaaccggacaatctttgatattactaataacctgagcattgtcattctagccctccgaccatccgacgaagggacatacgaatgcgtagttcttaagtatgagaaggacgcgttcaagagagaacacctcgcagaagtgaccctgtccgtgaaggctgatttcccaactccaagcattagcgatttcgagatacctacctctaacatccgaaggattatctgtagcacatcagggggctttcccgaaccccatctgtcttggctggagaacggggaagaattgaacgctattaacactaccgtctcacaggaccccgaaactgagctatacgcagtctcttccaagctggactttaatatgaccacaaatcattccttcatgtgcttgatcaagtacggccacctgagagtgaaccagaccttcaactggaacactacaaagcaggagcattttccagataatctcctcccttcctgggccattaccctgattagtgtaaacggtattttcgtgatctgttgccttacctattgttttgccccacgctgccgggaaaggaggcgtaacgaacgcctgcggcgcgagtcagtgcgccctgtgtag

SEQ ID NO: 23438 - DNA, 456 bp, synthetic construct
  misc_feature 1..456: note = Description of Artificial Sequence: Synthetic coding sequence
  source 1..456: mol_type = other DNA
atgagcatccccttcagcaacacccactaccggatcccccagggcttcggaaatctgctggagggtcttacccgggaaattttgcgagagcagccagataacattcctgcctttgccgcggcatatttcgagagcctgctggagaaacgagaaaagactaacttcgaccctgctgagtggggctcaaaggtcgaagatagattttacaacaatcatgcgtttgaggaacaagaacctcctgaaaagtctgatcctaagcaggaggaaagtcagatttcaggtaaggaggaagagacctcagtaactattttggactcatcagaggaagataaggaaaaggaggaggttgccgctgtgaagatccaggctgcattcagaggtcacatcgcaagggaagaagccaaaaaaatgaaaactaatagtctgcagaacgaagaaaaggaggaaaacaagtag

SEQ ID NO: 23439 - DNA, 729 bp, synthetic construct
  misc_feature 1..729: note = Description of Artificial Sequence: Synthetic coding sequence
  source 1..729: mol_type = other DNA
atgggcagcgcctgcatcaaggtgaccaagtacttcctgttcctgttcaatctcatcttcttcattctgggcgccgtcatactcgggttcggcgtctggattttggcggacaaatcatcctttatctccgttctccagacctcgtccagctctcttaggatgggcgcttacgtgtttattggggtgggagcagtcacaatgctgatgggattcctggggtgtattggggctgttaacgaggtacggtgcctgttaggattgctcaagcaagaaatgggcggtattgttaccgagctgatcagagattataatagcagtagagaggatagcctgcaggacgcttgggactacgtccaggcacaagtgaaatgttgtggatgggtgagtttctataactggactgacaacgcagaactcatgaatcgacccgaggttacatacccatgtagctgtgaagtgaaaggagaagaagacaacagtctgagtgtacgaaaggggttttgcgaggcgcccggtaacagaacccagtcgggcaaccaccccgaagactggcccgtttaccaagagggctgcatggagaaagtgcaggcctggctgcaggaaaatctggggattattttgggtgttggcgtcggggtcgctattattgagctgctcggcatggtgctgtcaatttgcctgtgtcggcatgtccactcagaggactactctaaggtgcctaagtactag

SEQ ID NO: 23440 - DNA, 207 bp, synthetic construct
  misc_feature 1..207: note = Description of Artificial Sequence: Synthetic coding sequence
  source 1..207: mol_type = other DNA
atgggcagcgcctgcatcaaggtgaccaagtacttcctgttcctgttcaacttgatatttttcatactgggcgccgtgatcctcggtttcggagtttggattctcgccgataaatcctccttcataagtgtgctgcagacgagctcatcatccctccgaatgggtgcatacgtttttatcggggtcggggcagtcactatgctgtag

SEQ ID NO: 23441 - DNA, 117 bp, synthetic construct
  misc_feature 1..117: note = Description of Artificial Sequence: Synthetic coding sequence
  source 1..117: mol_type = other DNA
atgggcagcgcctgcatcaaggtgaccaagtacttcctgttcctgtttaatttaatattctttatactcggggccgtgattctcggattcggcgtctggattttggccgacaagtag

SEQ ID NO: 23442 - DNA, 318 bp, synthetic construct
  misc_feature 1..318: note = Description of Artificial Sequence: Synthetic coding sequence
  source 1..318: mol_type = other DNA
atgggcagcgcctgcatcaaggtgaccaagtacttcctgttcctgttcaatctcatcttcttcatactgggtgccgtcattcttggtttcggtgtgtggattctggccgataagtcttcgttcatcagtgttctacaaactagttccagctcccttcggatgggggcctatgtgtttatcggggtcggagccgtcacaatgctgatgggcttccttggatgtatcggcgcggtcaatgaggttcgttgcctcttgggactttacttcgcctttttgctgttgatcctcatcgcccaggttactgctggggcgctatag

SEQ ID NO: 23443 - DNA, 327 bp, synthetic construct
  misc_feature 1..327: note = Description of Artificial Sequence: Synthetic coding sequence
  source 1..327: mol_type = other DNA
atgggcagcgcctgcatcaaggtgaccaagtacttcctgttcctgtttaatctaatttttttcatcctcggagcagtgatccttggattcggggtatggatcctggccgacaagtctagcttcatatcagtgttgcagacatctagtagcagcctcagaatgggggcatatgtgtttatcggcgtgggcgcagtcaccatgctgatgggatttcttggatgcattggggccgtgaatgaggtccgctgcctcctaggactgtactttgcatttctgctgctcatcttgattgcacaggtgaccgccggtgcactgttttacttttag

SEQ ID NO: 23444 - DNA, 708 bp, synthetic construct
  misc_feature 1..708: note = Description of Artificial Sequence: Synthetic coding sequence
  source 1..708: mol_type = other DNA
atggccctgcccgtgaccgccctgctgctgcccctggccctgctgctacacgcagcccggccatcccagttcagggtcagtcctctggatcgcacatggaacctaggcgagacagtggagttaaaatgccaagtattactgagcaacccgacttctggttgctcgtggttgttccagcctcggggcgccgcagcctccccgacttttttactgtacctcagccagaacaagccgaaagccgccgaagggcttgacacccagcgtttcagcggcaagcggctgggagatacctttgtcctaacgctctccgacttccgacgcgagaacgaaggatactacttctgctctgcactgagtaactccatcatgtacttttcccattttgtgccagtgttcctccctgctaaacccaccacaaccccagcccccagaccgccaaccccagccccaacgattgcatcacagcccctctcactacgcccagaggcttgtaggcctgcggccgggggggccgtccacacccgaggactcgatttcgcttgcgacatttacatttgggcccccttagctgggacatgtggagtgctgctactgtcgctggtgattactctctattgcaaccatcgcaatcggcgaagggtttgcaaatgtcccagacccgttgttaagtcgggtgataagccgtcacttagcgcacgttacgtgtag

SEQ ID NO: 23445 - DNA, 597 bp, synthetic construct
  misc_feature 1..597: note = Description of Artificial Sequence: Synthetic coding sequence
  source 1..597: mol_type = other DNA
atggccctgcccgtgaccgccctgctgctgcccctggccctgctgctccacgccgcccgaccaagccagtttcgggttagcccgctggaccgaacctggaatttgggagagacagtggaactaaaatgccaggtcctgctttctaaccccacaagcggttgttcttggctttttcagcctaggggtgcggctgcatcgccaacatttctgctttacttaagtcagaataaaccaaaggctgccgaagggctagacacacagcggttctcaggaaaaaggttaggtgacacttttgttctcacacttagcgacttcaggcgggagaatgaaggctattatttttgttccgccctgagcaacagcattatgtactttagccatttcgtccccgtctttctccccgccaagcccaccaccactccagctcccaggcctccaaccccagccccaacaatcgcttcccagcctctttcattacgcccggaagcttgcagacccgccgccggcggcgccggcaacagaagacgggtttgcaaatgtccaaggcctgtcgtgaaaagcggcgataaaccaagcctgagtgcccgctatgtgtag

SEQ ID NO: 23446 - DNA, 708 bp, synthetic construct
  misc_feature 1..708: note = Description of Artificial Sequence: Synthetic coding sequence
  source 1..708: mol_type = other DNA
atggccctgcccgtgaccgccctgctgctgcccctggccctgctgctgcatgcagcacgcccttcgcagttccgcgtcagccccctggaccggacctggaatcttggggagactgttgagctgaagtgccaggtcctactatctaatcccactagtggctgtagctggctcttccaaccccgcggcgcagccgctagtcccaccttccttctgtacttgagtcagaataaaccaaaggcagctgagggccttgatacacaacggttcagtggcaaacggcttggagacaccttcgtactcacgctgtccgacttccgtagagaaaatgagggatactatttttgctctgccctgagcaactccatcatgtacttcagccatttcgtcccagtctttttgcctgcaaagccaaccactacaccggccccgcggcccccaacacccgctcctacaatagcatcgcagccactttcgttacgaccagaggcatgccgccctgccgctggcggagcggtccacactcgtggcctggactttgcttgcgacatctacatttgggcacccctcgccggaacgtgtggcgttctgctcctttctttagtaattactctgtactgtaaccacagaaaccggcgacgcgtgtgtaagtgcccacgcccggtcgtaaaatctggagataaacctagcctgagtgcccgttacgtatag

SEQ ID NO: 23447 - DNA, 597 bp, synthetic construct
  misc_feature 1..597: note = Description of Artificial Sequence: Synthetic coding sequence
  source 1..597: mol_type = other DNA
atggccctgcccgtgaccgccctgctgctgcccctggccctgctgctgcatgccgctcgcccgtcacagttcagggtttcccccctggacagaacttggaacctgggagagacagtggaacttaaatgccaggtgctgctctctaatccaactagcggatgttcttggttatttcaacctagaggagcggcagccagtcccacctttctgctatacttatcacagaacaaaccaaaggcggctgaaggattggatacacagaggttcagcggcaagaggttaggtgacactttcgtgctcacattaagcgattttcggagggagaacgaaggctactacttctgctcggctttgtccaactctatcatgtattttagccatttcgtacctgtctttctgcccgtgcacacacgaggtctggattttgcatgcgacatctacatttgggccccattagcaggaacctgcggggtgctccttctttccctggttattaccttatattgcaaccatagaaatcggagacgcgtttgtaagtgccctcgcccggtggtgaagtctggagacaaacccagcctgtcagccaggtatgtctag

SEQ ID NO: 23448 - DNA, 663 bp, synthetic construct
  misc_feature 1..663: note = Description of Artificial Sequence: Synthetic coding sequence
  source 1..663: mol_type = other DNA
atggccctgcccgtgaccgccctgctgctgcccctggccctgctgcttcacgcagctaggccatcacaatttagggtgtcccctctcgacaggacctggaatcttggcgagacagtcgagctgaaatgtcaggtgctacttagtaatcccacttcgggatgctcttggctcttccagccacgcggggcagcggcaagcccaacgttcttgctgtacctatctcagaacaaacctaaagctgccgaggggctggacacccttagcgactttaggagggaaaacgagggctattatttctgcagtgcgctatcaaattccatcatgtatttctcacactttgtgccagtgttccttcctgccaagcccacaaccacccccgccccaagaccgccaacaccagccccaacaattgccagtcagccactgagccttagacccgaagcttgtcgccctgccgcaggaggcgcggttcacactcgaggattggatttcgcgtgtgatatttacatctgggccccattggccggaacatgtggagtcctgcttttgtcattagttatcacactgtactgcaaccatcgtaatcgccggcgagtgtgcaagtgcccacgtcctgttgttaagagtggtgataaacctagcctaagtgctcgctacgtttag

SEQ ID NO: 23449 - DNA, 597 bp, synthetic construct
  misc_feature 1..597: note = Description of Artificial Sequence: Synthetic coding sequence
  source 1..597: mol_type = other DNA
atggccctgcccgtgaccgccctgctgctgcccctggccctgctgctgcacgccgcccgccccagccaatttcgagtctcaccactcgaccggacgtggaacctcggagaaactgttgaactgaagtgtcaggtgctactgtctaaccctaccagcggctgttcttggctgttccagcccagaggagcagcagcctcccctacgtttctgctgtacttatcccaaaacaagccaaaagcagcagagggcctggacacccaacgctttagcggcaaacggctgggagacacgttcgttcttactctgagcgatttccgcagggagaatgaaggttactacttttgttcggccctctccaatagcattatgtatttcagtcatttcgtgcccgtatttttacccgctaagccaacaacaacacccgctcctcgccctcctacaccggctccaacaatcgctagccagccgctgagtctccggcctgaggcatgccggcccgctgccggcggagcagggaacaggcggagggtgtgcaagtgcccacggcctgtggtcaagtcgggagacaagcccagtctttctgcgagatatgtatag

SEQ ID NO: 23450 - DNA, 831 bp, synthetic construct
  misc_feature 1..831: note = Description of Artificial Sequence: Synthetic coding sequence
  source 1..831: mol_type = other DNA
atgcggaaccaggcccccggccggcccaagggcgccaccttcccccccagacgacctacaggctccagagcaccccccctggctccagagttgagagctaagcagcgccctggggaacgcgtgatggcactaccagtcacagccttgctgctcccactcgcattactcctgcatgcggcacgcccgagtcaattccgtgtctctcccctcgatagaacttggaatctcggagagaccgttgaacttaaatgccaggtcctgctttcaaatccaacatctggttgttcctggttattccagcctagaggcgctgctgcaagtcccacattcttactctatctgagccagaataagcccaaagcagccgaggggctcgatactcagaggttttccggtaagcgcttgggtgacaccttcgttcttactctttccgatttcagaagagaaaatgagggatattatttctgcagcgccctttccaatagcattatgtacttctcccattttgtaccagtgttcctgcctgcgaagccaacaaccactcctgcccctcgtccacccaccccagcccctactatcgcttcacagccattgagcttgcggccagaggcctgtagacctgccgcaggcggtgccgtccacactcgcggattggatttcgcctgtgatatttatatttgggcaccactagccggcacgtgcggtgtgcttctgttatcattagtaattaccctctattgtaatcacaggaatcggaggcgagtttgcaaatgcccacgaccagtggtgaaatcaggcgataagccttccctgtctgcccgctatgtgtag

SEQ ID NO: 23451 - DNA, 240 bp, synthetic construct
  misc_feature 1..240: note = Description of Artificial Sequence: Synthetic coding sequence
  source 1..240: mol_type = other DNA
atgagccacaagcagatctactacagcgacaagtacgacgacgaggaatttgagtaccgacacgtgatgctgcctaaagatattgccaagctggtccctaaaacccacctgatgagtgagtcagaatggcggaacctgggcgtgcaacagtcacaagggtgggtacactacatgattcatgaacccgagccccacattttgctctttaggcggcccttacccaaaaaacccaaaaagtag

SEQ ID NO: 23452 - DNA, 204 bp, synthetic construct
  misc_feature 1..204: note = Description of Artificial Sequence: Synthetic coding sequence
  source 1..204: mol_type = other DNA
atgagccacaagcagatctactacagcgacaagtacgacgacgaggaattcgaatatcgccacgtgatgctgccgaaggatattgctaaactggtgcctaagactcacttgatgagcgaatccgagtggcggaacctaggcgtacagcaatcgcagggctgggtccattatatgatccatgaacccgggcagtgcacagggtag

SEQ ID NO: 23453 - DNA, 192 bp, synthetic construct
  misc_feature 1..192: note = Description of Artificial Sequence: Synthetic coding sequence
  source 1..192: mol_type = other DNA
atgcggacccggcacgtgatgctgcccaaggacatcgccaagctggtgccaaagacccatctgatgtccgagagcgagtggcgcaacctcggagtgcagcagtcccagggttgggtgcactacatgattcacgaacccgagcctcacatcttactgttccggcggcctctgcctaagaaacctaagaagtag

SEQ ID NO: 23454 - DNA, 240 bp, synthetic construct
  misc_feature 1..240: note = Description of Artificial Sequence: Synthetic coding sequence
  source 1..240: mol_type = other DNA
atggcccacaagcagatctactacagcgacaagtacttcgacgagcattacgagtaccgccacgttatgctccccagagagctgagcaagcaggtgcctaaaacacacctgatgtcagaggaagaatggcgaagacttggcgtgcagcagtcattgggttgggtacattacatgatacacgaaccagagcctcatattcttttgtttagacggccccttcccaaggatcagcaaaagtag

SEQ ID NO: 23455 - DNA, 1533 bp, synthetic construct
  misc_feature 1..1533: note = Description of Artificial Sequence: Synthetic coding sequence
  source 1..1533: mol_type = other DNA
atgcaccccctgcagtgcgtgctgcaggtgcagcggagcctgggctgggggccactggcctccgtgtcttggctgagtttacgcatgtgccgggctcactcttcactaagtagcacgatgtgccctagccctgagcgacaggaggatggcgctaggaaggacttctcatcacgactggctgccggccccacatttcagcacttcctgaagagcgcctccgccccccaggaaaaacttagcagcgaggtggaggatcccccaccttacttgatgatggacgagctgctcgggcggcagagaaaggtatatttggagacatacggttgtcagatgaacgtgaacgacacagaaatcgcctggtctatattacagaaatcgggctatctgcggacgtccaaccttcaggaggcagacgttatcctgctggttacgtgttctattcgggagaaggcggagcaaacaatttggaaccgtctgcatcagctgaaagcactgaagacacggcgtcctaggtcaagagtaccattgcggataggcattctgggctgcatggctgagaggttgaaagaagagattttaaaccgggagaaaatggtagacattcttgctggccccgacgcataccgggatctaccccgacttctggctgtggctgagagtggccagcaggcagcgaatgtcctcctttctctggatgagacgtacgctgacgtgatgcctgtgcaaacttcggccagcgccacatctgcctttgttagcataatgagaggctgtgataacatgtgttcttattgcattgtacccttcacccgagggcgagagagaagtcgtccgatagccagcattctcgaagaggtaaaaaagctgtcagaacaagttctgcaacttatacacgagcgggacaacatttgcaagcagattcatttgccagctcagtcaggcagctctcgcgtacttgaagctatgaggaggggatacagccgagaagcctacgtggaactggtacaccacatcagggaatcaatacccggcgtgtccctgagttccgattttattgccggcttctgcggagagaccgaggaagaccacgtgcagactgtctccctacttcgtgaagtgcagtataatatgggctttttgttcgcctacagcatgcgccagaagaccagggcttatcatagactgaaggatgacgtacccgaggaggtcaagctaaggcggttagaagagctcatcactatcttccgggaggaagcgactaaggcgaatcagacctccgtgggttgtacccagctcgttcttgtcgagggcttaagtaaacgctccgctacagatctgtgcgggcggaatgacggtaacctgaaagtaattttccccgatgcagagatggaggacgttaacaacccagggttgcgcgtgcgtgctcagcctggcgactacgtcctggtgaagatcacatccgcatccagccaaacacttcgaggtcacgtgctgtgtcgcacaaccctaagggacagctccgcgtactgctag

SEQ ID NO: 23456 - DNA, 1764 bp, synthetic construct
  misc_feature 1..1764: note = Description of Artificial Sequence: Synthetic coding sequence
  source 1..1764: mol_type = other DNA
atgcaccccctgcagtgcgtgctgcaggtgcagcggagcctgggctggggccccttggcaagcgtctcatggctgtccctgcgcatgtgtcgagctcacagttcccttagctcaaccatgtgtcccagtcccgaacggcaggaagacggcgccaggaaggatttcagttcacgcctcgcagctggccctacattccagcacttcttgaagagcgctagcgccccccaggagaagttatcttcggaggtggaggacccacccccttaccttatgatggacgaactcttaggaagacagcgtaaagtgtacctggagacgtacgggtgccagatgaacgttaatgatacagaaatcgcgtggtccatcctgcagaaaagcggatatcttagaacaagcaatcttcaggaagcagatgtgatcttgttggtaacatgctctatccgggagaaggctgaacagacaatatggaatagacttcaccagctcaaagctttgaagacccgcaggcctagaagtcgggtgcccttgcgtattggaattttagggtgcatggccgagaggttgaaagaggaaatcctgaatagagagaaaatggtggacattctggcaggacccgatgcctacagagatctgcccagattactcgcagtcgccgagtccgggcagcaggcggccaatgtactcctttcactggacgagacatatgccgatgtcatgccagtgcagacctcagcgtcagctacctcagcatttgtaagtatcatgcggggctgcgataacatgtgctcctactgcatcgtgcccttcacacgcggtagagagaggtcaaggccgattgcatctattctggaggaggtgaagaagcttagcgagcagggcctcaaggaggtcacccttctgggccagaacgtgaacagctttcgagacaactcagaagtccagttcaacagcgctgtacccaccaatctttcacggggtttcaccacaaactataaaaccaagcagggcggccttcggtttgcccacctgctcgaccaggtctcaagggtggacccggagatgaggattagattcacctctccacaccccaaagactttcctgacgaagtcctgcagttgatccacgagagggataatatctgtaaacaaattcacctccccgcccagagtggcagctctcgggtccttgaggcaatgaggaggggatatagcagggaggcgtacgttgaactcgtacaccatatcagggagtcaatacctggcgtgtccctatctagtgactttatcgccggtttctgcggtgaaaccgaggaagatcacgtgcaaactgtctctctgctcagagaggtacagtataatatgggttttctgttcgcatattccatgcgtcagaagacaagggcctatcatcggctgaaggacgacgtccctgaggaggtcaaactgcgcaggcttgaggaattgattaccatcttcagggaagaagctaccaaggccaatcagacctccgtcggttgcacccagttagtactcgtggagggactctcaaaaagaagtgcgactgacctttgcggcagaaatgacggtaatctgaaggtcatctttcctgatgctgaaatggaagacgtgaacaaccctggactgcgtgtgcgggcgcaaccaggcgactacgtgttggtgaagatcacttctgcctctagtcagacactgagagggcacgtgctgtgcagaacaactctgcgcgattcctctgcctactgctag

SEQ ID NO: 23457 - DNA, 1806 bp, synthetic construct
  misc_feature 1..1806: note = Description of Artificial Sequence: Synthetic coding sequence
  source 1..1806: mol_type = other DNA
atgcaccccctgcagtgcgtgctgcaggtgcagcggagcctgggctggggtcccctggcctccgtcagctggcttagcctgagaatgtgtcgagcgcattccagtctctctagcacaatgtgcccctccccagaacgccaggaggacggcgcgagaaaggacttctcgtcaaggctggcagcaggaccgacttttcagcacttcttaaaatctgcttcagccccacaggaaaaactcagctctgaggtggaagaccctccaccatatttaatgatggacgagttactgggccgccagcgtaaggtgtacttggagacgtacggatgccagatgaatgtcaatgacacagagatcgcttggtccattctacaaaaatctgggtacctgaggaccagcaatcttcaggaggccgatgtcatcttgctggtcacctgcagcatccgggagaaggctgaacagacaatctggaatcggctgcaccagctgaaggcacttaagacccggcgtcctcgaagcagggtccccctcagaattggcatactcgggtgcatggccgagagactgaaggaggaaatcctgaaccgcgagaagatggtggacatcctcgcaggcccagacgcctacagggacctcccgcgcctgctcgccgtggccgaatccgggcagcaggctgccaacgtacttctgtctctggacgagacctacgccgacgtgatgcccgtgcagacgtcagcttcagccacaagcgcctttgtgtccatcatgaggggatgcgataacatgtgttcctattgcattgtcccttttacacggggcagggaaaggtccagacctatcgccagcattttggaggaggtaaagaaacttagtgagcaggtgtttcttccacccagacccccaaaggtgttggggcttcagggcctgaaggaagtgactctgctgggacagaacgtaaacagcttccgagacaattctgaggttcagttcaactctgcggtgcccaccaatctgagtagaggatttaccaccaattacaagactaaacaaggcggccttaggttcgctcatcttctggatcaggtctccagggtggatccggagatgcggattaggttcacatcaccccatccaaaggactttcctgacgaggtactgcagctgatccacgagcgtgacaacatctgtaagcagatccatctgcctgcccagagcggctcttccagagtactggaggcgatgcggcgggggtattccagggaggcgtatgtggagctggtgcaccatatcagagagagcatcccgggtgtcagtctttcatctgactttattgctggcttctgtggtgagaccgaggaggatcatgtgcagacggtgtcgttgctgagggaagtgcaatataacatgggattcctgtttgcatatagtatgcggcagaagacacgcgcataccatagattgaaggacgatgtgcccgaggaagtaaaactgagacgcctcgaagagctgataaccattttcagggaggaggcaacaaaggcaaatcagacgtcagttggctgcacccagctggttctggtggagggtctgtcaaagcgctcagctaccgacctctgcgggaggaacgacgggaacctaaaagtgatctttcccgatgcagagatggaggacgtaaacaaccctggacttagggtgcgtgcccaacccggcgattacgtactcgttaaaataacatctgcctccagccagacccttaggggacatgttctttgtaggaccacactaagggactcgtccgcttactgttag

SEQ ID NO: 23458 - DNA, 984 bp, synthetic construct
  misc_feature 1..984: note = Description of Artificial Sequence: Synthetic coding sequence
  source 1..984: mol_type = other DNA
atgaacgtgaacgacaccgagatcgcctggagcatcctgcagaagagcggatacctccgcacttccaacctccaggaggccgacgtgatccttctggtgacttgctccattagggaaaaggcagaacaaactatctggaacagactgcatcagctgaaagcactcaagacgcgacggccgaggagccgagtcccactccggatcggcatcctgggttgcatggccgagaggctgaaggaggagatcttaaaccgggagaaaatggtggacatcctcgcaggcccagatgcctatagagacctgccacgtctactcgctgtagcggaatccggtcagcaagctgcaaacgtcctcctctcactggacgagacttatgccgacgttatgcctgtgcagacatcggcttcagctacctccgcttttgtgtacagccgggaagcctatgtcgagctcgttcaccacatccgggaatccatcccaggggtttccttaagctctgatttcatcgccggcttttgcggggaaaccgaagaagaccatgtgcaaaccgtcagtcttctgagagaggtccagtataacatgggctttctgtttgcctatagcatgcgacagaagacacgtgcttaccaccggctgaaagatgacgttcccgaagaggtcaaactgcggaggctcgaggagctgataaccatctttagggaagaggccactaaggcaaaccaaacctctgtcggatgtacccagttagtccttgtggagggtttgagcaaaagaagcgctactgatctttgcggcagaaatgacggcaatctcaaggtgatcttcccagatgccgaaatggaggatgtcaacaatccaggcttgcgcgtgagggcgcagcctggcgattacgtgctggtcaagattaccagcgcctcttctcagaccttgcgtggtcacgtgctctgcaggactaccctgagagacagctctgcctactgctag

SEQ ID NO: 23459 - DNA, 1494 bp, synthetic construct
  misc_feature 1..1494: note = Description of Artificial Sequence: Synthetic coding sequence
  source 1..1494: mol_type = other DNA
atgatggacgagctgctgggccggcagcggaaggtgtacctggagacctatgggtgtcagatgaacgtcaacgacactgaaatcgcatggagcattcttcaaaagtctggatacctcaggaccagtaatcttcaggaggctgacgtgattctgttggtgacctgtagcatcagggagaaggccgagcagacgatctggaatcgcctgcatcagctgaaagctctgaaaactcgaaggcctcggagccgggtgccattgcgtataggaatcttgggctgtatggcagagcggttgaaggaggaaattcttaatcgcgagaaaatggtcgacattctagctggccccgatgcctaccgggatctgcctaggttgctggccgtggctgagtcagggcagcaggctgctaatgtgctactgagcctcgacgagacttatgctgacgtaatgccagtacaaaccagtgccagcgcgacatctgcttttgtctcaatcatgagggggtgcgacaacatgtgctcctactgtatcgtccctttcacgcgcggcagggagcggtctcgcccgatcgcttccatcctcgaggaggtaaaaaagctctccgagcaggggcttaaagaggtcacccttttagggcagaatgtgaattcattccgggataactccgaagttcagttcaacagtgccgtgcctaccaacctcagccgtgggttcacaaccaattacaaaaccaaacaaggaggcctgcggtttgcccaccttctggatcaggtcagccgtgttgaccctgagatgcgcatcaggttcaccagcccccaccctaaggacttccctgatgaggtcctccagctgatacatgagcgggataacatttgtaaacagatccatctgccggctcagagtggatcttctcgggttctcgaggctatgcgtcgtggatactctcgggaggcgtacgtggagcttgtgcaccacatcagggagtcaatcccaggcgtgtccctcagctctgatttcatcgctggattttgtggcgaaacggaagaagaccacgttcagaccgtaagtcttttgcgagaggtccagtacaacatgggcttcctgttcgcttatagcatgcggcaaaagacccgtgcttaccaccgcctaaaggacgacgtaccagaagaagttaaactgcggcgcctggaggagctaatcacaatttttagagaagaggccacgaaggctaatcagacatcagttggctgcactcagctggtgctggttgagggactgagcaagcgaagtgcgactgatctctgtggtcgtaatgatggcaacttaaaggtgatttttccagatgccgagatggaagatgttaacaatccaggactgcgggttcgggctcaaccaggcgactacgtgctcgttaaaattaccagtgcatccagtcagacactccgggggcacgtgctgtgcaggaccacgctaagagattcctcagcctattgctag

SEQ ID NO: 23460 - DNA, 1281 bp, synthetic construct
  misc_feature 1..1281: note = Description of Artificial Sequence: Synthetic coding sequence
  source 1..1281: mol_type = other DNA
atgcaccccctgcagtgcgtgctgcaggtgcagcggagcctgggctgggggcccctggcatccgtatcctggctgtccctgagaatgtgcagagctcattctagcctttcgagcaccatgtgtccaagtcccgaaagacaggaggatggcgctcggaaagacttcagttcgcgtctggctgctggccccacatttcagcactttctgaagtccgccagcgcccctcaggagaaattatcttctgaagtagaggacccacccccctacctgatgatggatgaattgcttgggcggcagcggaaggtgtacctagagacatatggttgtcaaatgaatgtcaacgataccgagatagcctggagcatcttgcagaaatccggatacctccggacgtccaacctgcaggaggccgacgtaattttactggtcacttgctctatacgagaaaaggctgaacagaccatatggaacaggctacaccagctgaaggcccttaagacaagaagaccacggtcacgagtgcctctgaggattggaatactcgggtgcatggcggagaggctgaaggaggagatcctgaatcgcgagaagatggtggacatcctcgccggtcccgacgcttatcgcgacctgcccaggctgctcgccgttgcagagtccggacagcaagccgccaacgtcctgttgtctctcgatgaaacctatgctgatgttatgcccgtccagacaagcgcctccgccacctcagcattcgtgagcatcatgaggggctgtgacaacatgtgttcttactgtatcgtacccttcacacggggaagagaacgatctcggccgattgccagcatcctcgaggaagttaaaaagctgagtgaacaagggctgaaagaggtaactctcctcggccagaatgttaatagtttccgggacaactccgaagtccaattcaactccgccgttcccactaacttgagccgcggctttaccactaactacaagaccaaacaaggcggcctgagatttgcacacctgctggatcaagtaagccgagtggaccccgaaatgcggataagattcacgagtcctcatcctaaagactttcctgatgaagtcctgcaactaatacacgagagggataatatttgtaagcaaattcatttgcctgcacagtctggatcatcccgggttctggaagcgatgagaaggggatactctcgcgaagcctacgtagaactcgttcaccacatacgcgagtccatcccagaagataccgggattagctag

SEQ ID NO: 23461 - DNA, 1122 bp, synthetic construct
  misc_feature 1..1122: note = Description of Artificial Sequence: Synthetic coding sequence
  source 1..1122: mol_type = other DNA
ggcgacggccagaacctgttcaccaaggacgtgaccgtgatcgagggagaggtcgccaccatcagctgccaggtcaacaagagcgacgactccgtgattcagcttctgaaccccaatcgtcagacaatctatttcagagacttccgacccctcaaagactcacgcttccaattgctgaacttctctagctctgaacttaaagtgagccttaccaatgtgtccattagtgatgaggggaggtacttctgccagctgtatacagatccgccccaagaatcttacactactatcacagttttagtccccccgagaaatctaatgattgacatacagaaggataccgcagtcgaaggagaagaaatcgaggtcaattgcaccgcaatggcgagcaagccagctaccacaatcaggtggtttaagggtaatacagagctgaaaggtaaaagcgaagtagaggagtggtcagatatgtacacagtaactagccaactgatgctgaaggttcacaaggaggatgatggcgtgcccgttatctgccaggtggaacatccagcggttaccggcaacctccagactcagaggtatctcgaagtacaatacaaaccacaagttcacattcagatgacctatcctctgcagggccttactagagagggtgacgcactcgagctaacatgcgaggccatcggcaaaccacagcctgtgatggtgacctgggttcgagtggacgacgagatgcctcagcacgcagtgctgtcagggccgaacttgttcatcaataacctcaataaaactgataacggtacctaccgatgtgaagcatctaatattgtagggaaagctcacagcgattacatgctgtacgtgtatgattcgcgagcaggagaggaaggttccattcgcgccgtcgatcatgcggtgataggcggggtggttgctgtcgtggtttttgctatgctgtgcttgttgatcatcctcggccgttactttgcaagacataaaggcacctacttcactcatgaggccaaaggagctgacgatgccgccgatgccgataccgctattattaacgccgaaggaggacagaacaactcagaagagaagaaggagtactttatctag

SEQ ID NO: 23462 - DNA, 1329 bp, synthetic construct
  misc_feature 1..1329: note = Description of Artificial Sequence: Synthetic coding sequence
  source 1..1329: mol_type = other DNA
atggccagcgtggtgctgcccagcggcagccagtgcgccgccgccgccgcagcagccgcacctccaggtttaagactgcgtctgctattactgttattcagcgctgctgctctcatccctacaggggatggccagaatttgttcactaaagacgttactgtgatcgagggggaggtcgccactatcagctgtcaagtgaataagagtgacgacagtgtcattcaactgctcaacccaaatcggcagaccatttacttcagggacttcagacccctcaaagattcacgattccagctcctcaatttctcctccagcgagctgaaggtctctcttaccaacgtgagcataagcgatgaggggcgctacttttgccagttatacacagatccacctcaggagtcctacaccaccatcactgtcctcgttccgccaagaaacctcatgatcgacatccagaaagataccgcagtggaaggagaggaaatagaagttaactgtacagccatggcaagtaaacccgctacaacaattaggtggttcaagggaaataccgagttgaaaggtaagtcggaggtcgaagaatggagtgatatgtacaccgtgacatctcagctgatgctcaaggtacataaagaggacgacggggtaccggtcatttgtcaggtggaacaccctgcagtcacgggcaacctgcagacccaacggtatctggaggtccagtacaagccacaggtgcatatccagatgacctaccccctacaagggctgactcgggagggagacgctctggaactgacatgtgaggcaatagggaagccacagccagtgatggttacctgggtacgtgtcgatgacgagatgccacagcatgccgttctgtctgggcccaatctgtttatcaacaacctgaataagactgataatggaacctatagatgcgaggcctcaaatattgtcgggaaggcacattccgactatatgttgtatgtgtacgacccgcccactaccatcccgcctccaactacaacaacaacaactacgacaaccactaccacaacaatactgactatcataaccgatagcagagcaggtgaggagggttccatccgggctgtggatcacgcggtgatcgggggggtggtcgctgtggttgtgttcgcaatgctctgcctgctcataatattggggcgctattttgcgagacacaaaggaacatattttacacatgaagccaaaggggcagatgacgcggctgacgcagacacagccatcatcaatgcagagggcgggcaaaacaacagtgaagaaaaaaaagaatatttcatctag

SEQ ID NO: 23463 - DNA, 384 bp, synthetic construct
  misc_feature 1..384: note = Description of Artificial Sequence: Synthetic coding sequence
  source 1..384: mol_type = other DNA
atgctgtacgtgtacgacccccccaccaccatccccccccccaccaccaccactaccactacgacgaccaccactactacaattttgactattatcaccgacaccaccgctaccacagagccggcagtccacgacagccgcgcaggcgaggagggcagtatcagagccgttgaccacgccgtgatcggtggtgtggtagccgttgtggtatttgcaatgctgtgtctgctgatcattctggggcggtactttgccagacacaaaggcacctactttacccacgaagctaaaggcgctgatgatgccgcagatgccgataccgctatcataaacgcggaaggtggtcagaataattctgaggagaaaaaggagtactttatttag

SEQ ID NO: 23464 - DNA, 1245 bp, synthetic construct
  misc_feature 1..1245: note = Description of Artificial Sequence: Synthetic coding sequence
  source 1..1245: mol_type = other DNA
atggccagcgtggtgctgcccagcggcagccagtgcgccgccgccgcagccgcagctgcacctccagggctacggctaagactcctcttactgctgttttccgccgctgcactgattcccaccggagacggccaaaatctgttcacaaaggacgtgacagtcatcgaaggtgaagtggccactatcagttgtcaggtgaacaagagcgacgattccgttattcagcttctgaatccaaacaggcagacaatttacttccgagattttcgtccccttaaggacagtcgcttccagttactgaatttcagctcctccgagctcaaggtgagcttgacgaacgtgtctatctctgacgaggggaggtacttttgtcagttgtacaccgatccgcctcaagaaagctacacaaccatcaccgtactcgtccctccccggaatttgatgattgatatccaaaaagataccgccgtcgagggcgaagagattgaggtgaattgcacagcaatggcgagtaaacccgccactaccattcggtggttcaaaggaaacacagagctgaagggcaagtcagaggtggaagagtggtctgatatgtatacagtcacgagccaactgatgctgaaagtccataaagaggacgacggcgtcccagtgatctgtcaggtggaacaccccgctgtgactggcaatttacagacccagcgatacctcgaggttcagtacaagcctcaagtgcacattcagatgacctaccctctgcaggggctgacccgggagggagatgccctggagctgacctgtgaagctattgggaaaccccaacccgtgatggttacctgggtccgtgtcgatgacgagatgccccagcatgccgttctcagtggtcccaacttattcattaataatcttaataagactgacaatgggacgtaccggtgtgaggcctcaaacatcgtgggcaaggctcattctgactatatgctgtatgtgtacgactctcgcgcaggggaggaagggagcatcagggccgtggatcacgcggttatcggcggagtcgtggccgtggtagtatttgccatgctctgcctcttgatcatcctgggccggtactttgcccggcacaaaggtacttacttcacccacgaggccaaaggcgctgatgatgctgccgatgccgacacagcaatcattaacgccgagggcggccagaataactcagaagagaagaaggagtacttcatctag

SEQ ID NO: 23465 - DNA, 5346 bp, synthetic construct
  misc_feature 1..5346: note = Description of Artificial Sequence: Synthetic coding sequence
  source 1..5346: mol_type = other DNA
atgaccacctaccgggccatccccagcgacggcgtggacctggccgcttcctgtggcgctcgggtgggtgacgtgttaccaggcccacacactggggactacgctcctctcggcttctgggctcagaacggttctatgtcacagcccctaggcgagagtccggcaaccgcaactgccacggcaacagcaacaacacgcccaagcccaaccactcctgcgatgccgaaaatgggggttcgtgctagggtcgctgactggccccccaaacgggaagctttgcgcgaacacagcaacccctccccatctcaagacacagacggtaccaaagctactaaaatggcacattcaatgaggagcatccagaacgggcagccccccacttctacaccggcttcttccggttccaaggcctttcaccgtctgagtagacgacgcagcaaggacgtggagttccaggacgggtggccgaggtctcctggccgggccttcctgccactgagacacagatcaagctcggagattacactcagtgagtgtgacgccgaagatgccggtgaacctcgaggcgcaagacacaccggagcattaccccttttccgcgagtatgggtctacaagtagcattgacgtgcagggtatgcctgagcaaagtttcttcgatatccttaacgaattcaggtctgagcaacctgatgctcggggttgccaggccctgaccgagctcctccgcgcagatcccggcccacacttgatgggaggaggcggcggggcaaagggtgactcccataatggccagccggccaaggattctctgctccctttacagcccacaaaggagaaagagaaggcacggaaaaaaccagccagaggcctcggaggcggggataccgtcgatagttccatcttcagaaaactgcgcagctctaagcctgagggggaagctggaaggtctccgggggaagcagacgaagggaggtctccgcccgaagcttcccggccatgggtgtgtcaaaaaagcttcgctcatttcgacgttcagagtatgctgtttgatttaaacgaggcggccgcaaacagggtgtcagtgtctcagaggcgaaacaccacaacaggtgcttcagctgctagtgccgcgtccgcaatggcttctctgacagcctctagagctcacagtctcgggggtctggaccctgctttcacgagtacagaggacctgaattgtaaagaaaatctcgagcaggatctgggagatgacaatagcaacgatctcctgctctcatgcccacacttccgtaacgagatagggggagaatgtgaacggaatgtgtcattcagtagggcatcagtggggtcacctagtagcggtgaggggcacctagctgaacctgcgcttagtgcctaccgcacaaacgcctccatttcagttctcgaagtgcccaaagaacaacagaggacgcaaagccggccacgacaatacagtatagagcacgtggatctgggggcacgctactaccaggactattttgtcgggaaggagcatgcaaactattttggcgtagatgagaaacttggtcctgtcgccgtgtccatcaagcgggagaagctggaggatcataaggagcacgggccccagtatcagtacagaataatctttagaactagggagctcattacacttaggggttccatcctggaggacgcaacccccaccgctacaaagcatggcaccggacgcggattaccactgaaagacgccctcgaatacgtaatcccagagcttaatatccactgccttcgattggcgctgaatactcctaaggtgaccgaacagctgctcaaacttgacgaacagggtttgtgtcgaaagcacaaggtcggtattctttattgcaaggccgggcagtccagtgaggaggagatgtataataatgaagaagccggccccgcatttgaagagttcctctctcttattggtgagaaggtgtgtcttaaagggttcacaaagtacgctgcgcaattagacgtgaaaactgactcaaccggcactcactccctgtacacaatgtaccaggactatgagatcatgtttcacgtaagtacactgctgccatacactcctaacaataggcagcagctgctcaggaagcgccatattgggaacgatattgtgacaataatttttcaggagcccggggcgctgccatttactcctaaaaatatcagaagccattttcagcatgtcttcatcatcgttagagtgcataatccttgcactgacaacgtctgctactctatggccgttacgagatctaaagacgcccctccgtttgggccgcccatacctagcggaacaacatttagaaagagtgacgttttccgcgattttctgctggcaaaagtcattaacgcagaaaacgccgctcataagtccgataagttccatacaatggccacacgaactagacaggagtatcttaaagatctggctgaaaactgtgttagtaacaccccgatcgattctactggaaagttcaacttgatttcccttacttcaaaaaaaaaagagaagaccaaggcgagggccggtgcagagcagcactctgcaggggctattgcttggcgcgttgtcgcacaggactatgcgcaaggcgtagaaatagactgtatcttaggaatctctaacgaatttgtggtgctcttggacctgcgcaccaaagaagtggttttcaattgttactgtggggatgttatcggctggacaccagatagcagcactttgaagatcttttatgggcgcggcgatcatatctttttgcaggcaactgagggaagcgtagaagacattagagagatcgtccaaagactgaaggtgatgacctcagggtgggagaccgtggacatgacactgaggcgtaatgggctcgggcagctgggattccacgtaaagtacgatgggacagtggcggaggtagaggattatggctttgcttggcaggctgggctgaggcagggttccaggttagtggagatttgtaaagtggctgtagtgacattaacccatgaccaaatgatcgatctgctgaggaccagtgtgacagtcaaagttgtgattataccccctttcgaggacggcacgccacggagaggatggcccgagacctatgatatgaatacctctgagcccaagacagaacaagaaagcataacaccaggtggccgccccccttacaggtccaacgctccttggcagtggtcggggcccgcctcccataatagtcttcccgcgagcaagtgggccacacctacaaccccaggacatgcacagtcgctgtcaagaccgctcaaacagacacctatcgtaccattccgcgagagtcagccactacatagtaagaggccggtgtcctttcccgagaccccctacaccgtttcacccgccggggccgacagggtgcctccttaccgacagccctctgggtctttttcaacgcccggtagtgccacttatgtccgatataagccctccccagagcggtacaccgctgccccccacccgctcttgagcctggatccccatttttctcatgatggtacatcttctggcgactcaagcagtggcgggctgacctcccaggagagcaccatggagaggcagaaaccggaaccgctgtggcatgttcccgcccaagcaaggctgagcgccatcgctgggtcctccggcaacaaacatccaagccggcaagatgctgctggcaaagattcgcctaatcggcattccaaaggggagcctcagtatagtagccatagctctagtaatactcttagctcaaacgctagtagctcacattctgatgataggtggttcgaccccctggatcccctagaacctgagcaagatcctctgtctaagggaggttctagcgatagcggcatcgacacgaccctgtatacatcttccccaagctgtatgagcctcgccaaggctccgagaccagccaagccccacaagcctccaggctctatgggactatgtgggggcgggcgagaggcagccggccggtctcaccatgccgacaggcggagagaggtcagtcccgcccccgccgtggccggacagagcaaggggtatcgcccaaagctgtacagcagcggatctagcacacctactggcctcgccggcggctcaagggatccccctcggcagcctagtgacatgggctcccgggtcggttaccctgctcaagtctataagactgccagtgctgaaacacctcggccgagccaactggcccagcctagtccattccaactttccgcatccgtgccgaagtcatttttttctaagcagcccgttcgcaataagcacccaacaggctggaagcggaccgaggagccaccccctcgccctctgcccttcagcgatccaaagaagcaggtcgacaccaacactaagaacgtctttgggcagccaagacttcgcgcctcactgagggacctgcggtctccaagaaaaaactacaagtctaccatcgaagatgacctgaagaagctgatcatcatggataacctcggacctgaacaagaacgagacacaggacagtcccctcaaaagggactgcagagaactttaagcgacgagagcctatgtagcgggcgtcgtgagccctcattcgcatcccctgctgggctcgagcccggtctcccatctgacgtcctgtttacatctacctgtgcgtttcctagcagcaccctccccgcacggcgacagcaccagcatcctcaccctcctgtgggaccaggtgccacccccgcagctggatcaggctttcccgaaaagaagagcactatctccgcgagcgagttatcactggccgatggaagagaccggccattacggcggctggaccctggtttaatgcccctgcccgacactgccgcaggtctggaatggtcctccctggtgaatgcagctaaggcctatgaggtgcagcgcgccgtcagcctgttcagcctgaatgaccctgcgttaagcccagatatcccacccgctcattcacctgtccatagccacttgtcactagagagagggcctcccacaccgaggactaccccgacgatgagtgaggaaccaccccttgatctgaccggaaaagtttatcagttggaggtcatgttgaagcagttgcatacggatctacagaaggagaagcaagacaaggtggtcctgcagtctgaggtagcaagcctgagacagaacaaccagagactgcaggaggagtcccaagctgccagcgagcagctgagaaagttcgccgagatattttgccgcgagaaaaaggagctatag

SEQ ID NO: 23466 - DNA, 660 bp, synthetic construct
  misc_feature 1..660: note = Description of Artificial Sequence: Synthetic coding sequence
  source 1..660: mol_type = other DNA
atggaggccgcccgggactacgccggcgccctgatccggcccctgacattcatgggcagccagactaagcgggtcctttttacccctctgatgcaccctgcacgcccatttcgggtaagcaatcacgatcgctctagccgaagaggcgtgatggcttccagcctgcaggagctgatctctaagaccctggatgcgcttgtgatagcaaccggtctggtgaccctggtgctagaggaggatgggaccgtggtggatacagaggagttctttcagacattgggagataatacacattttatgatcttggaaaagggtcagaagtggatgccgggatcccagcacgtgccgacatgctcccctccgaaacgatccggtattgcacgcgttacctttgacctctatcggctcaatccaaaagacttcattggctgtctcaatgtgaaggcaacgatgtacgagatgtactccgtgagttacgacattcgatgcacaggcctgaaggggttactccggtcattattgaggtttctaagttatagcgcacaagtgactggacagtttctgatctacctgggtacatatatgttacgggtcctggatgacaaggaagaacggccttcactcagaagccaggctaaggggcggttcacatgtggctag

SEQ ID NO: 23467 - DNA, 660 bp, synthetic construct
  misc_feature 1..660: note = Description of Artificial Sequence: Synthetic coding sequence
  source 1..660: mol_type = other DNA
atggagtacctgagcgccctgaaccccagcgacctgctgcggagcgtgagtaacatcagctcagaatttggcagacgggtatggacatcagcgcctccaccccagagaccatttcgagtgtgcgaccacaagcggacaattaggaaaggactcaccgcagctaccagacaagagctgctggccaaggcccttgagactctcctgctgaatggcgttttgacactggtccttgaagaagacgggacagcagtcgattctgaagacttctttcagctgttggaggacgacacgtgcttaatggtgctccagtcagggcagtcatggtctcctacaagaagtggggtgctgtcatatgggctgggaagggagaggcccaaacatagtaaagacatcgccaggttcacattcgacgtgtacaagcagaacccaagggatctcttcgggagtttgaacgtaaaggctaccttctatggcctgtacagtatgagttgcgatttccagggtctgggacccaagaaagtcctgcgtgagcttcttagatggacaagtacactgttgcaaggcttaggtcatatgctgctgggcattagcagtacattacgacatgccgtcgaaggagccgaacagtggcagcagaaggggcggctgcattcttattag

SEQ ID NO: 23468 - DNA, 660 bp, synthetic construct
  misc_feature 1..660: note = Description of Artificial Sequence: Synthetic coding sequence
  source 1..660: mol_type = other DNA
atggagtacctgagcgccctgaaccccagcgacctgctgcggagcgtctccaacatctcatctgagtttggtcggcgtgtctggaccagcgcccctcctccgcagaggccattccgcgtttgcgatcataaacgcacaattcggaaaggtttaacagcggccactcgccaggaactgcttgctaaggctcttgagactctgttgttgaatggcgtgctgaccctagtgcttgaggaggacggtactgcagtcgacagtgaagacttttttcaactgctcgaagacgatacgtgcctcatggtgctgcagtctggtcagagctggagccccacccggtctggggtgttgtcctacggcctggggagagaacgccccaagcactccaaggacatcgcgcgctttactttcgatgtttacaagcaaaatcccagggacctttttggcagcctgaatgtcaaagctaccttctatggcttgtacagtatgagctgcgacttccagggacttggaccgaagaaagtcctgcgggagcttctgagatggacgtcaacattgctacagggccttggacacatgcttctcgggatttccagcactttaagacacgctgtagaaggggctgagcagtggcagcaaaaaggcaggttgcattcttattag

SEQ ID NO: 23469 - DNA, 660 bp, synthetic construct
  misc_feature 1..660: note = Description of Artificial Sequence: Synthetic coding sequence
  source 1..660: mol_type = other DNA
atggagtacctgagcgccctgaaccccagcgacctgctgcggagcgtcagcaatattagtagtgaatttggcagaagggtatggacatcagcacctccgcctcagaggcccttccgcgtatgcgaccataagcgtacaattcgaaagggcctgactgctgctacccggcaggagttactagccaaggcactcgaaactctcctgttaaacggtgtccttacactggtgttagaagaagatggtacagcggtagacagcgaggatttcttccaactccttgaagacgacacatgtctcatggtgctgcagagcggtcagagctggtcaccaacacggtctggggtgctgtcctatggccttggccgggagagacctaaacacagcaaagacatcgctagattcacatttgacgtctacaaacaaaaccctcgcgatctctttggcagcctgaacgttaaagcaactttttacgggctatactcaatgagctgtgatttccagggactgggcccaaagaaggtcttacgggagctcttacgctggaccagcacattgctccagggtctgggacacatgctgctcggtatcagctctacactcaggcacgctgtggaaggcgcagaacagtggcagcagaaaggccggctgcactcttattag

SEQ ID NO: 23470 - DNA, 660 bp, synthetic construct
  misc_feature 1..660: note = Description of Artificial Sequence: Synthetic coding sequence
  source 1..660: mol_type = other DNA
atggagtacctgagcgccctgaaccccagcgacctgctgcggagcgtgtctaacatctcctcagaatttgggcgtcgcgtctggaccagcgcccccccccctcagagaccatttcgagtgtgtgaccataaacgcacaatcaggaagggcctgactgccgctaccagacaagagctgctggctaaggccctcgaaacacttcttctgaacggcgtgctgacattggtgctggaggaggacggcactgctgtggacagcgaggatttcttccaacttctggaggacgatacttgtttaatggttctgcagagcggacagtcctggtctcctactcggtctggagtgctgtcctacgggttaggtcgggagagaccaaaacattctaaagacatcgcgagattcacattcgatgtgtataaacagaatcctcgggatttgtttggatcactgaatgtcaaggcaactttctatggtctgtattctatgtcttgcgatttccagggtctggggcccaaaaaggtgctaagggagctcctccgttggacctcaacccttttgcagggactggggcacatgctgctcggcatatcctcgactcttcgacatgctgtggaaggtgctgagcagtggcagcaaaaggggcgcctgcattcttattag

SEQ ID NO: 23471 - DNA, 1860 bp, synthetic construct
  misc_feature 1..1860: note = Description of Artificial Sequence: Synthetic coding sequence
  source 1..1860: mol_type = other DNA
atgaacctggagcggctgcggaagcgggtgcggcagtacctggaccagcagcaataccagtccgctctgttttgggcagataaggtggcaagccttagtcgtgagcctcaggatatatactggttggcgcagtgcttgtacctgacggcacagtatcacagggcagcccatgcgctccggtcgaggaagttagataagttgtacgaggcttgccgatacctggctgcccgatgtcattacgcagccaaagagcaccagcaggctttggacgtgctcgacatggaagaacccatcaataagcggctgttcgagaagtacctgaaagacgaaagcggctttaaggatccatccagcgactgggaaatgtctcaatcgtcaattaagtcatcaatctgcttgctcaggggcaaaatttacgatgcactcgacaataggaccctcgctacctacagctacaaggaagcactaaagctcgatgtgtattgttttgaagcattcgacttgctcacctcccatcacatgctgaccgctcaggaagagaaagagctgctggagtctttgccactgagcaaactctgcaatgaggagcaggaattgctacgttttctattcgagaacaaactcaaaaagtacaacaagccctcagagaccgtgatccctgaaagcgtcgatggcttgcaggaaaatttggatgttgttgttagcctggccgagaggcattactataactgtgactttaagatgtgctacaaacttacaagcgtcgtgatggaaaaagatcccttccacgcttcctgtctacctgtacacattggtacgctcgttgagctgaataaggcaaatgaactgttttatctgtcgcacaagttagttgacctgtatccaagcaacccagtgtcatggttcgccgtgggatgctactatctgatggtgggccacaagaacgaacacgcccgcagatacctgagcaaggccactaccctcgaaaagacctacgggccggcctggattgcctacggccatagtttcgccgtggaaagtgaacacgatcaggctatggccgcctactttacagctgcacagctgatgaagggatgccatctgcctatgctctacataggactagaatacgggctcacaaacaactccaagctggcagagcgcttcttcagtcaagcgctcagtatcgcaccagaggaccctttcgttatgcatgaggtcggcgttgtcgcctttcaaaatggtgagtggaagactgcagagaagtggtttctggatgccttagagaagatcaaggctataggaaatgaagtaaccgtcgataaatgggagcctctgcttaacaatttgggtcacgtgtgcaggaagctgaaaaagtacgccgaggctttagattatcacaggcaggcgttagtccttattccccagaatgcctcgacatactcagctataggctacattcatagtttgatgggcaacttcgagaatgccgtcgactatttccacacagcacttggccttcgcagggacgatacattcagcgtgacaatgctaggccactgtattgaaatgtacattggcgacagcgaagcctacatcggcgcggacattaaggataagctaaagtgctatgattttgacgtccataccatgaagaccctgaagaacattatcagccctccctgggatttccgagaattcgaggtggagaaacagaccgctgaagaaaccgggctaacaccactggagacttctagaaagacaccagatagccgcccaagcttagaggaaaccttcgagatcgagatgaacgaaagcgacatgatgcttgagacatccatgtcagaccacagtacttag

SEQ ID NO: 23472 - DNA, 1428 bp, synthetic construct
  misc_feature 1..1428: note = Description of Artificial Sequence: Synthetic coding sequence
  source 1..1428: mol_type = other DNA
atggaggagcccatcaacaagcggctgttcgagaagtacctgaaggatgagagtggatttaaagacccttcgagcgactgggagatgtctcaatctagcattaagagcagtatttgcctcttgcggggcaaaatctacgatgcactggacaacagaacactggccacatactcttacaaggaagccctgaagttagacgtatactgtttcgaagctttcgacctacttaccagccatcacatgctcactgcacaggaggaaaaggaactgctggaaagcctgcccttgagcaagctctgtaatgaagagcaggagctgctgagattcctgtttgagaataagctcaagaagtataacaagcctagcgaaacagtgattcccgaatcagttgacggtctgcaagaaaacttggacgtggttgtgagtctagcggagcggcactactacaactgcgacttcaaaatgtgctacaagcttacaagcgtggtgatggagaaggatcctttccacgcttcgtgtctcccagtccacatcggaaccctcgtggaactcaataaggccaacgagctgttctacctctcccataaactcgtggacttgtatcccagtaatccagtgtcttggttcgccgtcgggtgctactatttgatggtggggcacaagaatgaacacgccaggcgctatttatccaaagcaactacattggagaaaacctacggaccagcctggatcgcgtacggtcacagtttcgccgtggagagcgaacacgaccaggctatggcggcctacttcacagcagctcaactaatgaagggctggaaaacagccgaaaagtggttcctcgacgctctcgagaaaatcaaggccatcggaaatgaagtaaccgtggacaagtgggaacctttactaaacaatctcggacacgtttgcagaaagctcaagaaatacgctgaggcacttgactaccaccggcaggctctcgtgctgatcccccagaacgcctccacctacagtgcaatcggatacatccacagcttgatgggcaactttgagaacgcggtggactactttcacaccgctctggggctcagacgagacgatactttctccgttaccatgctagggcactgcattgaaatgtacataggtgattctgaagcctacattggtgccgacattaaagacaaactcaaatgctatgacttcgatgtgcatactatgaagaccctcaagaatatcatatcacctccctgggattttcgcgagttcgaagtcgaaaagcagacggccgaagagaccggcctgactcccctggaaacctctagaaagacccccgatagtaggccttctttagaggaaaccttcgagatcgaaatgaatgagagtgacatgatgctcgagacgtcaatgtctgaccattctacttag

SEQ ID NO: 23473 - DNA, 1863 bp, synthetic construct
  misc_feature 1..1863: note = Description of Artificial Sequence: Synthetic coding sequence
  source 1..1863: mol_type = other DNA
atgaacctggagcggctgcggaagcgggtgcggcagtacctggaccagcagcagtatcagtcagcccttttctgggccgataaggtggctagtctctccagggaagaaccccaagatatatactggctcgctcagtgcctctacttgacggctcagtaccatagggctgctcacgccctgcggagccgcaagctcgacaaactgtacgaagcctgtaggtacctcgcggcccgctgccactatgcagctaaggaacatcagcaggcactggacgtgctcgatatggaggaaccaattaacaagaggctgtttgagaagtatcttaaggacgagtccgggtttaaggacccaagctccgattgggaaatgtcacagtccagcatcaagtcttcgatctgcctgttgcgcggcaaaatatacgatgccctggacaatcgcaccctcgcaacctacagctataaagaggccctgaaactggacgtgtattgcttcgaagcatttgacctcctgacatcccaccatatgcttacagctcaggaggagaaggaactgttggagtcactcccgctgtccaagctttgtaacgaagaacaggaacttcttcggttcctatttgagaacaagttgaagaagtacaataagccttccgaaacagtcatccccgagtcagtggacggcttacaagagaacttggatgtcgtagtcagcttggccgagcgtcattattataactgtgacttcaagatgtgttacaaactcacttccgttgtgatggaaaaagatcctttccacgcatcctgtctgccagtgcacatcggaactctagtggaactcaataaagctaatgaacttttttatctttcacataagctggtggacctgtacccaagtaaccctgtgagttggtttgcagtcgggtgctattacttaatggtgggtcacaaaaacgagcacgcccgtcgctatcttagtaaggctactacgctcgagaaaacttacgggccagcctggatcgcatacggccatagctttgccgttgaatcagaacatgatcaggctatggccgcatatttcactgccgcccagctcatgaagggctgccacctgcctatgctttacattgggctggaatacggactgaccaacaactctaaactggccgagcgctttttctcacaggctttatctattgcgcctgaagaccccttcgtgatgcacgaggtgggggtggtcgccttccagaatggggaatggaagacagccgagaaatggtttctcgacgccctcgaaaagattaaagccatcggcaatgaagttaccgtggacaaatgggagcctctgctgaataatttgggccatgtgtgccgcaagttgaagaagtatgcggaagccctcgactatcacagacaggccctggtactcatccctcagaacgcatcaacttacagtgccatagggtacattcatagcctcatgggaaactttgaaaatgctgtggactattttcacactgcactcgggctaagaagggatgacacattcagcgttactatgctcggacattgcatcgaaatgtacattggcgacagcgaagcttacatcggcgcagacattaaggacaaactgaaatgctacgacttcgatgttcacactatgaaaaccctgaaaaacattatcagccctccttgggatttccgagaattcgaggtggagaagcaaactgccgaagagacgggtcttactcccctcgagacaagcagaaaaacgccagattcacgtcccagcctcgaggaaacctttgagattgagatgaacgaaagtgacatgatgttggaaacaagtatgagcgatcacagcacttag

SEQ ID NO: 23474 - DNA, 1863 bp, synthetic construct
  misc_feature 1..1863: note = Description of Artificial Sequence: Synthetic coding sequence
  source 1..1863: mol_type = other DNA
atgaacctggagcggctgcggaagcgggtgcggcagtacctggaccagcagcagtatcagtcagctttgttctgggcggataaggtggcgtcactcagtagggaggaaccacaggacatctactggctggcgcagtgtttatatttaaccgcacaatatcatagggcagcccatgcgctcaggtctaggaagttggacaaattgtacgaagcatgccggtacctggcggctaggtgccactacgccgccaaggagcatcagcaggccctcgacgtgttggacatggaagaaccaattaataaacgcttattcgaaaaatacctgaaggacgaatcaggatttaaggacccatcatcagactgggaaatgtcccagtcctccatcaagtcatccatttgcctacttcggggcaagatatatgatgcccttgacaaccgcactctcgccacctattcctacaaggaagccctgaaactggacgtttactgcttcgaggcctttgatttgcttaccagccatcacatgctgaccgctcaagaagaaaaggaattgctagaaagtctcccattatcaaagctttgcaacgaggaacaggagttactgcggtttctttttgagaacaaactgaaaaagtataacaagcctagtgaaacggtgatacccgaatctgtcgatggcctgcaggaaaacctagacgtcgtagtatcacttgccgagcggcattactataactgcgattttaaaatgtgctacaagctgacctctgtggtaatggagaaggatccattccatgcttcgtgtctcccagttcatattggaacactcgtggaactgaacaaagcgaacgagctcttttatctcagccacaagctggtcgacctgtacccctctaatccagtgtcctggttcgcagtcgggtgttattatctaatggtggggcataagaatgaacatgcccgcaggtacctatctaaggcaactacgttagagaaaacctacgggcccgcatggatagcctatgggcactcatttgcggtcgagtcggagcacgaccaggccatggccgcatattttacagccgctcaactaatgaaggggtgccatctgcccatgctgtatatcgggctagaatacgggttgaccaacaacagtaaacttgccgaaaggttcttttcgcaagccttgtccatcgcaccagaggacccattcgtcatgcacgaagtgggcgtggtggcctttcagaatggcgagtggaagactgccgaaaaatggttcctcgatgccctagaaaaaatcaaggcgattgggaatgaggtcacagtcgataaatgggagcctctgctgaacaatctaggccatgtgtgtaggaaactaaagaagtatgcagaggctcttgattaccaccgacaggctctggtcctgatccctcagaacgcatccacctacagtgcaatcggctacattcattcgctgatgggcaacttcgagaacgccgttgactacttccacaccgcactcgggctccgaagagatgatacattctcggttaccatgctgggacactgtattgaaatgtacatcggcgactccgaggcttacatcggcgccgacataaaggataaactcaaatgctatgactttgatgtgcacaccatgaagacactcaaaaacatcatcagccctccctgggatttcagggagttcgaagtcgagaagcagactgccgaggaaacaggtctgacccctctggagacctccaggaagacccctgactcgcgtccctccttggaagagacctttgagatcgagatgaacgagtccgacatgatgttggaaacgagcatgagcgaccacagcacctag

SEQ ID NO: 23475 - DNA, 1581 bp, synthetic construct
  misc_feature 1..1581: note = Description of Artificial Sequence: Synthetic coding sequence
  source 1..1581: mol_type = other DNA
atggaggagcccatcaacaagcggctgttcgagaagtacctgaaggatgagtctggattcaaagatccctcctcagattgggagatgtcacagtcttctatcaaatcctctatatgcctgcttcgaggaaagatctacgacgccctggacaaccggacgcttgccacgtacagctataaggaggccttaaaactagatgtctattgcttcgaggccttcgatctgctcacgtcccaccatatgttgaccgcgcaggaggaaaaagagctcctcgagtcactgccactgagcaagctttgcaacgaggaacaggagctcctgcgtttcctgtttgaaaacaaactgaaaaagtacaataaaccgtctgagaccgtgatccctgaatctgtcgacgggctgcaggagaacttagacgtcgtggtgagtctcgccgagcgccattactacaactgcgatttcaaaatgtgttacaagctcacgtctgttgtgatggagaaggatccattccatgcaagctgcttgcccgtgcacatcggcactctcgtagagttaaacaaggcaaatgagctcttctacctgtcacacaaactggttgatctctaccctagcaatcctgtgtcctggttcgccgtgggctgttactatctaatggtcggacataagaatgaacatgccaggcgttatctgagcaaagccacgacactcgagaaaacttacggacctgcgtggatagcctacgggcattcttttgccgtggagtccgaacacgaccaggcgatggccgcctatttcactgccgcacaactgatgaaaggatgtcacctgcccatgctctatatcggcctggaatacggcctcaccaataattccaaacttgcagaaagattcttcagtcaggccctctccatagcacccgaggacccatttgtgatgcacgaagtgggagtcgtggcctttcagaacggcgagtggaaaaccgcagagaaatggtttctcgatgcccttgaaaaaattaaagctataggtaacgaggttacagtggacaaatgggaaccattactgaacaatttaggccatgtgtgtaggaagctgaagaaatacgcagaagccctggactaccacagacaagcgctggtgctgattcctcagaacgctagcacttatagcgccataggttacatccattcacttatggggaatttcgaaaatgctgtggactacttccatacggcgttagggttgcggagagatgacaccttctctgtgaccatgctcgggcattgtatcgagatgtacatcggggattctgaggcatatatcggagccgacatcaaagacaagttaaagtgctatgatttcgatgtccataccatgaagaccctcaagaacattatcagcccaccttgggactttcgcgagtttgaggtggaaaagcagactgctgaagagaccgggctgacacctctcgaaacaagtagaaagaccccagacagtcgacccagtttggaagagacttttgagattgagatgaacgagagtgatatgatgctcgagacatcgatgtccgatcacagcacgtag

SEQ ID NO: 23476 - DNA, 1581 bp, synthetic construct
  misc_feature 1..1581: note = Description of Artificial Sequence: Synthetic coding sequence
  source 1..1581: mol_type = other DNA
atggaggagcccatcaacaagcggctgttcgagaagtacctgaaggatgagtccggctttaaagacccttcttcagactgggagatgtcccagtcttctatcaaaagctccatttgcctgctacgtggaaaaatctacgatgccctggacaacaggacactggcgacatatagctataaggaggctctgaagttggacgtgtactgtttcgaggcatttgatctcctgaccagtcatcatatgttaacggctcaagaagaaaaggaactgcttgaaagcctacccctgagtaagttgtgcaacgaggaacaggaacttctaagatttctgttcgagaacaagttaaagaaatataataaacctagtgagaccgtgatcccggaatccgtggacgggctccaggaaaacctcgacgttgttgtaagtcttgctgaacgacactattataattgcgattttaagatgtgttacaaactaacctctgtggtgatggagaaagaccccttccacgcctcctgtctacctgtccatatagggaccctggtggaacttaacaaagccaacgagctgttctacttgagccataaactggtcgacctgtacccctccaaccccgtatcttggtttgcagttggatgctattatctgatggtggggcataaaaacgaacatgcacggagatacttgagcaaagctacaaccttagaaaagacatacggccccgcatggatcgcatacggtcatagcttcgccgtggaatcggaacatgaccaagcaatggccgcttactttaccgctgctcaactcatgaagggctgccacttacccatgctctatatagggttggaatacgggctcacaaataactcaaagctggcagagcgcttcttctctcaggcacttagcatcgcccccgaagacccatttgtcatgcatgaggtgggggtggtagcgttccaaaatggggaatggaagaccgcagagaagtggttcctggatgccctcgaaaagatcaaagctatcggaaacgaggttaccgtggataagtgggagccattactgaacaatctcggacacgtttgtcgcaaactgaaaaaatatgccgaggctttggactaccataggcaggccttagttctgatcccacaaaacgcctctacctacagtgcgatcggctatatccactcactcatggggaactttgaaaacgccgttgattattttcataccgccttaggcttgcggagagatgacacttttagcgtaaccatgctgggccattgcatcgagatgtatattggagactcggaggcctatatcggggcagatatcaaggacaaattgaagtgctacgatttcgacgtgcacacaatgaaaactcttaagaatataattagtcccccttgggactttcgcgaatttgaggtggagaagcaaacagcggaggaaaccggcctaacccctctggagacctcgcggaagacaccggactctaggccatctctcgaagagaccttcgagatcgagatgaacgaaagcgatatgatgctggaaacgagtatgtcagaccacagcacatag

SEQ ID NO: 23477 - DNA, 1428 bp, synthetic construct
  misc_feature 1..1428: note = Description of Artificial Sequence: Synthetic coding sequence
  source 1..1428: mol_type = other DNA
atggaggagcccatcaacaagcggctgttcgagaagtacctgaaggacgagtctggattcaaggaccccagctccgactgggaaatgagtcagagctccatcaagagttctatctgcctgttgcgcgggaagatatatgatgcacttgataaccgcactctcgcaacgtatagttacaaagaggccttaaagctggacgtttactgttttgaggcttttgacttgttgacaagccatcacatgcttacagcccaggaggagaaggaactgttggagtccctgcctttgagtaaactctgtaacgaggagcaggaactccttcgttttctattcgaaaacaaactgaagaaatacaacaagccctctgagaccgtgataccagaaagtgttgacgggctccaggagaacctggatgtggtggtatctttggccgagaggcactattacaattgtgacttcaaaatgtgctataagctgacgagcgtggtgatggagaaggatccatttcacgcttcgtgcctaccagttcatattggtactctggttgagttgaacaaagccaacgaactcttctaccttagccacaagctggttgacctttatccaagcaacccagtgtcttggttcgccgtgggttgctattatcttatggtgggtcacaaaaacgaacacgcgcggaggtatctgtcaaaggctacaactctagagaaaacctacggaccggcctggatagcatacggacactctttcgctgttgaaagcgagcacgaccaggccatggctgcctacttcaccgcagctcagctgatgaaggggtggaagaccgctgagaagtggtttctcgatgctctggaaaaaatcaaagccattggcaacgaggttactgtggataagtgggagcccctactcaataacctcggccatgtctgccgcaaactgaagaagtatgccgaagcacttgactatcaccgccaggctctcgtactgataccacagaatgcatctacgtactcagccataggatacatccattcattgatgggcaatttcgagaatgctgtggactactttcataccgctctgggtttacgacgggacgatacattcagcgtgacgatgttgggccattgtattgagatgtacattggagacagcgaggcctacataggcgccgatatcaaggataagctgaaatgttacgacttcgacgtacacaccatgaaaaccttgaaaaatattatatcgccaccttgggatttccgggaattcgaagtggagaagcaaactgccgaggaaactggcctgaccccacttgagactagccgcaaaacacctgactcaagaccctctctggaagagacttttgaaatcgaaatgaatgagtctgacatgatgctggaaacttctatgtcagaccatagcacgtag

SEQ ID NO: 23478 - DNA, 1500 bp, synthetic construct
  misc_feature 1..1500: note = Description of Artificial Sequence: Synthetic coding sequence
  source 1..1500: mol_type = other DNA
atggcccagttcgccttcgagagcgacctgcacagcctgctgcagttggatgcacctattccgaacgcgcccccagcccgttggcaaagaaaagcaaaagaggccgccggcccagccccttccccaatgagagccgctaatcgaagtcatagtgccgggcgcaccccaggccggaccccgggcaagtcgagctccaaggttcaaaccacgcccagcaaaccggggggcgatagatatattcctcaccgaagcgctgcacagatggaggtcgcctcctttctcctgagcaaagagaatcaacccgagaacagccaaactccaacaaaaaaggaacatcagaaagcttgggcccttaatctgaatggctttgacgtcgaagaggccaagatcctgaggctctctggtaagccacagaacgctcccgaagggtaccagaaccgtttgaaggtcctgtactcccagaaagcaactcctgggtcaagtaggaagacttgtcggtacattccatccttgccggatagaattctggatgcccccgagattcggaacgattactacctaaacttggtcgattggagcagtgggaatgtcctggcggttgccctcgataactcagtttacttgtggagcgcctccagcggggatatcctgcaacttctgcagatggaacaacctggagagtatatatctagtgttgcctggattaaagaaggcaattatttggcagtcgggacaagctcagctgaagtgcagctgtgggatgtgcaacagcagaaaagactgaggaacatgacaagccacagtgcaagggtgggcagtttgtcttggaattcctacattctgagtagtggctctcggtccggccacatccaccaccacgatgtgcgggttgctgaacaccacgtggccaccctgagcgggcacagccaagaagtgtgtgggctcagatgggcaccagacgggcgacatctcgcaagcggaggtaacgacaatttggtgaacgtatggccttccgccccaggtgagggagggtgggtgccgctccaaacattcacccagcaccagggcgcggtgaaggctgtcgcctggtgcccatggcagtctaatgtcttggcaacaggtggcgggacaagcgatagacacatcaggatttggaatgtgtgtagtggagcctgtctcagcgcagtggacgctcacagccaagtctgttccatcttatggagtccacattataaagaactcattagcgggcacggatttgcccagaatcagctagtgatctggaaatatccaacgatggccaaagtggccgaactcaagggtcatacgagccgggttctgagcctcacgatgtcacccgacggagctaccgtcgcttctgccgcagcagacgaaaccctccggttgtggcgctgctttgagctagaccccgcaagacgccgcgagcgggagaaggcaagcgccgcaaagtccagtctgattcaccaaggaatcaggtag

SEQ ID NO: 23479 - DNA, 1500 bp, synthetic construct
  misc_feature 1..1500: note = Description of Artificial Sequence: Synthetic coding sequence
  source 1..1500: mol_type = other DNA
atggcccagttcgccttcgagagcgacctgcacagcctgctgcagctcgatgctcccatccctaatgcgcctcccgctaggtggcaaaggaaggcaaaggaagcggccggacccgcgccatctcccatgagagccgctaaccgaagccactccgccgggcgtacccccgggcgaaccccgggcaagtcgagctctaaagtacagacaactccgagcaagccggggggcgaccggtacattccacatcggtccgccgctcagatggaagtagcctcatttcttctgtccaaagagaatcagccagagaatagccagactccaaccaagaaagaacatcagaaggcttgggccctgaatctgaatggattcgacgttgaggaagcgaagatattaaggctgagtggcaaacctcagaatgccccagaaggttaccaaaaccggctgaaggttctatacagtcagaaggcaacaccgggtagtagcaggaaaacgtgtcgttatataccttcattacctgaccgcattctagatgcccctgaaattcgaaacgactactaccttaatctagtggactggtcgtccgggaatgtgctcgccgtagcactcgataactccgtgtatctctggtcggccagtagcggggacatcctgcaactcctgcagatggagcagccaggggagtatatatcaagcgtggcatggattaaagaaggtaactacctcgctgtgggcacgtcctccgcagaggtacaactctgggatgttcagcagcagaaacggctgaggaatatgacgtcgcattctgcgagggtggggtccttgtcatggaactcgtatattcttagtagtggatcccgcagcggtcatattcatcaccacgacgtgagggtggctgagcatcacgttgcaactttaagcggacactcccaggaagtttgtggactgcggtgggcgcctgacgggcggcacttagcctccggtgggaatgacaatctcgtgaatgtctggcctagcgccccgggcgagggtggctgggtgcccttgcagaccttcactcagcaccaaggggcggtcaaagccgtggcttggtgcccctggcagtctaatgtgctggctacaggcggaggaactagcgatcggcatatcaggatttggaacgtctgctcaggagcctgtttgtccgccgtcgacgcccattcacaagtgtgctccatcctgtggtcccctcactataaggagctgatctcggggcatggtttcgcacagaaccagctcgtaatttggaaatatcctaccatggccaaggtggccgaattgaagggccacacctccagagtcttgagtcttactatgtctcctgacggcgccaccgtggcttcggcagccgccgacgagacactcaggctgtggagatgtttcgaattagacccggctagaagacgagagcgcgagaaggctagtgccgctaagagcagtctcattcatcagggaattcgctag

SEQ ID NO: 23480 - DNA, 1428 bp, synthetic construct
  misc_feature 1..1428: note = Description of Artificial Sequence: Synthetic coding sequence
  source 1..1428: mol_type = other DNA
atggcccagttcgccttcgagagcgacctgcacagcctgctgcagctagatgcccctatccctaatgctccccccgcaaggtggcagcgcaaagcaaaggaagccgcaggacccgcaccgtcccctatgagggccgcaaacaggtcacacagcgccggcagaacccccggaaggactccagggaaaagttcctcaaaggtgcagacaaccccctccaaagagaaccagcctgagaattcccaaacaccgacgaagaaagagcaccagaaggcctgggctcttaacctaaacgggttcgacgttgaagaagctaagattctcaggctctccgggaagccacagaacgcccctgagggataccagaataggctgaaggtgctttactcacagaaagcaacacctggaagttcccgaaagacctgcaggtatattccctccctccctgacagaattctggacgctccggaaattcggaacgactactatctaaaccttgtcgactggagctctggcaacgtcctggccgttgcactcgacaatagtgtgtatttgtggtccgcatcatccggcgacatccttcaacttttacagatggaacagcccggtgaatacatatcaagcgtggcctggatcaaggaaggaaactacttagcagtgggaacatcatcggctgaggtccagctctgggatgtccagcaacaaaagaggctcagaaacatgacgtctcactctgctcgtgtcggtagtttgtcttggaattcctatattttaagctctggcagtcgctccgggcacattcaccatcatgatgttagggtagctgagcaccacgttgctacactctccggccattctcaggaagtgtgcgggctgcgatgggcaccagacggacggcatcttgcatccggaggtaacgataacctggttaatgtttggcccagcgctccgggtgaggggggatgggtgcctctccagacattcacccagcaccagggagctgtcaaggctgtggcctggtgtccgtggcaaagcaacgtgctcgctactggcggaggtacgtctgaccggcatatacgtatctggaatgtatgctccggcgcttgcctcagcgccgtggatgcacactcccaggtctgcagcattttatggtcccctcactacaaggagctgattagtggccatggattcgcccagaaccagctggttatttggaagtatcctaccatggcgaaggtcgcggaactgaagggacatactagcagggtcttgagtcttaccatgagccctgacggcgccacagtggcgagcgcggcagctgacgaaacacttcgcctgtggcgctgttttgagttggatcctgctcgacgaagggaacgagaaaaagcctccgccgcaaagagctctttaatccaccaaggcattcgatag

SEQ ID NO: 23481 - DNA, 1422 bp, synthetic construct
  misc_feature 1..1422: note = Description of Artificial Sequence: Synthetic coding sequence
  source 1..1422: mol_type = other DNA
atgagcaccgagctgttcagcagcacccgggaggagggcagcagcggttcaggaccctcatttcgtagcaatcagaggaaaatgttaaatcttctgctcgagcgcgatacatcttttaccgtgtgtccggatgtgccaaggacccctgttgggaagttcttgggtgatagtgccaacctgagcatcctcagtgggggtactcccaaaaggtgcctcgatctgagtaatctgagctcaggggagataacggcaacacaactgacaacgtctgccgatctcgatgagactggtcatctagacagctcagggctacaagaggtccacctggctggtatgaatcatgaccagcatctgatgaagtgcagcccagcccagctgctgtgttctaccccaaatggattggatcgcggtcataggaaacgcgatgcgatgtgctcttcatcagccaacaaggagaatgataacggaaatctcgttgactccgaaatgaagtatctgggatctcctattacgacagtgccaaagctcgacaagaacccaaaccttggagaggaccaggccgaagaaataagtgacgagctgatggagttttcccttaaagaccaggaggcaaaggtgtctagatctggcctgtatcgctccccttctatgccggaaaatctgaatcggccaaggctgaaacaagtagaaaaattcaaagacaacaccattcccgacaaagtgaagaaaaaatattttagtggccaaggcaaactgagaaaggggctatgcctgaaaaaaacagttagtctgtgcgacatcactattacccagatgctggaggaagactcaaatcagggccatcttatcggggacttcagcaaggtatgcgccctgcccacggtgtcgggaaaacatcaggacctgaaatacgtgaacccagaaaccgtggctgcactgctgtccggcaagtttcaagggctgattgagaagttctatgtcatcgactgccggtatccctatgaatacctcgggggacatatccaaggcgcactgaacttgtacagtcaggaagaacttttcaattttttcctcaagaagccgatcgttcccctagatacccagaagagaattatcattgtgttccactgcgaattcagtagcgaaagagggccgcggatgtgtcgctgtttgcgggaggaagaccgaagtttaaaccaataccccgcactatattaccccgagctatatattctgaagggcggatatcgggacttttttccagagtacatggaattgtgcgaaccccagtcctactgtcccatgcaccaccaggaccacaagacagagttactcaggtgccgatctcagagcaaagtgcaggagggcgagaggcagctgagggaacaaatcgcgctcctggtgaaggatatgagtccatag

SEQ ID NO: 23482 - DNA, 1203 bp, synthetic construct
  misc_feature 1..1203: note = Description of Artificial Sequence: Synthetic coding sequence
  source 1..1203: mol_type = other DNA
atgagcaccgagctgttcagcagcacccgggaggagggcagcagcgggagtggtccaagctttcgcagcaatcagagaaaaatgttaaatctcttgctcgaacgcgacactagtttcacggtctgccccgatgtgccccgtaccccagtcggcaagtttttgggggattccgcaaacctctctatacttagcggctcaccaggctttttcaggacttcgggctccgctttctcatgggatgacaacgggaacctggtcgatagcgagatgaagtatcttgggagccccattactactgtgcccaagttggacaagaatcctaatctgggtgaggaccaagccgaggaaatcagtgatgaactgatggaattttcactcaaggaccaggaggcgaaggtttcccgaagtggcctgtacaggtcgcccagcatgccagaaaatctgaatcggccaaggttgaagcaggtggagaagtttaaggataacacaattccagacaaagtgaaaaaaaagtatttttctgggcagggcaaactgcgaaagggtctttgccttaaaaaaactgtgtccctgtgtgacataacaattacacagatgcttgaggaggacagcaatcagggtcacctgatcggagatttttccaaagtgtgcgctctgcctactgtgtctggaaagcaccaggatctgaagtacgttaatcccgagaccgtggccgctttgctttcaggcaagtttcagggattgatcgagaagttctatgtaatcgactgcaggtacccctatgagtatctgggtggtcatattcagggtgctctaaatctctattcccaggaggagttatttaacttcttcctcaaaaagcctattgttcccctcgatacacagaagcggatcattatcgtgtttcactgtgagttctcctcggagagaggcccccgaatgtgtcgctgcttgagggaggaagacagaagcctgaatcaataccctgctctgtactacccagagctttacattctgaaaggcggctacagagatttcttcccagagtatatggaactctgcgagccccagtcatattgtcccatgcaccatcaggatcataagaccgagcttctgcgatgcagatctcaatcaaaggtgcaagagggcgaaaggcagctgcgcgagcagatcgcgctcctggtgaaggatatgagtccttag

SEQ ID NO: 23483 - DNA, 1332 bp, synthetic construct
  misc_feature 1..1332: note = Description of Artificial Sequence: Synthetic coding sequence
  source 1..1332: mol_type = other DNA
atgagcaccgagctgttcagcagcacccgggaggagggcagcagcggatccggcccctctttcagatcgaatcagaggaaaatgctcaacctccttcttgagcgggacaccagcttcacagtgtgtccagacgttccacgcaccccagtggggaagtttctgggagatagtgccaatctctccattttgtctggcggcacccccaagagatgcctcgatctaagtaatctgtcttctggggaaatcaccgccacgcagctcacaactagcgccgacctggacgagaccggccatctcgattcctctggcctgcaggaagtgcatctggccggaatgaaccacgaccagcacctaatgaaatgtagccctgacaacggaaacctggttgacagcgaaatgaagtaccttggcagccccatcaccaccgtacctaaattggacaagaaccctaacctgggcgaggatcaggcggaggaaatatctgacgaactcatggagttttcactgaaagaccaagaagcaaaggtgtccaggagtgggctctacaggtcaccttccatgccagagaacttgaaccgacctcgcctcaagcaggtcgaaaaattcaaggacaataccatacccgacaaagtgaagaaaaaatactttagcggccaaggtaagcttcggaagggcctctgtctgaaaaagactgtgtcgttatgtgatattacgatcacccaaatgctggaggaagattccaatcagggacatctcataggtgacttcagcaaggtctgcgcactccccacagtgtctggtaagcatcaagatctgaagtatgttaatccagagaccgtagctgcactgttatcaggaaagttccaggggctgatcgagaagttctacgtaatcgattgccgatacccatacgaataccttggagggcacattcaaggggccctgaacctgtatagtcaggaggaactttttaatttttttttaaagaagccaatcgtgcccctggacacacagaagcgtatcatcatagtgtttcactgcgagttttcgtcagagcgtgggcccagaatgtgtaggtgcctcagggaagaagaccgatctttgaaccaatatccagccctctattatcctgaactctacatcttaaaaggagggtaccgagatttcttcccagagtacatggaactgtgcgagccccaatcttactgccctatgcaccaccaggaccacaagaccgagctgctgaggtgccggtcacaatctaaagtgcaagagggggagagacagctgcgcgagcagattgcgctgctagtcaaggacatgagtccctag

SEQ ID NO: 23484 - DNA, 1293 bp, synthetic construct
  misc_feature 1..1293: note = Description of Artificial Sequence: Synthetic coding sequence
  source 1..1293: mol_type = other DNA
atgagcaccgagctgttcagcagcacccgggaggagggcagcagcggcagcggaccttcatttcgaagcaaccagcgtaagatgttgaatcttttgttggagagagacacgtctttcaccgtgtgcccagacgtgcctagaacccctgttggcaagtttctgggagattctgccaacctgtccatcctttctggcagcccagggttctttcggacatcgggctctgccttttcttgggatgcgcagttgctctgctctaccccaaacggactggatcgcgggcaccgaaagcgtgacgccatgtgttctagctctgcgaataaagagaacgacaacggcaacctggtcgactcggagatgaaatatctgggctcccctatcactacagtacccaagctggataagaaccccaacctgggtgaagaccaggccgaggaaatttcagacgaacttatggaattttcattgaaggaccaagaggccaaggtgagccgctctggcctgtaccgctccccatctatgcctgagaatctaaaccggccccggctgaaacaggtcgagaagtttaaggacaataccatccctgataaagtcaagaaaaagtatttcagtgggcagggaaagcttaggaaggggttatgccttaaaaagactgtcagtctctgcgatatcaccatcacccagatgttggaggaggatagcaaccagggacatctgattggcgatttcagcaaagtgtgcgcactgcccaccgtttccgggaagcatcaggacctgaagtatgtaaaccccgagactgtagcagcccttctgtcaggcaaatttcagggtttgattgagaagttctatgtcatcgactgccgatacccttacgagtacctcggaggccatatccagggggcgctcaacctgtatagccaggaggagctgttcaactttttcttgaagaagcccattgtgccacttgatacccaaaaacggatcattatcgtgtttcattgcgaattttcaagtgagagggggcctagaatgtgccggtgtctgcgtgaagaagaccggagtttgaatcagtacccagccctttactatccagagctctatattcttaaggggggatatagggatttttttcccgagtatatggagctatgtgagcctcagagctattgcccaatgcatcaccaagaccacaaaacagagctcctgcgttgccgatctcagtctaaggtgcaggaaggagaacgccagctccgcgagcagatcgcccttctagtgaaggatatgtctccctag

SEQ ID NO: 23485 - DNA, 1203 bp, synthetic construct
  misc_feature 1..1203: note = Description of Artificial Sequence: Synthetic coding sequence
  source 1..1203: mol_type = other DNA
atgagcaccgagctgttcagcagcacccgggaggagggcagcagcggatctgggccatcttttagatcgaatcaacggaagatgctcaatctgcttctggagagggataccagtttcaccgtgtgccccgatgtgccgagaactcccgtgggcaagttcctcggcgactctgccaatcttagcatcttatctggatctcccgggttcttcagaacgtcaggctctgcgttcagctgggatgataatggaaacctggtggactccgaaatgaaatatcttggctctcctatcactactgtcccgaagctcgataaaaatcccaacctcggtgaagaccaggccgaagaaatttcagacgagcttatggaatttagtcttaaagatcaggaggcaaaggtgtcgcggagcgggctctatcgatcacctagcatgccggagaacttaaatcgtcccagactgaaacaggtagagaagttcaaggataataccatccccgataaggtcaagaagaaatacttctccggtcagggtaaactgagaaaaggtctgtgccttaagaaaaccgtgagtttatgcgatattacaatcacacagatgctggaggaggactccaaccagggacacctcatcggggatttctcaaaagtttgtgcgctgcctactgtgagtggaaagcaccaagacctgaaatacgtcaaccccgaaacagtggctgcacttctgtcaggtaaatttcagggcctcattgagaaattctatgtgatcgactgccgctatccgtatgaatacctcggtggccatatccagggtgcgcttaatttatactcccaggaggaactgttcaatttcttccttaagaaacctattgtccctttggatacgcagaaacggataataatcgtatttcattgtgaattctcatctgaaagaggtccacggatgtgtcggtgcctgagggaagaggataggagtctgaatcagtacccagcgctgtactatcccgaactttacatcttgaaggggggctatcgcgactttttcccggagtacatggagctgtgtgagcctcagtcttactgtcccatgcatcaccaggaccacaaaaccgaactgctgaggtgcagatcccagagtaaggtacaggaaggcgaaaggcagctaagagaacagatcgccctgcttgtgaaagatatgtcaccatag

SEQ ID NO: 23486 - DNA, 750 bp, synthetic construct
  misc_feature 1..750: note = Description of Artificial Sequence: Synthetic coding sequence
  source 1..750: mol_type = other DNA
atgagcaccgagctgttcagcagcacccgggaggagggcagcagcggatcgggacccagtttccgctccaatcagcgcaagatgctgaacctgcttttggagcgtgacacttcttttaccgtctgtcccgacgttcctcgtactcctgtcggcaaattcctgggagatagcgcaaacctctccatcctaagtggcgggacaccaaaaaggtgcctggacctctccaacctgagctcaggcgaaataacggctacccagctaactacaagtgccgaccttgatgagaccgggcatctggactcctctggtctgcaggaagtgcatctggccgggatgaaccacgaccagcacctgatgaaatgcagtcccgcacagctcttgtgtagcactcccaacggattagaccgtggacataggaaacgtgacgccatgtgcagctcttccgccaataaagagaacgacaatgggaacttggtggacagtgaaatgaaatatctgggatcaccgattacaacagtccccaaacttgacaagaatcccaatctcggagaggaccaggcagaggagatctctgatgaactgatggagttctccctcaaggatcaggaggccaaagtctcacgaagcggactttaccggtccccctccatgccggaaaacctgaatcgcccaagactcaagcaggtcgaaaaattcaaggacaatacaataccagacaaggttaagaaaaagtacttctccggccaatag

SEQ ID NO: 23487 - DNA, 1422 bp, synthetic construct
  misc_feature 1..1422: note = Description of Artificial Sequence: Synthetic coding sequence
  source 1..1422: mol_type = other DNA
atgagcaccgagctgttcagcagcacccgggaggagggcagcagcgggagcgggccaagttttcggtcgaatcagcgtaagatgctaaacctcttgctcgagcgtgacaccagcttcaccgtttgcccagatgtcccaaggaccccagtgggcaaatttctgggagatagtgctaatttgtcaattctgtcaggcggcaccccgaaacgatgcctcgacctgagcaatctgtcaagcggtgagattacggcgacccagctcacaacctctgcagatcttgatgagacaggtcatcttgacagctccggtttacaggaggttcacctggctggcatgaatcacgaccagcacctcatgaagtgctctcctgcccaactgctatgttcaacacccaatggcctcgaccggggccaccggaagcgcgacgctatgtgtagcagctcagcaaacaaagaaaatgacaacgggaacctcgtggacagcgaaatgaaatacctgggctctcccatcacgacggtgcccaaactggacaagaatcctaacttgggagaagatcaggcagaagagatcagtgatgagcttatggaattctctctcaaagatcaggaggctaaggtctccaggtccggcctctaccggtcacctagtatgcctgaaaatttgaatagaccgagattaaaacaggtggagaaattcaaggacaacaccattcccgacaaagtcaagaagaaatacttttcggggcagggcaagctcaggaagggcctctgtctgaagaaaaccgtgtctttgtgtgacatcactatcactcagatgctcgaagaagattccaaccaaggtcatttgatcggcgatttcagtaaggtatgtgcacttcccacagtgtccgggaagcatcaggacctaaagtacgtcaaccctgagacagtggccgctctcctctccgggaagttccagggactcatcgaaaagttttatgttatcgactgccggtacccatatgagtacctgggaggacacatccagggggcgcttaatctctacagtcaggaggagctcttcaatttttttctcaaaaagccaatcgtaccactggatacccagaagcggattatcatcgtgttccattgtgaattcagctcagaacggggtccacgtatgtgcagatgtctgcgtgaggaggaccgatccttgaatcaataccctgcgctttactaccccgagctatacattctgaaaggcgggtaccgcgatttctttcctgagtacatggagctgtgcgaaccccagtcttattgtccgatgcaccaccaggaccataaaaccgagctgctaaggtgtagatcccagtctaaagtccaagaaggggagaggcagctgcgggaacagattgccctcctcgtgaaggacatgtcgccatag

SEQ ID NO: 23488 - DNA, 1473 bp, synthetic construct
  misc_feature 1..1473: note = Description of Artificial Sequence: Synthetic coding sequence
  source 1..1473: mol_type = other DNA
atgagcgaggaggcccggttctgcttcagccccggcgagaacagcaaaactatgtcgaccgaactgttttcctctaccagggaagaaggctccagtggtagcggacctagctttcgatcaaaccaacggaagatgcttaaccttctccttgagcgagacacctcctttaccgtgtgtcctgatgtcccccgcacccctgtcggtaagtttctgggcgattcagcaaatctgtcaatcctgtccggtggcaccccaaaaagatgtctcgacctcagcaacctcagcagcggcgaaatcactgcaacccaactgaccacatctgctgatttggatgaaactggtcatttggatagctcaggtctccaggaggtccacctggctggcatgaaccacgatcaacatctgatgaagtgtagccctgcacagctcctttgtagtactcccaatgggctcgataggggtcatagaaaaagagacgcaatgtgctcttcttccgccaataaagagaatgataacggaaatttggtcgatagtgaaatgaagtatctgggcagtcctatcaccacagtgcccaaactggacaaaaaccctaacctaggagaggatcaggcggaagaaataagtgatgagctcatggagttcagtctcaaagatcaggaagccaaagtttctaggtctggtctatacagaagtcctagcatgcctgagaacctcaaccgccctagactgaagcaggtcgagaagttcaaggacaacaccattcctgacaaagtaaaaaagaagtatttcagtggacagggcaagctccgtaaaggcctgtgtttgaaaaagaccgtgtcgttgtgtgatatcaccattacccaaatgcttgaagaagactctaaccagggtcacctcatcggggacttcagtaaggtctgcgccctaccaacagtttcgggcaaacaccaagacctgaaatacgtgaaccctgaaacggttgcagcccttctgtccgggaagttccaggggctcattgagaagttttatgtgatcgactgccggtacccctacgagtatctgggaggacatatccagggggccctgaatctatattctcaggaggaactgttcaattttttcctgaaaaagccaatcgtccccctcgatacccaaaagagaatcatcattgtattccactgcgaattcagctccgaaaggggcccccggatgtgccggtgtctccgggaagaggacaggagcttaaatcagtaccccgcactgtactaccctgagctgtatatcctgaagggaggctatcgcgacttttttccagaatacatggagttgtgtgagcctcaaagttactgcccaatgcaccatcaagaccataaaaccgaattactgaggtgcagaagccagtctaaggtgcaggaaggagaaagacaactccgagagcagattgccctgttggttaaagacatgtccccatag

SEQ ID NO: 23489 - DNA, 288 bp, synthetic construct
  misc_feature 1..288: note = Description of Artificial Sequence: Synthetic coding sequence
  source 1..288: mol_type = other DNA
atggagggcggcttcggcagcgacttcggcggcagcggcagcggcaagctggacccaggcctaataatggagcaagtcaaagtccagattgcggttgccaacgcccaggagctcctgcaaaggatgacagacaaatgctttcggaagtgtatcggaaagcccggcggctccctggacaactcagagcagaagtgcatcgcaatgtgcatggataggtatatggatgcatggaatactgtgtcccgtgcttacaactcacgattgcagcgtgagagggccaatatgtag

SEQ ID NO: 23490 - DNA, 576 bp, synthetic construct
  misc_feature 1..576: note = Description of Artificial Sequence: Synthetic coding sequence
  source 1..576: mol_type = other DNA
atgcagaccatcaagtgcgtggtggtgggcgacggcgccgtgggcaaaacgtgcctgctcatcagctataccactaataaattcccgagcgaatacgtgcccactgtgtttgataactacgccgtgaccgtcatgatcggaggagagccatataccctgggcctgtttgatacagctgggcaggaagactacgaccggctccggcctctcagttacccacagaccgatgtgttcctcgtttgcttttctgtggttagtccctcatctttcgaaaacgtgaaagagaagtgggtgcctgagatcacgcaccactgtcctaaaacaccattcctgttggtgggcacacagatcgacctcagagatgaccctagtacaatcgaaaagctggccaagaacaagcaaaagccaattactcctgagaccgcggaaaagcttgctagggatctgaaggctgtgaaatacgttgaatgtagtgcactgacgcagcgcggattaaaaaacgtgtttgatgaagccatcctggctgctctggaaccacccgagactcagcctaagagaaagtgttgcatcttctag

SEQ ID NO: 23491 - DNA, 576 bp, synthetic construct
  misc_feature 1..576: note = Description of Artificial Sequence: Synthetic coding sequence
  source 1..576: mol_type = other DNA
atgcagaccatcaagtgcgtggtggtgggcgacggcgccgtgggcaagacatgcttactgatctcttatactaccaacaaatttccttccgagtacgtgcctacggtattcgacaactatgccgttactgtcatgatcggtggagagccctatactctgggcctttttgacactgcagggcaggaggactacgaccgcctccggcccctcagctatccacagactgatgtgtttctggtgtgcttctctgtcgtgagcccctcaagcttcgagaacgttaaggaaaaatgggtccccgagataacgcatcactgtcccaagacaccatttcttttggtcgggacacaaatcgatttgcgggatgatccaagcaccatcgaaaagctggccaaaaataagcagaagcccataactccagaaactgccgaaaagctggctcgcgatctaaaagccgtcaaatatgttgaatgcagcgctctaactcagaagggcctgaaaaacgtgttcgatgaggccatcctcgcagccctcgaacccccagagcccaaaaaaagcaggcgatgcgtgctgctatag

SEQ ID NO: 23492 - DNA, 576 bp, synthetic construct
  misc_feature 1..576: note = Description of Artificial Sequence: Synthetic coding sequence
  source 1..576: mol_type = other DNA
atgcagaccatcaagtgcgtggtggtgggcgacggcgccgtgggcaagacttgcctcctgatttcatatacaaccaataaattcccatcggagtacgtgccgacagtttttgataattacgccgtaaccgttatgattggcggggagccttatactctgggtctgtttgacacagccgggcaagaagattatgaccggctccgccccctgagctatccccagaccgacgtgtttctggtctgtttctccgtggtaagtcctagctcgttcgagaatgtcaaagaaaagtgggtgccggaaattacacaccactgccccaaaacgccttttcttttagtgggcactcaaatagatcttcgagatgatccaagcaccattgaaaaactcgctaagaataagcagaaaccaataaccccggagacagcagagaagctggcgcgagaccttaaagcggttaaatacgtggagtgttccgctctcacccagaaaggtctgaagaatgtctttgacgaggcaatcttagccgcactggagcctccggagccgaagaagtcaagaagatgcgttcttctgtag

SEQ ID NO: 23493 - DNA, 411 bp, synthetic construct
  misc_feature 1..411: note = Description of Artificial Sequence: Synthetic coding sequence
  source 1..411: mol_type = other DNA
atgcagaccatcaagtgcgtggtggtgggcgacggcgccgtgggcaaaacgtgtctgctcataagttatacaaccaacaaatttccttccgaatatgtacccactgtatttgataactatgctgtcaccgtaatgatcggcggggagccctacacactggggctctttgacacggctggtcaagaagactatgatcgcctgcgtccgctgagttacccccagacagatgtgttccttgtttgtttctcggtcgtaagtccttcctccttcgaaaatgtgaaggaaaagtgggtgccagaaattactcatcattgtccaaaaactcccttcttgctggtgggcacccagattgatctcagggacgacccctccaccatcgagaaattggctaagaataagcagaaaccctag

SEQ ID NO: 23494 - DNA, 702 bp, synthetic construct
  misc_feature 1..702: note = Description of Artificial Sequence: Synthetic coding sequence
  source 1..702: mol_type = other DNA
atgagccccgacatcctgcacaacaagcagatcagcatcggcatctgcacagattacttggatttcagttgggtgaattatattcatttcaaacagctgaagaatcagtggaaggtcaggcggggtgatacaggctttgccagatctgccggcaggcagaacagctctcgacaagattccaatgagtggtggtctcagtttggcgaagtgtgtcccacctcatggaacgaagtgtttgataattacgcagtcactgtaatgattggaggtgagccctatactttgggcttgtttgacactgcgggccaggaagactatgaccggctccgcccactgagctaccctcagactgatgtgttccttgtgtgcttctccgtggtcagcccatccagctttgaaaacgtgaaggagaagtgggtacctgagattactcatcactgtcccaagaccccgttccttctggtgggcacccaaattgatttgcgagacgaccccagcaccatcgaaaagctcgccaaaaacaaacaaaagcccatcacaccagaaactgccgagaaactagctcgcgatcttaaggctgtgaaatacgtggaatgcagtgccctgactcagaagggcttaaagaatgtgtttgacgaggcaatcctggccgccttagaaccccctgaaccaaagaaaagtaggcgatgtgttttgctctag

SEQ ID NO: 23495 - DNA, 1269 bp, synthetic construct
  misc_feature 1..1269: note = Description of Artificial Sequence: Synthetic coding sequence
  source 1..1269: mol_type = other DNA
atgaacagcggccacagcttcagccagacccccagcgccagcttccatggggctggtggcgggtggggaagacctagaagtttcccccgagccccaactgttcatggtggcgcagggggagctcggattagcctaagcttcaccacacgatcatgccctcccccgggtggctcttggggatcaggccgctcctctccactgttaggggggaatggcaaggctaccatgcagaaccttaacgaccggcttgccagttacctagagaaggtgagagccctggaagaggccaacatgaagctggagtcacggattcttaaatggcatcaacaaagagatccaggcagtaagaaagattactctcagtatgaggagaatattacccatcttcaggaacaaattgtggatggcaagatgaccaacgcccagattattctccttatagacaatgcccgcatggctgtggacgattttaatctgaagtacgagaacgaacactcattcaagaaggacctggaaattgaggtggagggactgcgccggacacttgataatctgacaatagtgaccactgatctggagcaagaagtggagggcatgaggaaggagttgatactgatgaaaaagcaccatgagcaggaaatggagaaacatcacgtaccctcagacttcaacgttaacgtgaaggtcgatactgggcctcgcgaggatctcatcaaagtcctggaagacatgaggcaggaatatgagctgatcattaagaaaaaacacagagatttggacacctggtataaggagcaaagtgccgcaatgagtcaggaagctgcctcccctgctacagtgcagtctcgacaaggggatatccacgaactgaaacgcacctttcaggctctcgaaattgacctgcagacacagtattctaccaagtctgccctggaaaatatgctcagtgaaacacagagccgatattcctgtaaactgcaggacatgcaggagatcatttcccactacgaggaagagctgacccagctgaggcatgaactcgaacggcagaacaatgaataccaggtcttgctaggcataaaaacacatctggaaaaggaaatcaccacgtataggcggctgctagaaggtgaatccgaaggtacacgcgaggagtctaaatcatccatgaaggtgtcagcaacccctaagattaaagctattacacaggagaccatcaatggccgcttagtattatgccaggtgaatgagatacaaaaacacgcgtag

SEQ ID NO: 23496 - DNA, 1596 bp, synthetic construct
  misc_feature 1..1596: note = Description of Artificial Sequence: Synthetic coding sequence
  source 1..1596: mol_type = other DNA
atggccgacgtgctgagcgtgctgcggcagtacaacatccagaagaaagagatcgtggttaagggtgatgaagtgatctttggagaattttcatggcctaagaacgtcaaaacaaactatgtagtgtgggggaccggaaaggagggacagccacgggaatactatacccttgatagcatcttatttttgcttaacaacgtccacctctcgcatccggtgtatgttagacgggccgccactgagaacattcctgtggttcgccggcctgaccgcaaagatttactaggctacctcaacggggaggccagcacttctgcgtctattgataggtctgcccctctcgagataggtctgcaacgaagcacacaggtcaagagggccgctgacgaagtcctggccgaagccaagaagccgagaatagaggacgaagaatgcgtgaggttagacaaggagcgccttgctgcaaggcttgaggggcataaggaaggtatcgtgcagacggaacaaattaggtccttgagcgaagccatgagcgtagagaagattgctgcaataaaagctaaaatcatggccaagaaacggagcacaattaagacagatcttgacgatgacatcactgctctcaagcagaggagtttcgtggatgctgaagtggatgtgaccagagacattgtctcccgagaacgggtatggcggacccgcactaccattctgcagtccacaggcaagaatttctccaagaacatcttcgcgatcctgcagtccgtaaaagctcgtgaggaaggcagagccccggagcagcgccctgcccctaatgccgcccccgttgaccccacgctgcggaccaaacaacctataccagcagcctacaatcggtacgaccaggagcgctttaagggcaaggaggagaccgaaggctttaagattgataccatgggtacctaccacggaatgacgttgaaaagcgtgaccgagggggcgtccgcccgcaaaacccagacacctgccgctcagcccgttcccaggccagtatctcaggctcggcctcctcctaatcagaaaaagggcagcaggacacctattattattattcccgcagccacgactagcctgatcactatgctgaacgccaaggatcttctccaggacctgaaatttgttccatcggacgaaaagaaaaagcaaggatgccagagagaaaatgaaaccttaatacagcgccgcaaggaccagatgcagcctgggggcaccgctatctctgttaccgtcccatacagggtcgtggaccagcctctcaaattgatgcctcaggactgggaccgggtggtcgctgtcttcgtacagggccccgcatggcagtttaaaggctggccatggttattacccgatggttctccagtcgacatatttgccaaaatcaaggcctttcatttgaagtacgatgaggtgagactggacccaaacgtgcagaaatgggacgtcaccgtacttgagttgtcctaccacaagcgacatctcgaccgcccagtgttcctgcgattctgggaaacgctagatcgctacatggtgaagcacaaatcacatctgcgtttttag

SEQ ID NO: 23497 - DNA, 951 bp, synthetic construct
  misc_feature 1..951: note = Description of Artificial Sequence: Synthetic coding sequence
  source 1..951: mol_type = other DNA
atggccgacgtgctgagcgtgctgcggcagtacaacatccagaagaaggaaatagttgtcaagggggatgaagtgatctttggagagttctcttggcctaaaaacgtcaagacaaactatgtagtgtggggcaccggcaaggaggggcagccccgggaatactataccttagattccatcctgttcctgcttaataacgttcatctctctcacccagtttatgtgagaagagccgctacagagaacataccagtcgttaggcggccagacagaaaagacttgcttggttatctgaatggggaggcatctacatcagcgagcatcgatcggagcgcccctctcgagattgggctccagagaagtacccaggtgaaacgcgcagccgatgaagtgttggccgaggctaagaagccccgaattgaggatgaggaatgcgtgcggctcgacaaagagaggctggctgccaggctggagggacataaggaaggtattgtgcagaccgaacagatcaggtccctttccgaagctatgagtgtcgaaaagatcgctgctataaaagctaagattatggccaaaaagcgaagtaccatcaagacagacctggacgatgacattactgcgctgaaacaaagaagttttgtggatgcggaggtcgatgtgactcgggacattgtgagccgcgagagagtgtggcgcacccgcacaacgatcttgcaatccaccgggaagaacttctccaagaatattttcgctattcttcaaagcgtcaaggctagggaagagggcagagccccggaacagaggcccgccccgaacgccgctcccgttgacccaacattgcgtaccaagcagccaattcccgccgcctataaccgatacgatcaggagagaatttcaaacacacattatcacaatagttgcagttatcatctgttcaataatcatgcctag

SEQ ID NO: 23498 - DNA, 1317 bp, synthetic construct
  misc_feature 1..1317: note = Description of Artificial Sequence: Synthetic coding sequence
  source 1..1317: mol_type = other DNA
atgggcggctgcgccggcagccggcggcggttcagcgacagcgagggtgaagagacagtgccagaaccccgactccccttactggatcaccagggagcccactggaagaatgcagtgggcttctggcttctcggcctgtgtaataacttttcctatgttgtgatgcttagcgccgctcatgacatcctttctcataagcgcacttcaggtaaccaatctcatgtggacccagggcctactccaatcccacacaattcctcatcacggtttgattgcaactctgtgtcgacagcagccgttctgctggcggacatactccccaccctggtcattaagctgttggccccactcgggctgcacctgctgccctatagccctagagtgctggtctcagggatttgtgccgctggatcctttgtgcttgttgcattttctcactcagtggggacctccctgtgcggcgtggtgtttgcatcaatctcctcggggcttggcgaggtgacattcctcagcctgactgctttctaccccagagccgtgataagctggtggagttcagggaccggaggggccgggctgttgggggccctgagttatttgggactgacccaagccggcctatcaccccaacagactctgctgagtatgctcggaatccctgcgcttctattggccagctatttcttgctgctgacatcaccagaagcccaggacccaggcggagaagaggaggcagagagcgccgctcgacagcctttgatcaggacagaggccccagagagtaagcccggttctagctcttcactctcgctaagagagcggtggaccgtgttcaaaggactcctctggtatatcgtgcctctggtcgtcgtttatttcgccgagtactttattaatcaaggacttttcgaactgttattcttctggaacaccagcctgagccatgcccagcagtatagatggtatcagatgctgtatcaagcaggggtctttgcctcacggagctccctgcgctgctgtcgaatcagattcacttgggccctggcccttctgcaatgccttaacctagtatttctgctggcagacgtgtggttcgggttcctgcctagcatctacctggtattcctaatcatcctctatgagggcctactcggcggtgccgcttatgtgaacacttttcataacatcgcactcgagacatcggacgagcaccgcgagtttgccatggcagcaacctgtatctcagacaccctgggaatcagcctctctgggttacttgcactccccctccacgatttcctgtgtcaactcagctag

SEQ ID NO: 23499 - DNA, 504 bp, synthetic construct
  misc_feature 1..504: note = Description of Artificial Sequence: Synthetic coding sequence
  source 1..504: mol_type = other DNA
atgggcggctgcgccggcagccggcggcggttcagcgacagcgagggagaagaaactgtgcctgagccgaggctcccccttctggatcaccagggagcacattggaagaacgctgtcgggttttggctcttggggctgtgcaacaatttcagttatgtcgtaatgctcagtgcagcccacgacattctgtcccacaagcgaactagcggaaatcagtcgcaccctccaggaagccggcagtgggatttgtgctgctggaaactccggcccggctgtttattcagcttttgtggcgatcagccggtgtgctatttcctcttgcttacgagtcccgaagcccaggatccaggtggggaggaggaagcggagtcggccgccagacagcctttgatcaggaccgaagcacccgagagcaaacctggctcctcctccagcctgtctctgcgggaaaggtggactgtttttaaggggctcttatggtacatcgttcctcttgtcgtgtag

SEQ ID NO: 23500 - DNA, 1266 bp, synthetic construct
  misc_feature 1..1266: note = Description of Artificial Sequence: Synthetic coding sequence
  source 1..1266: mol_type = other DNA
atgggcggctgcgccggcagccggcggcggttcagcgacagcgagggtgaggagaccgtacccgaacctagactgcctttgcttgaccatcagggggcacattggaaaaacgcagttggattttggctgcttggtctgtgtaacaattttagctacgtcgtgatgctcagcgccgcacatgacattctttcccataaacgaacaagcggaaatcaaagccatgtggaccccggccccacgcctatcccccacaacagcagcagcagatttgactgtaattctgtctccaccgctgctgtccttctggccgacatactcccgactttggtcattaagctgcttgctcccctgggattacacctgctcccatactcccctcgagtactggtctcagggatctgcgccgctggctcctttgtcctagtggccttttctcactctgtcgggacctcactttgtggcgtcgtcttcgcaagtataagcagtggcctcggcgaggttacgttcctttcccttaccgccttttaccctcgcgcagtgatatcctggtggtccagtggaaccgggggagccggccttctcggagccttaagttaccttggcctcacccaggccggcttatccccacagcagacattgctgagtatgctgggaatacccgcattgcttctcgcctcttacttcttactcttgaccagtcccgaggcccaggatccaggcggggaggaagaggctgagagcgcggcccgtcagccacttatcaggactgaggcacctgagtcgaagcctgggtcttcttctagcctatcactccgagagaggtggaccgtgtttaaagtccggatgatggccgggtttgaactgctctttttctggaataccagcctcagtcatgcacaacagtacagatggtaccagatgctgtaccaggccggtgtatttgcttctcggtcatcgctgagatgttgtcgtatcagatttacctgggcattagctttgcttcagtgcctcaacctggtgttcctgctagcagacgtctggtttggctttctaccaagcatctatctggtcttcctcataatcttatacgaaggtttactgggtggcgccgcctacgtgaatacgttccataacatcgccttagagacatccgacgagcaccgagagttcgcaatggcggcgacctgtatttccgacacgctgggcatttccctcagcggcctgctggcacttccactgcacgattttctgtgccagctctcttag

SEQ ID NO: 23501 - DNA, 1173 bp, synthetic construct
  misc_feature 1..1173: note = Description of Artificial Sequence: Synthetic coding sequence
  source 1..1173: mol_type = other DNA
atgggcggctgcgccggcagccggcggcggttcagcgacagcgagggcgaagagaccgttccggagcccagacttccactgctggaccaccagggggctcactggaagaacgcggtgggcttctggctccttggactgtgcaacaacttttcctatgttgtgatgttatcagccgcacatgacatcttaagccacaaaaggaccagcggaaatcagagccatgtcgatccaggtcctacccctatccctcacaactcgagctcccgttttgattgtaatagcgtttcaactgctgctgtgctgctagccgatatcctccctactctcgtgatcaagctcttagccccactaggtttgcacctactcccttacagcccccgggtactagtgtccggtatttgtgcggctgggtcattcgtgttagtggccttttctcactccgtcggcacgtccctgtgtggtgtggtgtttgcctccatctcttcgggcctgggggaagttactttcctctctctcaccgccttctatcccagttactttctcctgctgacgtctcctgaagctcaagatcctggaggggaagaggaagccgagagcgccgctcgacaaccactcataaggaccgaggcacccgagtctaaaccagggtcgtccagtagtctttcacttcgcgaaaggtggacggtcttcaagggtctgctctggtacattgtaccgctggtggttgtgtattttgccgagtattttattaatcaaggcctgtttgagctgcttttcttttggaacacctcactctctcacgcccaacagtatcgctggtatcaaatgctgtaccaggctggagtgttcgcatctcgttctagcctgaggtgctgtagaatcagatttacatgggccctggctctgctccaatgtctgaacctggtgttccttctcgctgacgtatggttcggctttctaccttctatttacctcgtgtttctcatcatcctgtacgagggcctgttaggaggcgccgcctatgtgaacacatttcacaatattgccctcgaaacaagcgacgagcatcgagagttcgcaatggctgctacttgcatctccgacacactgggcatctccctgtccggcttgctggctctgcccttgcatgactttctgtgccagctttcctag

SEQ ID NO: 23502 - DNA, 762 bp, synthetic construct
  misc_feature 1..762: note = Description of Artificial Sequence: Synthetic coding sequence
  source 1..762: mol_type = other DNA
atgggcggctgcgccggcagccggcggcggttcagcgacagcgagggagaggaaaccgtaccagaacctaggctgccattattggatcatcagggtgcgcactggaagaacgctgttggtttttggctgctcggcctctgtaacaacttctcatatgttgtgatgttgtcagctgcacacgacatcctgtcacataagcgtacttctgggaatcagagtcatgtggaccctggtcccaccccaatcccccacaattcttcatcacgatttgattgcaactcagtgagtacagccgccgtgctgctggcggatatcttacctactctggtaattaagctccttgcccctctcggcctccacctgctaccctatagcccccgagtactcgtatcaggcatctgcgccgctggcagtttcgtactggtggctttttctcatagtgtgggtacaagcttgtgcggctcatcctcctcattgtccctcagagaacgttggacagtgttcaaaggcctgctctggtacattgttcccctggtggtcgtatatttcgccgaatatttcatcaatcagggactgtttgagctgttatttttttggaacacctctctgagccacgctcagcagtacagatggtatcaaatgctgtaccaggccggggtgttcgccagccgatctagtctgaggtgctgcagaattcgattcacctgggctctggctctacttcagatggagtccagatcggtggcacaggccgggatgtag

SEQ ID NO: 23503 - DNA, 1020 bp, synthetic construct
  misc_feature 1..1020: note = Description of Artificial Sequence: Synthetic coding sequence
  source 1..1020: mol_type = other DNA
atgggcggctgcgccggcagccggcggcggttcagcgacagcgagggagaagagactgtcccagaacccagactgcctttgctggatcaccaaggggctcattggaaaaacgctgtcggcttctggctgctgggattatgcaacaactttagctacgtggtcatgctctctgccgcgcacgacattctgtcgcataagagaacatccgggaaccagagccacgtggaccctggacccacaccaataccacacaattcctctagtcgatttgattgcaacagtgtgagtacggcaccccccgggtcccgacagtgggacttatgttgttggaagttaagaccaggctgtctgttctcgttttgcggcgaccagccagtgtgttacttccttctcctcacctcacctgaggctcaggatccaggtggcgaggaggaagccgaatccgccgctcgccagcctctgatccggaccgaagctccggagagtaagcccggatcatcgtctagtctatctttgcgagagcgttggaccgtgtttaagggactcctgtggtacattgtgccgcttgtagtggtgtacttcgctgagtacttcatcaatcaaggactcttcgagctgctgttcttctggaacacatctctgtctcatgctcaacagtacaggtggtaccagatgctgtaccaggccggggttttcgcctctcggagcagtctgagatgctgtcgcattcggttcacttgggctctggcgttactccagtgcttgaacttagtctttcttctggcagacgtctggttcggcttccttccctcaatctacctggtgttcctgatcatcctgtacgaagggctcttaggtggcgccgcgtacgtgaacactttccataacatcgccttggagaccagcgatgagcaccgtgaatttgccatggcagctacttgcatcagcgatactctgggaatttcactttctgggttgcttgcattacccctgcacgacttcctttgtcagctctcctag

SEQ ID NO: 23504 - DNA, 1155 bp, synthetic construct
  misc_feature 1..1155: note = Description of Artificial Sequence: Synthetic coding sequence
  source 1..1155: mol_type = other DNA
atgctgagcgccgcccacgacatcctgagccacaagcggaccagcggcaaccagagtcacgtggaccccggcccaacacccatcccccacaacagctcttcccgattcgactgcaacagcgtatcaacagccgctgttctattggccgacatcctccccaccctcgtcatcaaactactcgccccgttggggctccatctgctgccatattcaccacgggtgctcgtcagcggcatctgcgctgcaggctcatttgttcttgtagccttctcacatagcgtgggcacttccctgtgcggagtcgtgttcgctagtattagcagtggtttaggcgaggtcacatttctgagcttaaccgctttctatcctagggcagtgatttcttggtggtcatctggcactggaggtgccgggcttcttggcgctcttagctacctggggctcacgcaggcgggcctgagtccacagcagactctgttgagcatgctcggaatccctgccctgctactggcttcttacttcctcctgttgactagccccgaggcccaagatcccggaggagaagaagaagccgaaagtgctgcccgtcagcccttgatccggaccgaggctcccgaaagtaagcctggatcctcttcatcactatccctcagggagcgctggacagtctttaagggacttctttggtacatagtgcccctcgtggtagtttatttcgccgagtacttcattaatcaggggttgtttgaactattgttcttctggaacacatctctgtctcatgcccagcaatataggtggtaccagatgctttatcaggcaggcgtgttcgccagtcgcagctccctccgttgttgtcgtattcgttttacctgggctctcgcattgcttcaatgcctgaatttggtatttctgctggccgatgtatggttcggcttcctcccatctatttacttagtattcctcattattctctacgaggggctgctggggggagccgcctacgtgaacacgtttcacaatattgcgctggagacttccgacgaacacagagagttcgctatggccgccacatgcatctcggacacactcggcataagcctgtccggcctcctggcactccctctacacgatttcttatgtcagctgagctag

SEQ ID NO: 23505 - DNA, 1317 bp, synthetic construct
  misc_feature 1..1317: note = Description of Artificial Sequence: Synthetic coding sequence
  source 1..1317: mol_type = other DNA
atgggcggctgcgccggcagccggcggcggttcagcgacagcgagggagaagaaaccgttcccgagcctcggcttccacttttggatcatcagggggcccattggaaaaatgcagtcgggttctggctcctggggctctgtaataatttctcatatgtcgtgatgctttctgccgcacacgatattctttcacataaacgcacatccggtaaccagtcacacgtcgaccctggaccgacgccaatcccacataacagttcttctcggttcgactgtaatagcgtatccactgccgcagtgctgctggccgatatcctgccaaccctcgttatcaagctgctcgccccattgggactgcatctcctcccgtactccccacgggtacttgtttccggaatctgcgccgcaggttcctttgtgctggtggcattctcccactccgtcggaacatctctgtgtggagtagttttcgccagtatttcaagtgggttgggcgaggtgactttcttgagcctaaccgcgttctatccaagagcagtcatcagctggtggtccagcggtacaggaggggctggtttactgggggctctcagctacttggggcttacccaggcaggtttatcccctcagcagacacttctgtctatgctgggcatccccgccctgcttttagcctcatacttcttgctccttacaagtcctgaggcacaagaccctggtggggaagaagaggcggaatccgcagcccgtcagccgctgattagaacagaggctcccgagagcaagccaggaagcagctccagcctatccctcagagaaaggtggacagtctttaaaggcctgctgtggtacattgttccccttgtcgtggtatatttcgccgagtactttatcaaccaaggtctgttcgaactcctgttcttctggaacacgagtctctcacacgcccaacagtataggtggtaccagatgctctatcaagctggcgtttttgccagtcggagtagcctgcgctgctgcagaatacgatttacctgggcattggctttactgcagtgtcttaacctggtgtttctcctggcagacgtttggttcgggttcctccccagcatttatctcgtttttctgataattctgtatgagggtctcctcgggggtgcagcttatgtcaataccttccataatatagccctggaaacaagtgatgaacacagagagttcgcgatggccgcaacatgtattagcgatacccttggaataagtctgagcggtctcctggcccttcccctgcatgattttctgtgccaactaagttag

SEQ ID NO: 23506 - DNA, 1317 bp, synthetic construct
  misc_feature 1..1317: note = Description of Artificial Sequence: Synthetic coding sequence
  source 1..1317: mol_type = other DNA
atgggcggctgcgccggcagccggcggcggttcagcgacagcgagggagaggaaacagtgcccgaacccaggctgccattgctcgatcaccagggcgcccattggaagaacgccgtcggcttctggctgctaggcctgtgtaacaatttttcatacgtcgtgatgctttccgccgctcacgacatcctgagccataagaggaccagcggcaatcaaagccatgtcgatcctggacctaccccaatccctcacaattcttcctctagattcgactgcaacagcgtgtctaccgccgctgtgttactggcggacatcctgccaactctggtcatcaaattgctggccccattaggcttgcatctcctcccatatagcccaagggtgctcgtctcaggtatttgcgcagctggctccttcgtgctggtggcattttctcattcagtgggcacgtccctatgcggcgttgtgtttgcttccatctcctcaggactgggagaggtaacgtttctctcactgaccgctttttaccccagagctgtgatctcttggtggtcatctggcactggaggggcaggcctgctcggtgctctgtcctatctgggattgactcaagccgggttgagcccccaacagacactattgtccatgctgggcatacctgctctgttgctcgcaagttatttcctgttactcacaagtccagaggcccaggatccaggaggggaggaagaagcggaatccgccgcgaggcagcccctgatacggactgaggcacctgagagtaaacctgggagttcgtcatcgctatcactgcgcgaacgatggactgtatttaaaggacttctgtggtacattgtgcccctggtggttgtctactttgcagaatactttatcaatcagggtcttttcgaactgctcttcttctggaatacctcattgagccatgcccagcaataccgatggtaccagatgttgtaccaggctggcgttttcgcatccaggtccagtttacgctgctgccggattaggttcacttgggccctggctctgttgcagtgtttaaatctcgtctttctcttagctgatgtgtggtttggtttcctcccgtctatttacttggtgttcctgataatactctacgagggtttgctgggtggcgccgcttacgtgaacacttttcataacatagccctggaaacaagcgacgagcacagggagtttgctatggccgctacatgcatcagcgatactctcgggatttccctgtccggattgctggccttgcccctccatgatttcctgtgccagctcagctag

SEQ ID NO: 23507 - DNA, 1017 bp, synthetic construct
  misc_feature 1..1017: note = Description of Artificial Sequence: Synthetic coding sequence
  source 1..1017: mol_type = other DNA
atgtggacccaggcccagcggcggagccccaccaccgcccaccacgacttaacagcaacgctcagcttgcggcttccaagggtgttggtgtcgggaatctgtgcggccggatcattcgtgcttgtcgcatttagccattcagtgggcacttcactgtgcggcgtggtttttgccagcatttcatccgggctaggcgaggtcaccttcctgagtctgactgcattttacccacgcgcagtgatttcttggtggtcctccggcaccggcggcgccggcttactcggcgcattgtcctacttgggtctcacacaggcgggcctgtccccacagcagactctcttaagcatgctcggcatccctgcattgctgctagcgtcctactttttgcttctcacctcccccgaagcacaggacccaggaggcgaagaggaggcagagagcgcagcaaggcagccgctcatccgcaccgaggctccagaatccaaaccaggaagctcctctagcctctctctgagagaacgctggaccgtgttcaagggcctgctgtggtacatcgtgcctctcgttgtggtttacttcgccgagtactttataaaccagggcctctttgagttgttgtttttctggaatactagcctcagtcacgctcaacagtaccgctggtatcagatgctgtaccaagccggagtgttcgcttccagatcaagcctgagatgctgtcgtatcaggtttacctgggcactagcacttctgcaatgtctgaacctcgttttcctattagcagacgtgtggtttgggttcctcccctccatctatctggtgttcttgatcatcctatatgaaggtttgttaggtggcgccgcttacgttaatacttttcataatatcgctctggaaacatctgatgagcaccgggaatttgccatggcagctacatgtattagcgacacactcggcatcagcctgtctgggttgcttgccctgcctctgcacgattttttgtgtcagctgagctag

SEQ ID NO: 23508 - DNA, 1083 bp, synthetic construct
  misc_feature 1..1083: note = Description of Artificial Sequence: Synthetic coding sequence
  source 1..1083: mol_type = other DNA
atgctgagcgccgcccacgacatcctgagccacaagcggaccagcggcaatcagtctcatgcggtattacttgccgacatcttgccaactctcgttatcaaactcctggcaccactcggcctacatctgctgccttactcgcctcgagtgctggtaagcggcatctgcgctgccggctccttcgtactggttgcgttttcacattccgtggggacatcactgtgcggagtagtttttgcctctataagttcaggtttgggagaagtaacgttcctatcactgacggccttctatccccgtgccgtgatatcatggtggtcaagtggcaccggcggggccgggcttctgggcgcattatcgtacctgggactcacccaagcaggtctcagtccacaacaaacactgctcagtatgctggggatacctgcgctgcttttggcatcctattttctgttactgacgagtccagaagctcaggatcctgggggggaggaagaggccgaaagtgcagctagacagcccctgatcagaacggaggctccagagtccaaaccaggctcttcatcttcactctctctcagagaaaggtggacagtgttcaaggggctgttatggtacatcgttcccctagtcgtggtgtactttgcagaatattttattaatcaggggctgttcgagttgttattcttctggaatacctccttatctcacgcacagcaataccgctggtatcagatgctttaccaggccggcgtatttgcatccaggtcatcactgagatgctgccggatcagattcacttgggcactagcgctcctacagtgtttaaacctggtgttcctgttagccgacgtgtggtttgggtttctgccctccatctacctcgtgtttctgattattctttacgaaggccttctcggaggagcggcttacgtaaatacttttcataacatagcccttgagacctctgacgagcatcgggaattcgctatggccgctacttgtatctcagatacacttggaatctcattgtcgggattgttagccctacccctccacgacttcctctgtcaactgtcctag

SEQ ID NO: 23509 - DNA, 1299 bp, synthetic construct
  misc_feature 1..1299: note = Description of Artificial Sequence: Synthetic coding sequence
  source 1..1299: mol_type = other DNA
atggccgtgcccttcgtggaggactgggacctggtgcagaccctgggcgaaggcgcttacggggaagtacagcttgcggttaaccgggtcacagaggaggcagttgctgttaagatagtagacatgaagcgggccgttgactgtcccgaaaatatcaagaaggaaatctgcatcaataagatgctgaaccacgaaaatgtggttaagttttacggtcatcgtagggagggaaatatccaatatctgtttctggagtactgttcaggcggtgaactcttcgaccggattgaaccagatattggcatgcctgagccggacgcccaacgcttcttccaccagttgatggcaggggtggtgtatcttcacggtatcggaataactcaccgcgatatcaagcccgaaaatctgctgctcgatgaacgggataacctaaaaatcagtgacttcgggctggctaccgtctttaggtataataaccgcgaaaggcttctcaacaaaatgtgcggtactctgccctatgtcgcacctgagctgctgaagcggcgagaattccacgccgagcccgtcgacgtttggagctgtgggattgtgctgaccgcaatgctggctggagagttaccgtgggaccagcccagcgactcctgccaggagtacagtgactggaaagaaaagaaaacttatcttaatccctggaagaaaatcgattcggccccacttgccttgcttcataagatcttagtggagaaccctagcgctcggatcaccattcctgatattaaaaaggatcggtggtacaacaaacctctcaagaagggggccaaaagaccacgggtgacatccgggggtgtgtccgaatccccgagtggcttcagtaagcatattcagtcgaatctggacttctcaccagtgaattctgcaagtagcgaagagaacgtaaagtattctagttcccaacctgaacccagaaccggattgtcactgtgggatacttctccaagttacatagacaagttagtgcaaggcattagcttctctcagccaacatgtccggatcatatgcttctgaattcacagctgcttggaaccccggggagctcacaggtcacgatctcaaccaccgaccgtcggaacaataagttgattttcaaggtaaacctgctggagatggacgacaaaatcctggtcgactttaggttgtccaagggagatggtctagagttcaaaaggcacttcctgaagatcaaaggaaagctcatagacatcgtgagttcgcaaaagatctggctgccggccacttag

SEQ ID NO: 23510 - DNA, 1431 bp, synthetic construct
  misc_feature 1..1431: note = Description of Artificial Sequence: Synthetic coding sequence
  source 1..1431: mol_type = other DNA
atggccgtgcccttcgtggaggactgggacctggtgcagaccctgggagagggcgcttatggggaggtccagctggcagtaaaccgggtgacagaagaagctgtcgctgtcaagatcgttgatatgaaaagggccgtggattgtcccgagaatatcaagaaggagatttgcataaataagatgctgaaccacgagaacgtggtaaagttttacggccatcgcagggagggcaatatccagtacctgtttcttgagtattgctcagggggcgagctgtttgaccgcatagagccagacatcggtatgcctgagccagatgcccagcgcttcttccaccagctgatggctggcgtcgtctacttacacggaataggaatcacacatagagacatcaaacccgagaacctgctacttgatgaaagggataatctgaagatctctgatttcggcctagctacggtcttccgttataataaccgcgagcgtttgctgaataaaatgtgcggcacgcttccctacgttgctcccgagctgttgaagcgtcgtgagtttcatgcggagccagttgacgtatggtcatgcggaatagtgttaaccgcaatgttggccggcgaattaccatgggatcagccttctgattcttgccaagaatacagcgactggaaagagaagaagacttacctcaacccatggaagaagatcgatagtgcaccccttgccttactccacaagatcttagtcgaaaacccctcagctagaatcaccatccccgatattaaaaaggatcgctggtacaataaaccacttaaaaagggcgcaaaaaggccccgtgtgacctcaggtggcgtaagtgagagtccctctggattctccaagcacattcagagcaacttggacttcagtcctgtgaactctgcttcctccgaagagaacgtgaagtacagctcttcccagcccgagccaagaaccggtctgtctctgtgggatacatcaccctcttatatcgataagcttgtgcagggaattagtttcagccagccaacctgccctgaccatatgttactgaacagccaactgctgggcacgccagggagcagccagaacccctggcaacgcctcgtgaaacgcatgaccaggttcttcacaaagctggatgctgacaagtcctatcagtgcctgaaggaaacatgcgagaagctgggatatcaatggaagaagtcatgtatgaaccaggtgacaatcagtaccactgacagacggaataacaagctgattttcaaggttaatctcctcgagatggatgacaagatcctggtcgacttcagactgagcaagggcgacggcctggaatttaagagacattttctgaaaatcaaaggtaaacttatcgacatcgtatccagccaaaagatctggctgcctgccacctag

SEQ ID NO: 23511 - DNA, 1431 bp, synthetic construct
  misc_feature 1..1431: note = Description of Artificial Sequence: Synthetic coding sequence
  source 1..1431: mol_type = other DNA
atggccgtgcccttcgtggaggactgggacctggtgcagaccctgggtgagggagcctacggagaggtccaactggctgtgaacagagtgactgaggaagcagtcgctgttaaaatagtcgatatgaaacgggctgtggactgtcccgaaaacattaagaaggaaatctgtatcaacaagatgctgaatcatgagaacgtcgtgaaattttacggacatcgccgtgaaggcaatatccagtatctgtttctagagtattgctcaggcggagagctcttcgaccgtattgaacctgacatcggtatgcctgagccagacgcccagcgcttcttccaccagctgatggccggcgtagtctatttgcatggcatcggcatcactcacagagacatcaagcctgagaaccttcttctcgacgagcgagacaatctgaagatctctgatttcggtctagccacagtatttcgctataataatagggagcggctgctgaataaaatgtgcggtaccctaccctacgtggcaccggagctgctgaaacgcagagaattccacgccgagccggtggatgtctggtcttgtggaattgtcttgacagctatgttagctggggaactgccatgggaccagccatctgatagctgccaggagtattcagactggaaagaaaaaaaaacttacctcaatccttggaagaaaattgactctgcacccttagccttactgcataaaattctggtggagaacccaagcgcccggataacaatcccagacataaagaaggatcgatggtataacaaaccactgaagaagggcgctaagcgccccagagtgactagcggaggtgtgtcggaaagcccttcaggattcagcaaacatatccaatctaatctggatttttccccagtcaacagcgccagctccgaagaaaatgtgaagtactccagcagccaacccgagcctaggacaggcctatctctgtgggacaccagcccctcttacatcgataagctggtccaggggatcagcttctcccagccgacatgccccgaccatatgctactcaactcacagctgctgggcacacccggtagctctcagaacccctggcagagactcgtgaagagaatgacgcgcttcttcacaaaactagacgctgacaaatcctaccagtgcctcaaagagacttgcgagaagctcggctatcagtggaaaaagtcgtgtatgaaccaggtcaccatctctactaccgatagaaggaacaacaaactgatctttaaagtcaatctgctggagatggacgacaagattctggtggattttagactgtctaaaggcgacgggctggagtttaaacgacatttcctgaaaataaaggggaaactgatcgacattgtatctagccagaagatatggcttccggccacctag

SEQ ID NO: 23512 - DNA, 1431 bp, synthetic construct
  misc_feature 1..1431: note = Description of Artificial Sequence: Synthetic coding sequence
  source 1..1431: mol_type = other DNA
atggccgtgcccttcgtggaggactgggacctggtgcagaccctgggcgagggtgcgtacggcgaagtacagttggccgtaaacagggtgaccgaagaggctgtggccgtgaagattgtagatatgaagcgagctgtggactgtcccgagaatattaagaaggaaatctgtataaataagatgttgaaccatgagaatgtggtaaagttctacggacaccgacgggagggaaatatccagtatcttttcttagagtactgctccggtggggagctcttcgacaggatagagcccgatatcggcatgccagagcctgacgcccagcgcttttttcatcagctgatggccggggtcgtgtacttacatgggatcggcatcacgcaccgggacattaagcccgaaaacctcctgctggacgaaagagacaatctgaaaatatcagacttcgggctggccacggtcttcagatataacaaccgtgagcgactcctgaacaagatgtgcggaacgctgccctatgtggctcccgaattgctaaagcggagggagttccacgcggagcccgtggatgtgtggtcatgcgggattgtactgaccgcaatgcttgcgggcgagctcccctgggatcagccttctgactcctgtcaggaatacagtgactggaaagagaaaaaaacttatttgaacccgtggaaaaagattgattccgctcctctggctctcctgcacaagatacttgtggaaaacccttcagctcgcatcaccattcccgacattaagaaggacagatggtataacaaacccctcaagaagggagccaaacgacctcgggtcacttcaggtggagtctctgagagccccagtggatttagtaagcatatccagtccaatctggacttttcacctgtaaactcagcttcctcggaagaaaacgttaaatactctagctcgcagcccgagccaagaaccgggctatcgctctgggacacttctccttcatacatcgataaactggtgcagggcattagctttagtcaaccaacatgccctgatcatatgctcctgaacagtcagctgctgggaactcctggtagttcgcagaatccatggcagcgactggtgaagaggatgacgcggttcttcactaaactggacgctgataaaagctaccaatgcctcaaagagacttgcgagaagctgggctatcaatggaagaagtcatgcatgaatcaggtaacaatcagtactactgatcgccgcaacaataagctcatcttcaaagttaacctgctggagatggacgacaagatcctcgtggactttagactgtccaagggtgatggactggaatttaagaggcacttcctgaaaataaaaggcaaactgattgacattgtttcatctcagaaaatttggttgcccgccacttag

SEQ ID NO: 23513 - DNA, 402 bp, synthetic construct
  misc_feature 1..402: note = Description of Artificial Sequence: Synthetic coding sequence
  source 1..402: mol_type = other DNA
atggccgtgcccttcgtggaggactgggacctggtgcagaccctgggcgaaggtgcttacggtgaggtgcagttagcagtcaatcgcgtgacggaggaagcagtcgcagtaaagatcgttgatatgaaacgggctgttgattgccccgagaatatcaaaaaggagatatgcatcaacaaaatgctcaaccatgagaatgtggtcaagttttatggccatcgaagggaagggaacatacagtatttgttcctggaatactgctctggcggggagctgtttgacagaatagagcctgacattggcatgccagagccggacgcacagcgattctttcaccagctcatggctggcgtggtttacctgcacggaatcgggatcactcacagagatattaagccgtag

SEQ ID NO: 23514 - DNA, 513 bp, synthetic construct
  misc_feature 1..513: note = Description of Artificial Sequence: Synthetic coding sequence
  source 1..513: mol_type = other DNA
atggccgtgcccttcgtggaggactgggacctggtgcagaccctgggcgagggcgcttatggcgaagtgcagctggcagttaatcgggtgaccgaagaagcagtggctgttaaaatcgtagatatgaaacgggctgtcgactgccctgaaaacatcaaaaaggaaatatgcataaataagatgctaaatcatgagaacgtcgtcaagttctatgggcacaggcgggaagggaacatacagtatctgttcctggaatattgctccggcggagagctcttcgacagaattgagcctgacattggaatgccagaaccagatgcccaacggttttttcaccagctaatggcaggcgtcgtatatttgcatggcattggcataactcaccgcgacatcaagcccgaaaacctgttattggacgagcgggataatctcaagatcagtgacttcgggttggctacagtgtttaggtataataaccgagagcgcttattaaataaaatgtgcggtacctag

SEQ ID NO: 23515 - DNA, 615 bp, synthetic construct
  misc_feature 1..615: note = Description of Artificial Sequence: Synthetic coding sequence
  source 1..615: mol_type = other DNA
atggccgtgcccttcgtggaggactgggacctggtgcagaccctgggagaaggagcatacggcgaggtgcagctcgccgtcaaccgtgtcacagaggaagctgtggctgtgaagatcgtggatatgaaacgggcagtggattgcccagagaacattaagaaagaaatctgcattaataaaatgctgaatcatgagaacgttgtcaaattttacgggcatcggcgcgagggaaatatccagtatctgtttctggagtattgctcggggggcgagctcttcgaccggattgagcccgacatcggcatgccagagcctgatgcccaacggttctttcatcagcttatggccggcgttgtttatcttcacggcattgggattacgcatcgcgacattaagccagagaaccttctcctagacgaacgggataatctgaagattagcgactttggcctggcaaccgtgttccgatataataacagagaaagactattaaataaaatgtgtggtacgttgccttacgtggccccagaactgttgaaacggcgggaatttcacgcagaacccgttgatgtgtggtcttgcggaatcgtcctgactgccatgctggccgggtag

SEQ ID NO: 23516 - DNA, 129 bp, synthetic construct
  misc_feature 1..129: note = Description of Artificial Sequence: Synthetic coding sequence
  source 1..129: mol_type = other DNA
atggccgtgcccttcgtggaggactgggacctggtgcagaccctgggagagggagcgtatggcgaggtccagctggccgtgaacagagttacggaagaggcagtcgccgtaaagatagttgacatgtag

SEQ ID NO: 23517 - DNA, 1431 bp, synthetic construct
  misc_feature 1..1431: note = Description of Artificial Sequence: Synthetic coding sequence
  source 1..1431: mol_type = other DNA
atggccgtgcccttcgtggaggactgggacctggtgcagaccctgggagagggggcttacggtgaggtccaattagctgtcaacagggtcaccgaggaggcagttgcagtgaagatagtggatatgaaacgcgccgtggattgtcctgaaaacattaagaaagaaatttgtattaacaagatgctgaatcacgaaaacgtggtgaaattttacggacataggagggaggggaacattcagtatctattccttgagtattgctccggcggtgagctgttcgacaggatcgaaccagacatcggcatgcccgaacctgacgcacagagatttttccatcaactcatggctggggtggtctatctgcatggcattggcatcacccatagagatatcaaaccagagaatctactcttggatgagcgcgacaacctgaaaatctctgacttcggtttggccacagtcttccgatataacaacagggagcgcctcctgaacaagatgtgcggaactttaccatacgttgcccctgagttgctgaagaggagggagttccacgcagagcctgtggacgtgtggtcatgcgggattgtgctcacggccatgcttgcgggggagctaccctgggaccagccctcggactcatgtcaagaatacagtgactggaaagagaagaaaacctatctcaatccttggaaaaaaatcgactcagcgccactcgccctgcttcacaagattctggttgaaaacccttctgcgcgtatcaccatcccagacatcaagaaggaccggtggtataacaagccgctgaaaaagggcgccaagaggccacgggtgacctcagggggagtctctgaaagcccttcagggtttagcaagcatattcagagtaatcttgatttcagtccagttaactccgcttcttcagaggagaacgttaagtactcaagctcacagcccgagcccagaacgggcctcagtctgtgggacacctctccttcgtacattgacaagcttgtgcagggcatctctttctctcagccaacttgccccgatcacatgcttttgaacagccagctcctgggaactcccggaagctcccagaatccctggcagcgactcgtgaaaaggatgacaaggttttttactaaattagatgccgacaagtcctaccaatgcctgaaggaaacctgtgagaagctgggttaccagtggaaaaagtcttgcatgaaccaggtcaccatcagcacaaccgaccgccgaaacaataaactcatattcaaagtgaatctgctcgagatggatgacaagatcctggttgactttaggctctccaaaggagatggattagaatttaagaggcatttcctaaagattaaggggaagctcatcgatattgtgagcagccaaaagatttggctgcctgccacctag

SEQ ID NO: 23518 - DNA, 384 bp, synthetic construct
  misc_feature 1..384: note = Description of Artificial Sequence: Synthetic coding sequence
  source 1..384: mol_type = other DNA
atggccgtgcccttcgtggaggactgggacctggtgcagaccctgggcgagggggcctacggtgaggtccagcttgctgtgaatcgggtgactgaggaggccgtagctgtgaaaatcgtcgacatgaaacgcgccgtggactgtcccgaaaatattaagaaagaaatctgcataaacaagatgctgaatcacgagaacgtggtaaagttctatggacataggcgcgagggaaacattcagtatttgttcctcgagtattgcagtggcggagagctctttgaccgcattgaaccggatattggcatgccagaacccgacgcccaacgatttttccaccagctcatggccggcgtggtgtacctccatgggattgggattacatag

SEQ ID NO: 23519 - DNA, 1329 bp, synthetic construct
  misc_feature 1..1329: note = Description of Artificial Sequence: Synthetic coding sequence
  source 1..1329: mol_type = other DNA
atggccgtgcccttcgtggaggactgggacctggtgcagaccctgggtgagggagcctacggagaggtccagctggctgtgaaccgcgtgactgaggaggccgtggcggttaaaattgtcgacatgaagagggccgtggattgcccagaaaacatcaagaaggagatatgcattaacaaaatgctgaatcatgagaacgttgttaagttttatggacaccgcagagaaggcaacattcagtacctgtttttagaatattgttctggaggcgagctgttcgatagaattgaaccggatatcggaatgcctgaaccggacgcccagcgctttttccatcagcttatggccggcgtggtgtacctgcacggcattgggatcactcaccgagatattaaacccgagaatttactccttgatgaacgggataaccttaagatctcagattttggactggcaacagtctttagatacaacaatagagaaagactgctgaacaaaatgtgtggcaccctgccctatgtggcacccgaactgctaaagagaagagagtttcacgccgagcctgtggatgtatggtcctgcgggattgtgctaacagccatgttggccggggaattgccctgggatcagccatcagactcttgccaggagtatagcgattggaaagagaagaagacttatctcaacccttggaagaagatcgactccgccccactagccctccttcataaaattctggtcgagaatccttccgcgagaatcactatccccgatataaaaaaggaccgttggtataataagccactcaagaagggagctaaacgccctcgcgtaacatctggtggcgtgtccgaatctccttcaggcttttcaaaacacattcagtcgaacttagatttttctccagtgaacagcgctagctccgaagagaacgtaaagtattctagctctcagccggagccgagaacaggactaagcctctgggacacctcgccgagctatattgacaaactggtgcagggcatcagtttttctcagcccacgtgcccagaccatatgctcctcaatagtcagctgctgggtacacccggcagtagccagaacccttggcaaaggctggtgaagagaatgacacgattctttaccaaattagatgcagacaagagttaccaatgcctgaaagagacttgcgaaaaacttggctaccagtggaagaagagctgcatgaaccagggagacggcttggaatttaaaagacatttcttgaaaataaagggcaagcttattgatatcgtcagctcccagaagatttggctgccagctacatag

SEQ ID NO: 23520 - DNA, 1632 bp, synthetic construct
  misc_feature 1..1632: note = Description of Artificial Sequence: Synthetic coding sequence
  source 1..1632: mol_type = other DNA
atgagccgggagagcgacgtggaggcccagcagagccacggcagcagtgcatgttcacagcctcatgggagcgttacacagagccagggaagcagctcacagtctcagggcatatcaagtagctccacttccacaatgcctaattcgtcccaatcatctcactctagttctgggacactttccagccttgagacggttagcacacaagaattgtattctatcccggaggatcaggagcccgaagaccaggagcctgaggagccaacgcctgcgccttgggcccggctgtgggccctgcaggacggttttgcgaacctggaatgtgttaacgataattattggtttggacgtgataaatcttgtgagtattgcttcgacgagccccttctcaaacgcaccgataagtacaggacttactctaaaaaacattttaggattttccgggaggtgggtccgaagaattcctacatcgcgtacattgaggaccacagtgggaacggaacctttgtcaacaccgagctggtggggaaaggcaaaagaaggccactgaataacaacagcgagattgccctctctctctctaggaacaaggtcttcgtcttctttgatcttactgtcgatgatcagtccgtctaccctaaagcacttagagatgagtatatcatgagcaaaacactgggttctggcgcctgcggtgaggtaaaactcgcctttgaacggaagacttgcaaaaaagttgcgatcaagattatttctaaacgtaaattcgccataggctcggcgcgggaggccgaccctgcgctaaacgtcgaaactgaaattgaaattctcaaaaaactgaatcacccatgcattattaaaatcaagaacttcttcgatgcggaggactactacatcgtgttggaactgatggaagggggagagctgttcgacaaggtcgtggggaacaaaagactcaaagaagctacctgtaaactgtacttctatcaaatgcttttggctgtgcaatatctgcatgaaaacggtataatccaccgggatcttaaaccagaaaacgttctgctgtccagtcaggaggaggactgcttaatcaagatcaccgacttcggccacagcaaaatcctgggagaaacgagtttaatgcgaaccttgtgcggaacgcctacgtatctcgctcccgaagtgctggtcagtgtaggtactgccggttacaaccgtgcagtggattgctggagcttgggagtgatcctgttcatctgtctgagcgggtatccaccattttctgaacaccgcacccaagtgagcctgaaggaccagataacaagtggtaagtacaatttcattccagaagtctgggccgaagtaagtgagaaggccctggacttggtgaaaaagttgttagtggtagacccaaaggctaggtttacaacggaggaagctctccgtcacccttggctccaggacgaggatatgaagcggaaatttcaggatcttctgagcgaagagaacgaaagcaccgctctgccccaggtgttagctcagccctcaacatccaggaaacggcctcgggagggggaggccgaaggggcagagaccactaaacgaccggcggtatgtgcagctgtgctatag

SEQ ID NO: 23521 - DNA, 1545 bp, synthetic construct
  misc_feature 1..1545: note = Description of Artificial Sequence: Synthetic coding sequence
  source 1..1545: mol_type = other DNA
atgagccgggagagcgacgtggaggcccagcagagccacggcagcagtgcctgctcccagccccacggcagtgtgacacagtcccaggggtccagttcacagtcccagggaatttcttccagcagcacatcgactatgcctaactcttcccaatcttcccacagctctagcggaaccttgagcagcctggagacggtatccacccaagagttgtatagcatacctgaggatcaagaaccggaggaccaggaaccagaggaacccaccccagccccctgggccagactatgggcccttcaggatggcttcgctaaccttgaatgtgtgaacgataattattggtttggccgcgataagagctgtgagtactgcttcgacgaacctctcctgaagagaacagataagtatagaacctactcaaaaaaacacttcaggatcttccgagaggttggcccaaagaactcctacatcgcctacatcgaggaccacagcggcaacggaaccttcgtgaatacagaactggtgggaaagggtaaaagacgccctctgaataataacagcgaaatagccctgagcctgagtcgtaataaagtctttgttttctttgacctcacagtggatgaccagtctgtgtaccccaaagctctgcgggatgagtacataatgtccaagacgctggggagcggtgcatgtggcgaagtaaagttggcgttcgaaagaaagacctgtaaaaaggtggcgattaagatcattagcaagaggaaatttgccattggctcggcacgagaagctgacccagcactcaacgtcgagacagagatcgagatactcaaaaagcttaaccacccatgtattattaagattaagaacttcttcgatgctgaagactattatattgtcttggagctcatggaggggggggagctattcgacaaggtggttgggaacaagagacttaaggaggcaacgtgcaagctctacttttatcagatgttgctggcggttcagataacggatttcggccattccaagattcttggcgagacatctcttatgagaactctttgtggcaccccgacataccttgcccccgaggttctggtgtcagtaggcaccgccggatataaccgagccgtggactgttggagcctgggtgtgatcttgtttatttgcctcagtggctacccacccttctcagagcacagaacccaggtgtccttgaaggaccagattaccagcgggaagtacaacttcatacccgaagtctgggccgaggtgtccgagaaggccctggacctagttaaaaagcttctggttgtggatcccaaagctcggttcacaaccgaagaagccttacggcacccctggcttcaagatgaagatatgaaaagaaagtttcaagacctgctttcagaggagaatgagtcaactgctcttcctcaggtgctcgcccagccctcgaccagccgcaagcggccgagggaaggagaagccgagggagccgagacaacaaaaaggccagctgtatgcgccgccgtcttgtag

SEQ ID NO: 23522 - DNA, 681 bp, synthetic construct
  misc_feature 1..681: note = Description of Artificial Sequence: Synthetic coding sequence
  source 1..681: mol_type = other DNA
atgagccgggagagcgacgtggaggcccagcagagccacggcagctctgcttgctcacaaccccacggctcagtgacacagagtcaggggagctcaagccaatcccaaggtatttcctctagctccacatccaccatgccaaatagctctcagagctcccattcatcttccgggacactgagcagccttgagactgtgtcgactcaggaactgtatagtattcctcccgaggtgctggtcagcgtgggaacggcagggtacaaccgcgctgtggactgttggtccttgggcgtgatcttgttcatctgcttgagcggttatccccctttctctgagcataggacccaggttagcctcaaggatcagattacatccggtaaatataacttcatcccagaggtttgggccgaggtcagcgaaaaggcgctggatttggtgaaaaaactacttgtggttgacccaaaggctaggttcaccacagaagaggctctgagacacccctggctgcaggatgaggatatgaaaagaaaattccaggacctcctcagtgaggagaacgagagcacagccctcccgcaggtcctggctcagccaagtacttctcgtaaacggcccagggaaggagaagctgaaggtgccgaaaccacaaagagacccgccgtgtgtgctgccgtgctgtag

SEQ ID NO: 23523 - DNA, 492 bp, synthetic construct
  misc_feature 1..492: note = Description of Artificial Sequence: Synthetic coding sequence
  source 1..492: mol_type = other DNA
atgagccgggagagcgacgtggaggcccagcagagccacggcagctctgcatgctcacagccccacggctcggtaacccagtcccagggatcctcaagtcagagtcagggcattagcagctcttcaacatcaacaatgcctaatagttctcagtcgagccattcttcaagtggaaccctatccagtctcgaaactgtgagcactcaggagctgtacagtatacctgaggaccaggagcctgaggaccaagagcctgaggaacctacccccgctccttgggccaggctctgggcgctgcaggatggtttcgccaatcttggtgacgaagatatgaagcgaaaatttcaggacctgctgagtgaagaaaatgagtctaccgccctgccccaagtactggcccagccttcaactagccggaaaaggccccgagaaggcgaggccgagggcgcagaaacaacaaagcgtccggccgtgtgtgccgctgtgttgtag

SEQ ID NO: 23524 - DNA, 870 bp, synthetic construct
  misc_feature 1..870: note = Description of Artificial Sequence: Synthetic coding sequence
  source 1..870: mol_type = other DNA
atgagccgggagagcgacgtggaggcccagcagagccacggcagctcggcgtgttctcaaccacatgggtctgtaacgcagagtcagggtagtagtagccagtcccaggggatcagtagttcctctaccagcacaatgcctaattcgagccagtccagtcactccagtagcggtacactgtccagcttggaaactgtgtcgacccaagagctctatagcatacctgaggatcaggagccagaggatcaagaaccggaggagccgacgcctgccccgtgggcccggctgtgggcgctgcaggacgggtttgcgaacctggaatgtgtaaatgacaattactggttcggacgcgataaatcctgcgagtactgcttcgacgaacctttgctgaaaaggacagacaaataccgcacatattctaaaaagcacttcaggatcttccgggaggtcggtcccaaaaatagctacatcgcctatattgaagaccatagcggcaatgggacttttgtgaatacagaattggttggcaaaggtaaacggagaccgctgaataacaattcagaaatcgccctgtcactgtctaggaataaagtattcgtgttcttcgacctgactgtggacgaccagagcgtgtaccccaaagccttgcgggatgaatacatcatgtctaaaaccctcggctctggcgcctgcggtgaggtgaagttggccttcgagcgcaagacctgtaagaaagtggcgatcaaaattatctcgaagaggaagttcgctattggtagcgcacgagaggccgatcctgccctgaatgttgagactgaaatagaaatcctgaaaaaattgaatcacgatggaagaggtagagccgtctag

SEQ ID NO: 23525 - DNA, 1359 bp, synthetic construct
  misc_feature 1..1359: note = Description of Artificial Sequence: Synthetic coding sequence
  source 1..1359: mol_type = other DNA
atgagccgggagagcgacgtggaggcccagcagagccacggcagcagcgcgtgctctcaacctcatggctccgtcacccagagtcaaggttccagctcccaaagccaaggtatcagttcctcatctacctcaacaatgccaaacagctcacaatcaagccatagcagctccggaacactgagctctctggagacagtctccacgcaggaactttactctatacctgaagaccaggaacccgaggatcaggaaccagaggaaccgaccccagctccttgggcgcgactttgggctctgcaagacggatttgcaaatctggtgttcgtgttcttcgaccttacggtcgacgatcaaagcgtctacccgaaagcattaagggacgaatacatcatgtctaagaccttgggatcaggcgcctgcggggaagttaagctggcattcgagagaaagacatgtaagaaggttgccatcaagatcatatctaagaggaagtttgctattggatcagcacgcgaggccgatcccgccctcaatgttgagacagagatagaaatcctcaaaaaactgaatcacccatgtatcattaagatcaaaaactttttcgacgccgaggactattacatcgtgctggaactgatggagggaggggagctttttgacaaagtggttgggaacaagcggctgaaggaggccacttgcaaactgtatttctaccagatgctgctggccgtccagtatctgcatgagaacggcattatccacagggacctaaaaccagagaatgtgctgctgtcttcccaagaggaggactgcctgattaaaattactgacttcggtcattccaagattttgggtgaaactagcctcatgcggactctgtgtgggacacccacgtatctggccccagaggtgttggtgtctgtcgggactgccggatacaatagagcggtggactgttggtcgctgggcgtgatcttgtttatttgtctgagtggatatccaccctttagcgagcatagaacccaggtgagccttaaggaccagattactagcggcaagtataattttattcccgaagtctgggccgaagtgtctgagaaggctcttgacctggtcaaaaagctccttgtcgtagatcccaaagcccgcttcactacggaagaagctctgaggcatccctggctccaagatgaggacatgaaacggaagtttcaggatttattgtctgaagaaaatgaatccaccgccctgccccaggtcctggcacagcctagcaccagtcggaagagacctcgtgaaggcgaagcagaaggcgctgagaccaccaaaaggcctgccgtgtgtgcagctgttttgtag

SEQ ID NO: 23526 - DNA, 1761 bp, synthetic construct
  misc_feature 1..1761: note = Description of Artificial Sequence: Synthetic coding sequence
  source 1..1761: mol_type = other DNA
atgagccgggagagcgacgtggaggcccagcagagccacggcagctccgcttgcagtcagcctcacgggtctgtgacgcagagccaggggagttcctcccagtcccaaggcatttcaagctcctcaacatcaaccatgcccaactcaagccaatcctcacatagttccagtggaaccctttcatctctggagactgtgtctacacaggaattatactctattcccgaggaccaggagcctgaggatcaagaaccggaggaacccacacccgcaccatgggccaggctctgggctctgcaagatggattcgccaacctcgaaaccgaatctggtcacgtgactcagagcgacctggagctgctcttaagcagtgaccctcccgcttccgcgagccaatctgccggcatccggggtgtcagacatcatccccgccctgtttgctccctgaagtgcgtgaatgataactactggtttgggcgagataaaagctgtgagtactgctttgacgaaccacttctgaagagaacagacaagtatagaacctattctaaaaagcattttaggattttcagggaagtgggacccaagaatagctacattgcttacattgaggatcatagtggtaacggcactttcgtaaataccgagctggtggggaaagggaagaggagacccctgaataacaattctgaaatagctctttcattatctcgtaataaggtctttgtgtttttcgacctgacagtggacgaccaaagtgtgtatcctaaagccttacgggatgagtacataatgtccaaaaccctcgggagtggggcgtgcggcgaagtcaaactggcattcgagagaaagacctgtaagaaggtcgcaattaaaattatctcgaaacggaagtttgctatcggcagtgccagggaggctgatccggcactgaatgtggagaccgaaatcgagattttgaagaagctcaatcacccatgcatcatcaagatcaagaatttcttcgatgccgaggattattacatcgtgctggagctgatggaaggaggagaactgtttgataaagttgtcggtaataagcgcctgaaagaggccacgtgcaaattgtatttttaccaaatgttactggcagtgcagtatctccacgagaacggcattatccatagagacctcaaacccgaaaacgtactgctctctagtcaggaggaggattgcctgataaagatcaccgatttcggtcatagcaaaattttaggtgagacatctttaatgcggacgctgtgcggcactcctacttatctggcacctgaagtccttgtgtccgtaggcactgcagggtacaatcgcgccgtggactgctggtcgctaggcgtcatactgtttatctgtctctcaggctacccaccattttctgagcaccgtactcaggtctcacttaaagatcagatcacgtccggcaagtataatttcattcctgaagtgtgggcagaggtgagcgaaaaggccctggacttagtgaaaaaactgcttgtggtggatcctaaagcaaggttcaccaccgaggaggcgctaagacatccttggctgcaggatgaagatatgaagcgaaagttccaggacttactgtcagaagaaaacgagtccaccgctttacctcaagtcctggctcaacccagcacgagtaggaaacgcccacgggagggagaggcagagggcgcagaaaccactaagagaccagccgtctgcgcagctgtactgtag

SEQ ID NO: 23527 - DNA, 1545 bp, synthetic construct
  misc_feature 1..1545: note = Description of Artificial Sequence: Synthetic coding sequence
  source 1..1545: mol_type = other DNA
atgagccgggagagcgacgtggaggcccagcagagccacggcagctctgcctgttcacagcctcacggatcggttacacaatcacagggatcctcaagtcagtcccagggaatcagcagcagcagcacttccacgatgcccaattcttcgcaatccagccactctagttcgggcacactgtccagtctagagaccgttagcacccaagagctctacagcattcctgaggatcaggagccagaggatcaggagcccgaagagcctacacctgccccatgggccagactctgggcgttgcaggacggcttcgcaaatctggagtgtgttaatgataattactggtttggccgcgacaaatcctgcgaatactgttttgacgagccactgctcaaacgtactgacaaatatcgaacctattccaaaaaacacttcagaatattccgcgaagtcggccccaagaactcctatattgcctacatcgaagaccactccggaaatgggaccttcgtgaatactgagctggtgggcaaagggaaacgccgacccttgaataataacagtgagatagcattaagcctcagtagaaacaaggttttcgtattctttgacctgactgtcgacgatcagagcgtgtatcctaaggccctccgcgacgaatacataatgtctaagacacttggcagtggggcttgcggagaagttaaattagcatttgaacggaagacctgtaagaaagtggctatcaagataatcagtaaaagaaaatttgccattggtagtgccagggaagcagacccagccctgaacgtcgaaaccgaaattgaaattttgaagaaactgaatcacccttgcattatcaagatcaaaaacttcttcgatgcagaagattattatatcgtcctagagctgatggaggggggagagctgttcgacaaggtggtgggcaacaagcgccttaaagaagcaacctgtaagttgtacttctatcagatgctgttggctgtgcagattacagactttggacatagcaagattctcggcgaaactagcctgatgagaacactttgtggaaccccgacatatctcgctcctgaagtcctggtctctgtgggaactgctggatacaaccgcgccgtcgattgttggagcctcggtgtcatactgttcatctgcctatccggatatcctccgttctcggaacatcgcacgcaagtctcattgaaggatcagatcacgagtggaaagtataattttattccagaggtttgggcagaagtcagtgagaaagccctcgacctcgtcaaaaaactgctagtcgtggacccaaaagccaggttcaccacggaggaggcgctccgacatccttggctgcaggatgaggacatgaaaagaaagtttcaggacctgctctcagaagagaatgaaagcacggcgctacctcaggtgcttgctcagccgtccacctcaagaaaacggcctcgggagggagaggccgaaggagccgagactacaaaaagaccagccgtttgcgctgcagtcctgtag

SEQ ID NO: 23528 - DNA, 1359 bp, synthetic construct
  misc_feature 1..1359: note = Description of Artificial Sequence: Synthetic coding sequence
  source 1..1359: mol_type = other DNA
atgagccgggagagcgacgtggaggcccagcagagccacggcagcagcgcttgctcccagccacatggaagcgtgacacaatcacaaggaagtagttcccagagccaaggtatctcatcctcttctacctctacaatgcccaatagcagtcaaagttctcactccagctcaggaactctgtcttctctggagacagtcagcacacaggaactatattctattccggaagatcaagaacccgaggaccaggagccagaggaacctacacctgccccgtgggccagactgtgggctttgcaggatgggtttgcaaacctggtgtttgtattctttgatctaactgtggatgaccagagtgtttaccctaaggcactgagggatgagtacatcatgagcaagaccctaggctctggagcctgcggggaggtcaaactggccttcgagcggaagacctgtaaaaaggtggcaataaaaattatctcaaagcgcaagttcgccattggcagtgctcgggaggccgatcctgcacttaacgtggagactgaaatcgagatacttaaaaagcttaaccatccttgcatcatcaaaatcaagaactttttcgatgctgaagactactacatcgtgctcgagctcatggagggaggcgaactcttcgataaagttgtgggaaataagagactgaaagaggccacgtgcaaattgtatttttatcagatgcttttggccgttcagtatttacatgagaacggcattatccacagagatctgaagccggagaatgttctgctgtcctcacaggaggaagactgcctgatcaagatcactgactttggccacagtaagattttaggtgaaacctccttgatgcgcactttatgtggcacaccaacatatctagcacctgaggtgctggtgtcagtcggtaccgcagggtacaatagggccgtggattgctggtctctcggggtgattctgttcatttgcctgtcaggctacccccccttctccgaacatcgcacgcaggtcagcctcaaagatcagataactagtgggaaatacaacttcattcctgaggtttgggccgaagtgagcgaaaaggcacttgatttagtcaaaaagcttctggtggttgatcctaaggccaggtttaccacagaagaggccttgagacacccctggctccaggacgaggatatgaaaagaaaatttcaggatctgctgagtgaagaaaacgaaagtaccgccctccctcaagtactggcacagccctccacgtcacgcaagcggcctagggagggagaagctgagggagccgagacaacgaaacgacctgccgtatgcgccgcagtgttatag

SEQ ID NO: 23529 - DNA, 1632 bp, synthetic construct
  misc_feature 1..1632: note = Description of Artificial Sequence: Synthetic coding sequence
  source 1..1632: mol_type = other DNA
atgagccgggagagcgacgtggaggcccagcagagccacggcagctctgcctgcagtcagccgcatggtagcgtcacgcagagtcaggggtcctcctcacagtcacaggggatctcctcatcttccacatcaacgatgcccaacagttcccagagctctcacagctccagcgggacgctctcttcactggaaacagtgtccacgcaggaactgtatagtatcccagaagatcaggaaccagaagatcaggaaccagaagagcccacgccagccccttgggccagactgtgggcactccaggatggctttgcaaacttagagtgcgttaatgataactattggttcggccgcgacaaatcctgcgaatactgcttcgacgaaccgctgctcaaacggactgataagtacaggacttactcgaagaagcactttagaatttttcgcgaggtcgggccgaaaaactcctacattgcctacatagaagaccacagcgggaacggcacctttgtcaatactgaactggtaggcaagggcaaaaggaggccactgaacaataatagcgaaatagctttgagcctctccagaaacaaagtctttgtgttcttcgatcttaccgtggacgatcagtcagtgtaccctaaggcacttcgcgatgagtacattatgtcaaaaaccctcgggagtggggcatgtggtgaggtgaagctggctttcgagcggaaaacatgtaagaaggtagccatcaagatcattagcaaacgaaaattcgcaataggtagtgcacgcgaggctgaccccgcattgaacgtggaaaccgagatcgaaattctgaaaaagttaaaccacccctgcattattaagatcaagaatttctttgacgcggaggattactatatagtattagagttgatggaaggaggcgagctattcgataaagtagtgggtaacaagaggctgaaagaagccacgtgcaagctttacttttaccagatgctcctggccgttcagtatctgcatgaaaacgggataattcatagagacttgaaacctgagaacgtactgctctccagccaggaggaggattgtctcattaaaatcaccgatttcggccacagcaaaatcctcggggagactagcctgatgaggaccctgtgtggcacgcctacctatttggcaccagaggtcttagtgtcagtgggcacagctggttataatcgggcagtggattgttggtccctaggcgtgatcctcttcatctgtctctccggctatccccccttttccgaacaccggactcaggtgtctctgaaggatcagataacttccggaaaatacaatttcatccctgaagtgtgggccgaagtgagtgagaaggctctcgacctggtaaagaagctcctcgtcgtggatccaaaagcacggttcaccaccgaagaagccttgcgacacccatggctacaggacgaagacatgaagcggaagttccaagatctgttgtcggaggagaatgagtcaactgcccttccccaagtgctagcccagcccagcacatcccggaagaggcccagagaaggcgaagcagaaggagctgagactacaaagcgacccgccgtttgtgctgctgtactatag

SEQ ID NO: 23530 - DNA, 1632 bp, synthetic construct
  misc_feature 1..1632: note = Description of Artificial Sequence: Synthetic coding sequence
  source 1..1632: mol_type = other DNA
atgagccgggagagcgacgtggaggcccagcagagccacggcagcagcgcatgttctcagccacatggctctgtaacacaatcacaaggatcaagctctcagtcacagggtatttccagcagttccacaagcactatgcctaactcaagtcagagctcccattccagctcagggaccctttcctctttagagacagtttctacccaggaactatattcaattccagaggatcaagaaccagaggaccaagagcccgaggaacctacacctgccccatgggccagactttgggcgctgcaggacggcttcgcgaatctcgaatgtgttaatgacaactactggtttggccgcgacaagtcctgtgaatactgctttgacgagccgctgctgaagcgcacagataagtaccgtacctattccaagaagcattttagaatcttccgcgaggtagggcccaagaattcttatatcgcttacatcgaagaccatagcggcaatggcacttttgttaacaccgagctcgtcggcaaagggaagcggcggccactgaataacaattctgagatcgctctcagcctgtctaggaataaggtcttcgtctttttcgacctgaccgtcgacgaccagtccgtgtaccccaaggctctgcgcgatgaatacatcatgagtaaaaccctgggtagtggggcatgcggtgaggtgaagcttgctttcgaaagaaaaacatgtaaaaaagtggctatcaagattatctccaaacggaaatttgccattggatctgctagagaagctgatcctgctctaaatgtcgaaaccgagatagagatccttaagaagcttaatcatccctgcattataaaaatcaagaacttcttcgacgccgaggattattacattgtactcgaactaatggaggggggagagcttttcgacaaggtcgtggggaacaaacgtctcaaggaggcaacctgcaagctctacttttatcagatgctgctcgccgtgcagtacctgcacgagaacggcatcatacatcgcgacctcaagcccgagaacgtcttgctgtcgagccaggaggaggattgcttgatcaagattactgacttcgggcatagcaagatccttggggagacatctctgatgaggactttgtgcggcacaccaacatacctcgcccccgaggtgttggttagcgtgggcaccgccggttataaccgtgctgtagattgctggtcccttggtgtgatccttttcatctgtttatcaggttatccccccttctccgaacatcggacgcaagtgtctctgaaggaccagatcacaagcggaaagtacaacttcattccagaagtatgggcagaggtgagcgaaaaggctttagatttagtgaagaaacttctagtcgtggatcccaaggcgcgattcacgaccgaagaagccctaagacatccttggttacaggacgaagatatgaaacggaaattccaggatctcctgtctgaggagaatgaatctaccgcactgccgcaggtgcttgctcaaccttccacatcccgcaagaggcctagagagggcgaggcagaaggcgctgagacaactaagcgtccagccgtgtgtgctgccgtcttgtag

SEQ ID NO: 23531 - DNA, 969 bp, synthetic construct
  misc_feature 1..969: note = Description of Artificial Sequence: Synthetic coding sequence
  source 1..969: mol_type = other DNA
atgagcaagaccctgggcagcggcgcctgcggcgaggtgaagctggcattcgaaagaaagacctgcaaaaaggtggcgattaagattatctcgaagcgcaagttcgctatcggcagtgctcgagaagctgacccggcccttaatgtggagacagagatagagatcctcaaaaagctcaaccacccctgtattatcaagataaaaaacttctttgatgccgaagattattacatagtgctggagctgatggaaggtggcgaactgtttgacaaggtagttggtaacaagcgtttgaaagaagccacctgcaagctctatttttatcagatgctgttggcagtccagtatctgcacgagaatgggattatccaccgggatcttaagcccgaaaatgttctgctgagtagccaagaggaagactgcctcatcaagatcacagacttcggccattctaagatccttggcgagacctccctcatgcggacattatgcggaacacccacatatctcgcacccgaggtcctggtgtcagtcggtaccgctggatataaccgtgctgttgactgttggagtcttggtgtgatcctgtttatatgcctgtcaggttacccacccttttcggagcaccgtacccaagtgagtttaaaggaccagatcacctccggcaagtacaacttcatccctgaggtttgggccgaggtctcagagaaggcccttgacctagtcaagaaactgctagtcgtggacccaaaggctaggttcaccaccgaagaggccctgagacatccctggctgcaggacgaggacatgaaacgcaagttccaagacctgctcagcgaggagaacgagagcaccgcactcccccaggtgctcgcacaaccaagtacatcccgcaaaagacccagggaaggagaagccgagggcgctgaaaccactaagagacccgctgtctgtgccgctgtcctgtag

SEQ ID NO: 23532 - DNA, 624 bp, synthetic construct
  misc_feature 1..624: note = Description of Artificial Sequence: Synthetic coding sequence
  source 1..624: mol_type = other DNA
atgagccgggagagcgacgtggaggcccagcagagccacggcagctctgcgtgttcccagccccacggttccgtgacacagtcccagggctccagcagtcagagccagggaatttcgtcgtcttctacatccaccatgcccaattcctctcagtcctctcattcatcatctgggaccttgtccagtttggagaccgtgagtacccaggagctgtactccattcctgaggaccaagaaccggaggaccaagagccagaagagcccactccagcaccctgggcccgcctatgggcactgcaagacggctttgctaatctggagtgcgtgaatgacaattactggttcggcagagataagtcttgtgagtactgtttcgacgaaccactcttgaaacgcaccgataagtatcgaacctactccaaaaagcattttagaatcttcagagaggtgggccctaaaaattcttacattgcctacatagaggaccacagcggtaacggcactttcgtcaataccgagcttgtggggaagggaaaacgtcggccccttaacaacaactctgaaatcgcactgtcactcagcaggaacaaggagaagatattgaaaatatatagtctatcgtag

SEQ ID NO: 23533 - DNA, 294 bp, synthetic construct
  misc_feature 1..294: note = Description of Artificial Sequence: Synthetic coding sequence
  source 1..294: mol_type = other DNA
atgaaggtgagcgccgccctgctgtggctgctgctgatcgccgccgctttttcaccgcagggccttgcgggacccgcatccgtccccactacctgctgttttaatttagctaaccgcaagattcctctccagcggctcgagtcatacaggaggatcaccagcggtaagtgccctcagaaggccgtgattttcaagacaaagttggcgaaggatatctgcgcagatccaaaaaagaaatgggtgcaagacagcatgaaatacctggatcagaagtcccctaccccaaagccctag

SEQ ID NO: 23534 - DNA, 1692 bp, synthetic construct
  misc_feature 1..1692: note = Description of Artificial Sequence: Synthetic coding sequence
  source 1..1692: mol_type = other DNA
atgagccggatcggcggcgccggcctgcccgccgccgccctgaccgggcccggccgattccgaatggcccgggaggaacctgcgcctgccgcgttggcggccgccgggcagcctggaggtgggcggggaggagaaagagccctgcagggccccggggtcgcgaggcgtggaaggccttctctcagtcgggcaaagcttcacgggctcagacacatgtgcgcgggacgcacagccgccggcggctcctttcagcgcagagccctctgggtgctggcgttctgtacaagttttggcctcctactttcttggagctctaatcgcctgctctactggctgagctttcctagccacacgcgagtgcaccgcgagtggagcaggcagttgcccttccccgccgtgacggtgtgcaataataatcctctgagattcccaagattgtccaaaggggacctgtattacgctggccattggctcgggcttctccttcccaaccgaactgctcggccgttggtgagcgaattacttcgcggagatgaacccagaagacagtggttccgtaagctggctgatttccgcttgttcctaccaccccgacatttcgagggcatttcggcggcttttatggatcgcctgggccatcaattggaagatatgttgctatcgtgtaaatacagaggagaactatgcggcccacataattttagttcagtgttcactaaatatggcaagtgctatatgtttaacagcggggaggatggaaagcccttgctcacaacagtaaaggggggaaccggaaatgggctcgaaatcatgctagatatccagcaagatgaatatttacctatctggggcgaaactgaggagaccacctttgaggccggggtaaaggtacagattcacagccagagcgagcctcccttcattcaagaattgggctttggggtggcccccggatttcagacattcgtcgctacccaggaacagcggctgacttatctccctccgccatggggtgaatgtaggagtagcgagatgggcctggatttctttcctgtgtacagcatcacggcttgcagaattgattgcgagacacgctacatcgtggagaactgcaactgtaggatggtccacatgcctggagacgcacccttctgtacgcctgagcagcacaaggaatgcgccgagcccgccctgggtctgctggctgaaaaggacagtaattactgcttgtgcaggacaccttgtaacctcactaggtataataaggagctgtccatggtcaagatccccagcaagacttcggcaaagtatctcgaaaagaagtttaataaaagcgaaaagtatatctctgaaaatatattggtcttggatatattcttcgaagctctcaattatgagactattgagcagaaaaaggcttacgaggtggccgctttgctgggcgatatcggaggacagatgggcctttttatcggtgcaagcattctgactatcttggagctgtttgattatatttatgagttaataaaagaaaagctactcgacttgctcgggaaagaagaagatgagggctcccacgacgaaaatgttagtacctgcgatactatgcccaaccatagcgagacaatttcccatacagtcaatgtgcccctgcagactaccttaggaactttagaagaaatcgcctgctag

SEQ ID NO: 23535 - DNA, 2328 bp, synthetic construct
  misc_feature 1..2328: note = Description of Artificial Sequence: Synthetic coding sequence
  source 1..2328: mol_type = other DNA
atggtgggccccgaggacgccggcgcctgcagcggccggaaccccaagctgctacctgtccccgcacctgaccccgtcggccaagatcggaaggtaatccgggcaactggcggatttggcggaggcgtcggggccgtggagcctcccgaagaggccgatgaagaagaggaggccgacgaggaggaggaaaccccacccagacagctgctgcagagatacctggcagctgctggcgagcagttagagcccgggctgtgttattgccctctgccggcgggacaggccggcgctccccctccatctgccgctccccggagtgatgcctgtctgctgggatcgggaagcaagcataggggagctgaggtggcagatggtcgggcacctcgccatgagggaatgacgaacggagatagcggttttctacctggccgggactgtagagacttagaagaagcccgggggttggctagagcagggggaagagagagtcgacgcagacgaccctacggtcggcttcggttggagggaccaggggacgaggatgcagatggtgcaggaagtccctccgactgggccagccctcttgaggacccccttcggagctgttgcctggtagctgctgatgcgcaggaacccgagggagctggatcagattctggcgactcccctgcatccagttgttcctcaagtgaggacagcgaacaacggggtgtgggggcaggtgggccggaagagggcgctccacctgcaaccagtgcagagagaacaaatggaggtgcagagcctaggctgggatttagcgacatccactttaactccagaaatacattccaggtgtccagagggcagtcagcccgggaccaccttccacccgctggcccacccgtgcccctccccgccgctgagcaaggcccagctggcgccagtgcccgcgcccggcgctctggcggctttgccgacttctttacaaggaatctcttccccaaacgaacgaaagagctgaagtccgtcgtccattctgcgccagggtggaaactgttcggcaaggtccctccccgcgagaacttgcaaaagactagcaagataatccagcaggagtacgaggctagaaccggaagaacctgtaaaccccccccccagagcagccgcaggaagaactttgagtttgaacctctgagcaccactgcactcatcttggaggatcggccatctaacttacctgcgaaatcagtggaagaagcactgagacaccgacaggaatacgacgagatggtagcagaggccaagaagagagagatcaaggaagcccacaagcgcaaacggatcatgaaggagcgcttcaagcaagaggagaacattgctagtgcaatggtgatttggatcaacgaaatcctccctaattgggaagtaatgcggagcacgcgaagagtgcgagagttatggtggcaggggttgcctccctctgtgaggggcaaggtttggtccctggccgtcgggaacgaactgaatatcacccccgagttatacgaaatcttcctgagcagggccaaggagaggtggaagtcattcagtgagacatcaagcgagaatgacacagaaggtgtatcagtcgcagacagagaggcctcactcgagctcatcaaacttgatatctccagaacatttccaagtctctatatcttccagaaggggggaccctatcacgatgtcctccactctatcttaggcgcctacacctgctaccgtccagatgttggatacgtgcagggtatgtcgtttatcgccgccgtcctcattctcaacctcgaggaggccgatgcgtttattgccttcgccaatcttctgaacaagccttgccagctggcattttttcgggtggatcattccatgatgttgaaatactttgccacatttgaggtgttttttgaggagaatctgtcaaagttgtttctgcacttcaagtcctacagcctgaccccggacatctatttgatagactggatcttcaccctctacagtaaatcattgcccctggacctggcctgtcgagtgtgggatgtgttctgcagggacggagaagagtttctattccgcactggtctgggcatattgagactctacgaagatatcctgctccaaatggattttatacacatagcccaattcctaaccaaattgcctgaagacatcacaagcgagaagctgttttcatgcattgctgccattcagatgcagaattcaacgaaaaaatggactcaggttttcgcttccgtgatgaaggacatcaaagagggggataaaaacagctctccggccctgaaatcctag

SEQ ID NO: 23536 - DNA, 276 bp, synthetic construct
  misc_feature 1..276: note = Description of Artificial Sequence: Synthetic coding sequence
  source 1..276: mol_type = other DNA
atgaaggtgagcgccgccgccctggccgtgatcctgatcgccaccgcactgtgtgctcccgcatccgccagcccatactcctccgatacaactccatgctgtttcgcctacatagcacgaccactcccccgggcccatattaaagaatacttctatacgagtggcaaatgttccaatccagcagtggttttcgtcactcggaagaatcggcaggtctgtgccaatccagagaaaaagtgggtgagagaatatattaattcactggaaatgtcttag

SEQ ID NO: 23537 - DNA, 276 bp, synthetic construct
  misc_feature 1..276: note = Description of Artificial Sequence: Synthetic coding sequence
  source 1..276: mol_type = other DNA
atgaaggtgagcgccgccgccctggccgtgatcctgatcgccaccgccctgtgtgctcctgcgagcgctagcccatatagctccgacacgaccccctgctgcttcgcttatatagcaaggccccttccacgcgcccatataaaggaatacttctatacctcaggaaaatgttccaatccagcggtggtgtttgtgactaggaagaatcgtcaggtatgcgccaacccagagaaaaaatgggtgcgagaatatataaactctctggagatgtcctag

SEQ ID NO: 23538 - DNA, 300 bp, synthetic construct
  misc_feature 1..300: note = Description of Artificial Sequence: Synthetic coding sequence
  source 1..300: mol_type = other DNA
atgaaggccagcgccgccctgctgtgcctgctgctgaccgccgccgcattctcacctcagggcttggcacagccagtgggaattaatacttcaacaacctgttgttacagattcattaataagaaaattcccaaacaaaggctggagagctataggcgaactacttcctcacattgcccccgcgaggccgttatctttaagaccaagctggataaggagatttgtgccgatcctacgcagaaatgggttcaggattttatgaaacacctcgacaaaaagacccagaccccaaagctctag

SEQ ID NO: 23539 - DNA, 330 bp, synthetic construct
  misc_feature 1..330: note = Description of Artificial Sequence: Synthetic coding sequence
  source 1..330: mol_type = other DNA
atgtggaagcccatgcccagccccagcaacatgaaggccagcgccgcactgttatgcctgctgttaacggcggcagcatttagcccacagggccttgcccagccagtcggcattaatacatcaacaacctgttgttaccgattcattaacaaaaagatccctaaacagcggcttgaaagctaccgacgaacaacctcgagccattgtcctcgagaagcggtgatcttcaagaccaagctggacaaggagatctgtgcggatcccactcagaagtgggtgcaggattttatgaaacatctggataagaagacccagactcccaagctctag

SEQ ID NO: 23540 - DNA, 276 bp, synthetic construct
  misc_feature 1..276: note = Description of Artificial Sequence: Synthetic coding sequence
  source 1..276: mol_type = other DNA
atgtggaagcccatgcccagccccagcaacatgaaggccagcgccgcacttctgtgcctactgctaacagctgccgcttttagccctcaggggttagcccagcctgagcgtcccaggacccatccacagtggactttcctgctggtggtcagtttacagctgggactgatcttacaacttccggccgcaacagacctatccatacgcaagtccttgtcccgagggtggcgagcaactgaagggcctcccgtcgcgaccgtgcctggcaagctgtag

SEQ ID NO: 23541 - DNA, 174 bp, synthetic construct
  misc_feature 1..174: note = Description of Artificial Sequence: Synthetic coding sequence
  source 1..174: mol_type = other DNA
atgtggaagcccatgcccagccccagcaacatgaaggccagcgccgcccttttatgtttgctgctgaccgccgccgcattttctcctcagggcctggcgcagccagccagtaggcccaattggacacgacgttcggttctcacaccccatcggtcagggagccgaacgttatag

SEQ ID NO: 23542 - DNA, 297 bp, synthetic construct
  misc_feature 1..297: note = Description of Artificial Sequence: Synthetic coding sequence
  source 1..297: mol_type = other DNA
atgaaccagaccgccatcctgatctgctgcctgatcttcctgaccctgtctggaattcaaggagtcccactcagcaggaccgttcgatgtacatgtatctcaataagtaaccagccagtgaaccccagatccctggagaagcttgagatcattcccgcatcccaattttgccctcgcgtggaaatcattgccacgatgaaaaagaaaggcgagaaaagatgcctgaacccagaatcaaaggccatcaaaaacctgctcaaggccgtctccaaggagagatccaagcggtcaccctag

SEQ ID NO: 23543 - DNA, 270 bp, synthetic construct
  misc_feature 1..270: note = Description of Artificial Sequence: Synthetic coding sequence
  source 1..270: mol_type = other DNA
atgaacgccaaggtggtggtggtgctggtgctggtgctgaccgccctgtgtctcagcgacggaaagcccgtgagtctgtcatatcgctgtccttgtagatttttcgagagtcatgtggcccgggcaaatgttaaacacctgaaaatcctgaatacccctaactgcgcactgcagatagttgcccggcttaagaacaataatcgtcaggtgtgcattgatccgaaacttaaatggatccaggagtatttggagaaagctctgaacaagtag

SEQ ID NO: 23544 - DNA, 360 bp, synthetic construct
  misc_feature 1..360: note = Description of Artificial Sequence: Synthetic coding sequence
  source 1..360: mol_type = other DNA
atgaacgccaaggtggtggtggtgctggtgctggtgctgaccgccttgtgtctgtccgatggcaaaccagtgagtctgagttatcgttgtccatgtaggttctttgagagccacgttgcccgggcaaatgtcaagcatctcaaaatcttaaatacaccaaattgtgctctccagatagtcgccagacttaagaacaacaacaggcaagtatgtattgatccaaagctgaaatggatccaggaatacctggaaaaggccctgaacaagggcaggagggaagagaaagtgggcaagaaagagaagattggaaagaaaaaacgacagaagaagcgcaaagcagcacagaagaggaagaactag

SEQ ID NO: 23545 - DNA, 282 bp, synthetic construct
  misc_feature 1..282: note = Description of Artificial Sequence: Synthetic coding sequence
  source 1..282: mol_type = other DNA
atgaacgccaaggtggtggtggtgctggtgctggtgctgaccgccctctgtctgtcggatggcaagcctgtgtcactcagctaccgctgtccctgtcgcttctttgaatctcatgttgccagggcaaatgtcaaacaccttaagatactcaacactcctaactgtgcgctgcaaatagtggctcgtcttaagaacaacaatcggcaggtctgcattgatccgaagctgaagtggatacaggagtatcttgagaaggccctcaataaacggttcaaaatgtag

SEQ ID NO: 23546 - DNA, 423 bp, synthetic construct
  misc_feature 1..423: note = Description of Artificial Sequence: Synthetic coding sequence
  source 1..423: mol_type = other DNA
atgaacgccaaggtggtggtggtgctggtgctggtgctgaccgccctgtgcctgagtgacgggaaaccggtcagtctctcttataggtgcccctgtagatttttcgaaagtcatgtggctcgggcgaatgttaaacatttaaaaatcttaaacactcccaactgtgctctccagatcgtagcccgcttaaagaacaacaaccggcaggtctgcatcgaccctaagctcaagtggattcaggaataccttgagaaagctctcaacaatttaatctccgcagctcccgcaggaaagagggtcatagccggagctagagcgctgcatccaagtccgccacgcgcctgccctacagccagggccctgtgcgaaattagattgtggcctccgcctgagtggtcctggccatcaccgggcgacgtgtag

SEQ ID NO: 23547 - DNA, 273 bp, synthetic construct
  misc_feature 1..273: note = Description of Artificial Sequence: Synthetic coding sequence
  source 1..273: mol_type = other DNA
atgaacgccaaggtggtggtggtgctggtgctggtgctgaccgccttatgcctgtccgatggtaagcccgtaagtctgtcatatcgctgtccctgtagattctttgaatcccacgtagcccgggccaacgtgaagcatcttaagatcctcaatacaccaaattgtgctctccagatcgtggctaggctgaaaaataacaaccgccaggtttgcatcgaccctaagcttaagtggatccaagaataccttgagaaggcactgaacaactgctag

SEQ ID NO: 23548 - DNA, 330 bp, synthetic construct
  misc_feature 1..330: note = Description of Artificial Sequence: Synthetic coding sequence
  source 1..330: mol_type = other DNA
atgaagttcatcagcaccagcctgctgctgatgctgctggtgagctcactgtcccccgtccagggggtgctggaagtttactacacttcgctgcggtgtaggtgcgttcaggagtcctcggtgtttattcctcggagattcatcgatcgaatccaaatactgccacgaggtaatggctgcccccggaaggaaataattgtctggaagaagaacaaatctattgtgtgcgtggatcctcaagcagagtggatacagcgcatgatggaggttctgcggaagcggtcttccagtacgctaccagtgcccgttttcaaaagaaagatcccctag

SEQ ID NO: 23549 - DNA, 1560 bp, synthetic construct
  misc_feature 1..1560: note = Description of Artificial Sequence: Synthetic coding sequence
  source 1..1560: mol_type = other DNA
atgttcctgctgcccctgcccgccgccggccgggtggtggtgcggagactggccgtgcgacgctttggatctagatcactctcaactgctgatatgactaaggggcttgtgctcggaatttactccaaggagaaagaggacgatgttcctcagttcacaagcgccggcgaaaacttcgataagcttttagcgggtaaactccgggaaactctgaatataagtggaccgccattgaaggccggcaaaaccagaacgttctacggtctccatcaggatttcccttctgtggtccttgtcgggcttggcaaaaaagcagccggcatcgacgaacaggagaactggcacgaaggtaaagagaacatcagagccgcagtggccgctgggtgtcggcagatccaggacctggaactttcatcagtggaagtggatccctgcggggatgcacaagcggcagctgagggcgcggtgcttggcctctacgagtacgatgacttaaagcagaaaaaaaagatggccgtgtctgctaaactatatggaagcggagatcaggaagcctggcagaagggcgtgctctttgcttcaggacagaacctcgccaggcagttgatggagacccccgctaacgagatgacgcctacccgctttgcggaaataatcgagaagaatttaaaatccgcaagctctaaaaccgaggtacatattcgcccaaagagctggatcgaagagcaggctatgggttccttcttaagcgtggcaaagggatcagacgagccacctgtgttcctcgagatccactacaaagggtcaccgaatgcaaacgaacccccgcttgtcttcgtgggtaagggaataacgtttgactccggtggtatcagcataaaagctagcgccaacatggatctgatgagggcggatatgggaggcgctgctaccatttgctccgccatagtctctgcggcgaagctgaatctgccaattaatatcattggactggctcccctgtgcgaaaacatgcccagcggcaaagcaaacaagcctggcgatgttgttagagctaaaaacgggaagacgatccaggtagacaacaccgacgcagaaggaagactaatattggctgatgctctgtgttatgctcacacttttaaccccaaggtgattctcaacgcggcgaccctgaccggtgcaatggatgtagcactgggttctggcgccacaggcgtcttcactaacagttcctggctgtggaacaaactgttcgaagcctcaatcgagacaggagatcgggtctggagaatgcccctgtttgagcactatacgcgccaggttgtagactgccagttggctgacgttaacaatattgggaaataccggagtgcgggagcgtgcacagccgctgctttcctcaaggagttcgtgacacacccaaaatgggcacacttggacatcgctggggttatgacaaataaagacgaagtgccatatctgcggaaagggatgaccgggcgacccacccgcacattgatcgaatttctgttgcgcttttctcaagacaacgcatag

SEQ ID NO: 23550 - DNA, 378 bp, synthetic construct
  misc_feature 1..378: note = Description of Artificial Sequence: Synthetic coding sequence
  source 1..378: mol_type = other DNA
atgaagaagagcggcgtgctgttcctgctgggcatcatcctgctggtgcttatcggggtgcagggaacgcccgtcgtgcgcaagggcagatgttcgtgcatctcaaccaaccaagggacgatacacctgcagagcctgaaagatctgaagcaatttgctccctccccttcctgcgaaaagatagaaataatagcgaccctaaaaaatggagttcagacatgtctcaatcctgactctgcagacgtgaaggagctgatcaagaaatgggaaaaacaggtctctcagaagaaaaaacagaagaacggaaaaaagcatcagaaaaagaaggtgctgaaagtgcggaaaagccaacgctcccgacagaaaaaaactacttag

SEQ ID NO: 23551 - DNA, 1083 bp, synthetic construct
  misc_feature 1..1083: note = Description of Artificial Sequence: Synthetic coding sequence
  source 1..1083: mol_type = other DNA
atggaggacttcaacatggagagcgacagcttcgaggacttctggaagggtgaggatctatctaactacagttactcctcgacccttccaccattcctattagacgctgctccgtgcgaacccgagtcgctggagattaacaaatacttcgtcgtcatcatatatgcactggtatttctcctgtctctgctcggaaatagtttagtgatgctggtcatcctgtactctagggtcggacggtccgttaccgacgtatatttactgaacctggctctggctgatttgctgttcgccttgacactaccaatctgggctgcctctaaggtgaatggctggatcttcggtacattcctgtgcaaggtggtgagcctccttaaagaggtgaacttctacagcggaattctgctgttagcctgtatctcagttgataggtatctcgccattgtgcatgccacacggacccttactcagaagaggtacctcgttaagtttatttgtctgagtatctggggcctttcccttttgctcgccctacctgtgcttctcttcagacgcaccgtctattcttctaatgtatcacctgcatgttacgaggacatgggcaacaatacggccaattggcgtatgttgttgcgaattctcccgcagtcttttggattcattgttccgctgcttatcatgctgttttgctacggattcactctgcggaccttgtttaaagcccacatgggacaaaaacaccgcgcaatgagggttatctttgccgtggtgttgatctttcttttgtgttggctaccatacaatctcgtcttacttgcagacaccctcatgcgcacccaggtaattcaagagacatgcgaaagaaggaaccatatagatagagctctggatgcaactgaaattttaggcatcttgcactcgtgcctgaacccattaatttacgccttcatcggtcaaaaatttagacatggactgctcaagattctggctatacacggcctgatttcaaaggattcccttccaaaagactcacgcccctctttcgtcggttcctcttccggtcacacatcaactactctttag

SEQ ID NO: 23552 - DNA, 417 bp, synthetic construct
  misc_feature 1..417: note = Description of Artificial Sequence: Synthetic coding sequence
  source 1..417: mol_type = other DNA
atggaggacttcaacatggagagcgacagcttcgaggacttctggaaaggagaagatctgtcgaactactcatactcatctacactgcctcccttcttgctcgacgcagccccctgcgaacctgagtccctcgagattaacaagtatttcgtggtcattatttatgcgctagtgttcttgctgtccctgctgggaaattctctcgttatgctcgtaatcctgtactcacgcgtcggccggtccgtgacagacgtctatttgctgaacttggcactagcagacctcctattcgctttgaccctgcctatctgggccgccagcaaggtcaacggctggatctttggtacattcctgtgcaaagtcgtttctttattgaaggaagtcaatttttacagcggcatactgttacttgcctag

SEQ ID NO: 23553 - DNA, 48 bp, synthetic construct; identical to SEQ ID NO: 10089
  misc_feature 1..48: note = Description of Artificial Sequence: Synthetic coding sequence
  source 1..48: mol_type = other DNA

SEQ ID NO: 23554 - DNA, 519 bp, synthetic construct
  misc_feature 1..519: note = Description of Artificial Sequence: Synthetic coding sequence
  source 1..519: mol_type = other DNA
atggaggacttcaacatggagagcgacagcttcgaggacttctggaaaggggaagaccttagtaattattcctatagttccacccttccaccattcctgctcgacgcagctccctgcgaacccgagtccctcgagatcaacaaatactttgtagtaataatatacgctctggtgttcttgctctccctgctgggcaatagcttggtgatgttggtcatcctctacagcagagtgggacggtccgttacggatgtgtatctcctgaaccttgctttggccgatctacttttcgcactgaccctgccaatttgggctgctagtaaggttaatggatggatctttggaacgttcctgtgcaaggtagtgtctctcctaaaagaggtcaatttttattcaggaattctgctgctggcctgcataagcgtcgatcgatatttagctattgtgcacgcgacaaggaccctgacacaaaagcgctatctcgtgaaattcatatgtctgagtatctggggtctgtag

SEQ ID NO: 23555 - DNA, 48 bp, synthetic construct; identical to SEQ ID NO: 10089
  misc_feature 1..48: note = Description of Artificial Sequence: Synthetic coding sequence
  source 1..48: mol_type = other DNA

SEQ ID NO: 23556 - DNA, 606 bp, synthetic construct
  misc_feature 1..606: note = Description of Artificial Sequence: Synthetic coding sequence
  source 1..606: mol_type = other DNA
atggaggacttcaacatggagagcgacagcttcgaggacttctggaagggagaggatttgtccaactactcatattcgagcaccttacctcctttcctattggacgccgctccatgcgaaccggagagccttgaaattaataaatactttgtcgtgatcatctatgccctggttttcttacttagcctcttaggcaatagtcttgtcatgctcgtgattttatactcaagggtagggcggtcagtgactgatgtgtatctcctgaaccttgcactggccgatctcctgttcgccctgactctaccaatctgggccgcatcaaaggtgaatggttggatttttgggacattcctctgtaaggtggtttctctgctgaaagaggtgaacttctacagtggcatcctactgctggcctgcattagtgtcgacagataccttgccatcgttcacgctacgaggacactgacccagaaacgctacctcgtgaaatttatctgcttgtcgatttggggactgtccctgcttcttgcgttgcccgtgctgctgtttcgaaggacagtgtacagctcaaacgtgagtcctgcttgttacgaggacatggggtag

SEQ ID NO: 23557 - DNA, 411 bp, synthetic construct
  misc_feature 1..411: note = Description of Artificial Sequence: Synthetic coding sequence
  source 1..411: mol_type = other DNA
atggaggacttcaacatggagagcgacagcttcgaggacttctggaagggggaggacctttctaattattcttatagctctacgctgccaccattcttgctagatgccgctccatgtgaacctgaatccctggagataaacaagtatttcgtggtgatcatctacgcgctggtgttcctgctatcgctgctcggcaactcactcgtgatgctggtcattctgtactcacgtgtgggcagaagtgtgacagatgtctatctgctgaaccttgcactggctgatctgcttttcgcactcacattgcccatctgggcagccagtaaggttaacggatggatcttcggtaccttcctatgcaaagtggtctcccttctgaaagaagtgaatttctactcaggcatattgctgtag

SEQ ID NO: 23558 - DNA, 1059 bp, synthetic construct
  misc_feature 1..1059: note = Description of Artificial Sequence: Synthetic coding sequence
  source 1..1059: mol_type = other DNA
atggagggcatcagcatctacaccagcgacaactacaccgaggagatgggcagcggggattatgactccatgaaagaaccttgctttcgagaggagaacgctaatttcaataaaatcttcctgcctaccatttattccattatcttcctgacaggcatcgttggcaacggacttgtgatccttgtgatgggctatcagaaaaagttgagaagcatgaccgataagtacaggctgcacctttctgtggccgacctcttatttgttatcaccctccccttctgggccgtcgacgccgtagctaattggtatttcggcaattttctgtgcaaggccgttcacgttatttacacggtcaatctttacagtagcgtcctcattctggctttcatttccttagaccgctacttggccattgtgcacgccactaatagtcagagacctcgcaaactactcgcagaaaaagtcgtgtacgtgggagtatggattcccgccctgctgcttaccatacctgattttatctttgctaatgtgtcagaggccgacgataggtacatctgcgaccgcttctaccccaatgatctgtgggtggtagtgtttcagttccagcatatcatggtcggactgatcctgccaggcatcgtaattctaagttgctattgcattatcatatctaaactgtctcactccaaaggacaccagaagcggaaagcgttgaaaactacagtgatactcatactggcttttttcgcttgctggctgccatattatatcggaatctcgatcgacagttttatcctccttgaaattatcaagcagggctgcgaattcgaaaataccgtgcataaatggattagcattacagaggccctggcctttttccactgctgcctgaatcctatcctgtatgcattcctgggagccaaattcaagacaagcgcacagcacgctctcactagcgtcagcagaggttcaagcctaaagatactgagcaagggcaagagaggagggcatagttctgttagcacggagagcgagtcgtctagcttccattccagttag

SEQ ID NO: 23559 - DNA, 1071 bp, synthetic construct
  misc_feature 1..1071: note = Description of Artificial Sequence: Synthetic coding sequence
  source 1..1071: mol_type = other DNA
atgagcatccccctgcccctgctgcagatctacaccagcgacaactacactgaggaaatgggttctggggactacgactccatgaaggagccatgctttcgcgaggagaacgccaacttcaacaagatctttctccccacgatctactcaattattttcctcacggggatcgtcgggaatggccttgttattttagtgatgggctaccaaaagaaacttcgtagcatgacggacaaataccgtctacatctgagtgtggcagacctcctattcgtgatcaccttgcccttttgggcggtagatgcagtggccaactggtacttcggaaactttctgtgtaaggccgtacacgtaatttatactgtgaacttatattcctctgtccttattctggcatttatctccctcgatagatacctggccatcgtgcatgcaacaaacagccagaggccaaggaagctgctcgcggaaaaagttgtctacgtcggagtttggatacccgccctgcttctaaccatccccgacttcatattcgccaacgtctccgaggccgatgaccgatatatctgcgacagattctatccaaatgacctgtgggtggtagtgttccagttccagcacattatggttggactcatactgccgggcatcgttatccttagttgttattgcataattatttcaaagctgtctcattcaaagggacatcagaagcggaaagctctcaagaccactgtcatattgattctcgcctttttcgcgtgctggctgccatactacatcggcataagcattgactcgttcatcttacttgagataataaagcaaggctgcgaatttgagaataccgtgcataagtggatttcaattactgaagctttggccttcttccactgttgcctcaaccccattttgtatgccttccttggcgccaagtttaaaacgtccgcacagcacgcattgaccagtgtaagccgcggaagttccttgaagatattgtcaaaaggcaaacgcgggggccatagttccgtatctaccgaaagcgaatctagcagttttcactcttcttag

SEQ ID NO: 23560 - DNA, 669 bp, synthetic construct
  misc_feature 1..669: note = Description of Artificial Sequence: Synthetic coding sequence
  source 1..669: mol_type = other DNA
atgccctggcagaccggcaccctgggcaccagctacgcccggcagtccatgagctccacacagagtacctccaccgccgtgtcaagtagctggatcccagccctcctcctgacaatccctgactttatctttgctaatgtgtcagaggccgacgaccgatacatatgcgacaggttttatcccaacgatctatgggtggtcgttttccagtttcaacatattatggtgggtcttattctgccaggaattgtgatcctgagttgctactgcattataatctctaagctatcccactccaagggccaccagaagcgcaaagcgctgaagacaacggttattctaatcctggcttttttcgcttgctggcttccctactacattggcatcagcatagattcattcatactgctcgagatcatcaagcaaggctgtgagtttgagaatacagtacacaaatggatctctattacagaggccttggccttctttcactgctgcctcaatccaattctgtacgccttccttggagctaaattcaaaacgtctgcccagcacgcccttacctccgtcagccgtggttcatctttaaaaatactctcaaagggcaaaagaggtgggcattcttccgtgtcaacagagagcgaatccagctcctttcactcctcttag

SEQ ID NO: 23561 - DNA, 2832 bp, synthetic construct
  misc_feature 1..2832: note = Description of Artificial Sequence: Synthetic coding sequence
  source 1..2832: mol_type = other DNA
atgacccagcggagcatcgccggccccatctgcaacctgaagttcgtcaccctcctggtcgccctgtcttccgaactgccctttctcggtgcgggcgtgcaacttcaagataatggttataacgggctcttaatcgccattaatccccaagtgcctgagaatcagaatctcatatcaaatatcaaggaaatgatcacagaggcatccttctatctcttcaacgcgacgaagcggcgtgtcttcttcagaaacatcaaaattttgattcccgccacctggaaggccaataacaacagcaaaatcaaacaggaatcttatgagaaagccaacgtaattgtgactgattggtatggagcccacggcgacgacccttacacattgcaatatcggggatgcggcaaagaaggtaagtatatacacttcacccctaatttcctgctgaatgacaatctaaccgctggatacggatccagagggagggtcttcgtacatgagtgggcccacctacggtggggcgtgttcgacgaatataacaacgacaaaccattctatattaatggacagaaccaaatcaaggtgacaaggtgcagtagtgatatcactggaattttcgtgtgcgaaaagggcccatgtccacaggagaattgcataatttctaagttgtttaaagaggggtgtacttttatatataatagcactcagaacgccacagcaagtattatgtttatgcaaagtctgtcttcagtggtggaattctgtaatgccagtacccacaaccaagaggctcccaatttgcagaaccagatgtgcagtctgcggtccgcgtgggacgtcattacggactctgctgactttcaccattcctttcccatgaatggcacggagctaccgccacccccaaccttcagcctggtgcaggcgggcgataaagttgtgtgcctggttttggatgtgtcatctaagatggcagaagcagatagattgctgcagctgcaacaggcagccgagttttacctaatgcagatagtggaaatccacacttttgtgggcattgcttcctttgattctaagggggaaattcgggcacagctccatcaaatcaattctaacgacgatcgtaaactccttgttagctatctgcctacaaccgtaagtgccaagacagatatttccatttgtagcggactgaaaaagggattcgaggtggtagagaaactgaacggcaaggcctatggctctgtgatgattcttgtgacttccggggacgataaacttctcgggaactgtttgccaactgtcctgagcagtggcagtacaatccacagcatcgccttgggatcttccgcagccccaaatcttgaagaactttcgcgcctcactggaggactgaaattcttcgtgccagacatctccaatagcaactctatgatagatgctttcagccgaatcagttcagggaccggcgatatcttccagcaacacatccagctcgagtcgaccggagaaaatgtcaagccacaccaccaattgaagaacactgttacagtggataatacagtcgggaatgacacaatgtttctggtaacctggcaagcctctggaccaccggaaattattctttttgatccggacggccgaaagtactatacaaataacttcattactaacctgacttttcgcacagcttccctgtggatcccgggcaccgccaagcccggacattggacctacacacttaataacacccaccatagcttgcaggctttgaaagtgacagtgaccagcagagcatctaatagtgccgttccgcccgcaacagtggaggctttcgtcgaacgggattccctacattttcctcacccagtaatgatttacgctaatgtcaaacaggggttttatccaatccttaacgccacggttacggctacagtcgaaccggagaccggcgacccagtaaccctccggctgttagacgatggggcgggtgccgacgtcatcaagaacgacggaatttattcacgctatttcttttctttcgccgccaatggcagatattctctgaaagtgcatgtcaaccactcccccagcatctcaaccccagctcacagtatccccggatcccacgccatgtacgtgccgggctacaccgcaaacggcaacattcaaatgaatgccccacggaaatcggtgggaaggaacgaagaagaacgaaagtgggggtttagccgggtgtcgagcggcggaagctttagcgtgctgggcgtgccagcagggccacaccccgacgtgttccctccctgtaaaatcatcgacctggaagccgtgaaggtcgaggaagaactcaccctcagttggacagctcccggcgaagattttgatcagggacaggcaacctcctatgagatccgcatgtctaagtctctacagaatatacaagacgattttaacaacgcgatcctggttaatacctcaaagaggaacccccaacaggccggcattagggagatcttcacattctctcctcagatctctacaaacgggcccgagcaccagcccaatggagagacacacgaatcccatcggatctacgttgccatcagggctatggatcggaatagcctgcagtctgccgtctcaaatatcgcccaggctcccctcttcattccacctaattctgacccagtcccagcccgcgactaccttattctgaagggagtccttacggccatgggtttaattggcatcatctgcctgataatcgttgttacgcaccatacactgagccgaaagaaaagagcggataaaaaagagaacgggacaaaactgctatag

SEQ ID NO: 23562 - DNA, 423 bp, synthetic construct
  misc_feature 1..423: note = Description of Artificial Sequence: Synthetic coding sequence
  source 1..423: mol_type = other DNA
atgacccagcggagcatcgccggccccatctgcaacctgaagttcgtaaccctcctggtcgccctgtcatccgagttgcctttcctgggcgctggcgtccagctccaggataacggatacaacgggttgctgatcgcaatcaatccacaggtccccgaaaaccagaacttgatcagcaacataaaggagatgataacagaggcctccttttacctgtttaatgccaccaagcgtagagtgttttttcgcaacatcaagattctgattccagccacatggaaggcgaacaataattctaagattaagcaggagtcatatgaaaaggcaaatgtgattgttaccgattggtatggcgcccatggggacgatcaaggagtagagaaaagagagaataccttcatctcccatctgataagctattag

SEQ ID NO: 23563 - DNA, 1233 bp, synthetic construct
  misc_feature 1..1233: note = Description of Artificial Sequence: Synthetic coding sequence
  source 1..1233: mol_type = other DNA
atgaacgacgaggactacagcaccatctacgacaccatccagaacgaacgaacatacgaggttccagaccagccagaggaaaacgagtcccctcactacgatgacgtgcacgagtacctgcgacctgagaatgatttgtacgcgactcagttaaatactcacgagtatgacttcgtgtctgtctacactataaagggtgaggagacatcccttgcctcggtgcagtccgaggacaggggatatctgctgcccgacgagatctactcagagcttcaggaagctcatccaggcgagccacaagaggatcgggggatttccatggagggcctctactcttccacacaggatcagcagctatgcgctgcggagctgcaggagaatggctctgtgatgaaggaggatctcccctcccccagctcttttaccatccagcactccaaggctttctcaacgaccaagtatagctgctattctgacgccgaagggctggaagagaaggagggtgcccacatgaatccagaaatttacctgttcgttaaagcggggattgatggtgaaagcatagggaactgcccattttcccaaagactatttatgatcctgtggctcaaaggtgttgtgttcaatgtcactactgtcgatctcaaacgaaaacctgccgatcttcacaacctggcacctggtacccaccctcccttcctgacctttaacggcgacgtcaagaccgacgtcaacaaaatcgaggagtttctggaggagaccttaacaccagagaagtatccaaagctggcggccaaacatagggaatctaataccgcagggatcgatatattttccaagtttagcgcctatataaagaacacaaaacagcaaaataacgctgcactggaacggggtctaactaaggctctcaagaagctggacgactacctgaacacaccactgccagaggaaatcgacgccaacacctgcggggaagacaagggaagcagaaggaaattcctagatggggacgaattgaccctcgccgactgcaatctgcttccgaaactccacgttgtgaagattgtcgcgaagaagtacaggaactacgacattcccgccgaaatgacgggattgtggcgttacctgaaaaatgcctatgcccgggacgagttcacaaatacatgcgccgctgacagcgagattgaacttgcgtacgcggatgtggctaagcgcctttcccggtcctag

SEQ ID NO: 23564 - DNA, 756 bp, synthetic construct
  misc_feature 1..756: note = Description of Artificial Sequence: Synthetic coding sequence
  source 1..756: mol_type = other DNA
atgaccgacagcgccaccgccaacggcgacgaccgggaccccgagatcgagctgtttgtaaaggccggcattgacggcgagagcatcggcaactgcccattttctcaaaggttattcatgatcctgtggttaaagggagtcgtcttcaacgtgacgactgtggatcttaagcgcaagcctgccgatttacataatctggctccgggcactcacccgccttttctgacgtttaacggcgacgtaaagaccgatgtaaataagatcgaggagttcctggaagagacactcacaccggagaagtatcccaagttggcagccaaacatcgggaaagcaacaccgcaggtatcgacatttttagcaaatttagtgcctacatcaaaaatactaaacagcagaacaatgcagcccttgaacgcggattgacaaaagccctcaagaagttagacgattacttaaatactcctcttcctgaggagattgatgcgaatacttgtggggaagacaagggttcccgcagaaagtttctcgatggtgatgagctgaccctggcagattgcaatctcctgcccaagctacatgttgtgaagattgtcgctaagaaatatcgtaattacgacatcccggctgaaatgaccggattatggagatacctgaagaacgcctatgctagggacgagttcaccaatacttgtgccgccgactccgagatagagcttgcctacgcggatgtagctaagaggcttagccgctcatag

SEQ ID NO: 23565 - DNA, 618 bp, synthetic construct
  misc_feature 1..618: note = Description of Artificial Sequence: Synthetic coding sequence
  source 1..618: mol_type = other DNA
atgaccgacagcgccaccgccaacggcgacgaccgggaccccgagattgagttattcgtcaaggccgggatcgatggcgaatctattggcaactgtccctttagccaaaggctgtttatgatcctctggctgaagggcgtggtttttaatgtgactactgttgacctgaaacggaaaccagctgatttacacaacctcgcgccaggaactcaccctccctttctgactttcaacggcgatgtcaaaaccgacgtcaataagatcgaggaatttctggaggaaacactgacgcccgaaaagtacccaaagctcgccgcaaagcaccgagagtctaacacagcaggaatagatatctttagcaagttttccgcctacatcaaaaacaccaaacagcagaataacgctgcactggagcggggactcacaaaagctctgaagaagctcgatgactatcttaatacacctctgccagaagagatagatgcaaatacatgcggtgaggacaaagggagccggcgcaagttcctggacggcgatgagctgactcttgccgattgtaacttactgccgaagctgcacgttgttaaagagcaggtgcccttgaaaggcatgatttag

SEQ ID NO: 23566 - DNA, 5823 bp, synthetic construct
  misc_feature 1..5823: note = Description of Artificial Sequence: Synthetic coding sequence
  source 1..5823: mol_type = other DNA
atggccagcggcctgggcagccccagcccctgcagcgccggcagcgaagaagaggacatggatgcactgctgaacaattcattgcccccaccccacccagaaaacgaagaagacccggaggaggacctatcagagaccgagacacccaagcttaagaagaagaaaaagcctaagaagccccgggaccctaaaatccctaaatccaaacgccagaaaaaagagcgaatgctgctgtgccggcagctcggcgacagtagtggcgaaggaccagaatttgtggaggaagaggaggaggtggccctcagatcagatagtgaaggcagtgactacaccccaggaaaaaaaaaaaagaagaagctcggccctaagaaggaaaagaagtcgaaatcaaagcgtaaggaagaagaagaggaggaagacgacgacgatgattcaaaggagcctaaaagcagtgctcagctgctggaggattggggcatggaggatattgatcatgtcttctctgaggaagattatagaactctcacaaattataaggcattctcacagtttgtaaggccgctaatagccgcaaaaaatccaaagatcgcagtgagcaaaatgatgatggttctcggcgccaaatggcgcgagttcagtactaacaatcctttcaagggctcctccggcgcatccgtcgccgctgccgccgccgcggccgtcgccgttgtggaaagtatggtaaccgcaacggaggtggccccacccccaccccctgtggaagtgccgattcggaaagccaagaccaaggaaggcaagggtccgaatgcgaggagaaagccaaagggcagtcctcgcgtaccagacgcgaagaaacctaagcctaaaaaggtagcaccccttaaaatcaaattaggcggcttcggcagcaaaagaaaacgttcctctagcgaggatgatgacctggacgtggagtcggactttgatgacgcatctatcaattcgtattcggtgagtgacgggtcgacttctaggtcttcacgcagccgcaaaaaattgaggacaactaaaaagaaaaaaaaaggggaggaggaagtgacagccgtggatggttacgaaaccgaccatcaggattattgtgaagtgtgccagcagggaggagaaatcattttatgcgacacatgcccaagggcatatcatatggtctgtctggatcccgacatggaaaaggcccctgaaggcaaatggtcatgtccccactgcgaaaaagaaggcattcagtgggaagcaaaggaagataatagtgaaggagaagaaatcctggaggaagtcggcggcgatctggaagaggaagatgatcaccacatggagttttgtagagtttgcaaagatggcggcgagctgttgtgctgtgacacatgtccaagttcttatcatatccattgtcttaatccgccgctgcctgagatccctaacggagaatggctgtgtccccgttgcacctgccccgcactgaagggcaaggtgcagaagatactgatatggaagtggggacagccaccctcacccacaccagtaccaaggccgcccgacgccgacccaaatactcccagccctaagcccctcgagggcagaccagaacggcagtttttcgtgaagtggcagggaatgtcttactggcactgttcctgggtgtctgagctacagctcgagctccactgccaggtgatgttccgaaattaccagaggaagaacgacatggacgaacctccttccggggattttggaggggacgaagaaaaatcccgcaaaaggaagaataaagaccccaaattcgctgagatggaggagcggttctaccgctacggcattaagccggaatggatgatgattcataggatattgaaccattctgttgacaaaaaaggccacgtgcactatttaatcaagtggagggatcttccatatgaccaggcctcttgggagtccgaagacgtggagattcaggattacgacttgtttaagcaaagctattggaaccaccgcgagctcatgcggggggaggagggtcgccccggtaagaagctaaagaaggtcaagttaagaaaattagagcggccccctgaaacccccaccgtggatcccacagtgaagtacgagagacagcccgagtacttagatgccacaggcggaacactgcatccttatcagatggaggggctgaactggctgcgattttcctgggctcagggaactgatactatactggctgatgaaatgggcctggggaagaccgtgcaaaccgcggtgtttctttactccttgtataaggagggccattccaagggccccttccttgttagtgcacccctgtctaccatcattaactgggagcgcgagttcgaaatgtgggcgcctgacatgtatgtggtcacatacgtgggcgacaaagacagtagagctatcatccgcgaaaatgaattttcttttgaagataacgctattagaggaggtaagaaagcgagccggatgaagaaagaagcctctgtgaaatttcatgttctactcacatcctatgagctcattaccatagatatggcaattctcggatccattgattgggcgtgcctcatcgtggacgaagcccatagacttaaaaataaccagagcaagttctttcgagtcctgaacggttactcgttacaacacaagctcctcctgaccgggactccactccagaacaatttggaagaactcttccatttgctgaacttcttgacacctgaacggtttcataatctggagggtttcctggaggaatttgccgatatcgcaaaggaagaccagattaagaagttgcatgacatgttgggaccacacatgctgaggaggctgaaagcggacgtgttcaaaaatatgccctcaaagacagagctgattgttcgcgtcgaactgtctcccatgcagaagaaatattataagtatattttaactcgaaacttcgaggcccttaatgcccgcggcggcggcaaccaagtgtccctgttgaacgtggtcatggatctcaaaaagtgctgcaaccacccctacttgtttccagtagccgctatggaggcccccaagatgccaaatggaatgtacgacggttcagccctgattcgtgcttcaggaaagctcctgctcctgcagaagatgttgaaaaaccttaaggagggaggacacagagtcctgatctttagccagatgacaaaaatgcttgatctcctggaggactttctcgagcacgaagggtacaagtacgagagaatagacgggggtatcaccggtaatatgaggcaggaggctatagatcggttcaacgcgcctggagctcagcagttttgtttccttctgagcactcgagccggtggtctgggtataaacctagccaccgccgataccgtcatcatctacgacagcgactggaatcctcacaacgacatccaggccttctcaagagctcacagaataggccagaacaaaaaagtcatgatctaccgattcgtgactcgcgcttctgtcgaagagcgaattacacaggtagccaaaaagaagatgatgctgacccacctagtggtccgccccggcctcggatcaaagacaggatccatgagtaagcaagagctagatgacatcctgaaatttggtacggaagagctgttcaaggacgaagccactgatggcggcggagataataaagagggagaagactcgtccgttattcactacgatgataaggccattgaaagactacttgacaggaatcaggatgaaactgaagacaccgaactgcaaggaatgaacgagtacctttcaagcttcaaggttgcccagtacgtggtccgcgaagaagaaatgggggaggaagaggaggtggaacgcgagatcattaaacaggaggagtccgtcgatcctgattattgggaaaagctgctgcgccaccattacgaacaacaacaggaagacttggcccgaaatctgggcaagggaaagcgtattaggaagcaggtgaattataatgatggctcccaggaggaccgcggcgtgtgcggccggcctcgccctcctcccatgggaagaagtacaagggcagttgggccagctcacctgccaagcctgcctcctgactggcaggacgaccagtctgataaccaaagcgattattctgtcgcaagcgaagagggtgacgaggacttcgatgaacgtagtgaggccccacgaagacctagccgtaagggactacgaaacgacaaggacaaaccactgcccccactcctagcgagagtgggagggaacatcgaggtacttggctttaacgcaagacagcgtaaagccttcttaaatgctatcatgagatacggcatgccgccacaggatgcctttactacacaatggctcgtgcgcgatcttagaggaaaaagcgaaaaggaatttaaggcatacgtgtctctgttcatgaggcatctgtgcgagcctggtgcagacggcgccgagaccttcgcagatggggttcccagagaaggcctgtctagacagcacgtgctgacccgcattggcgtcatgtccctgattaggaaaaaagtgcaagagttcgagcacgtgaatggacgttggagcatgcctgaactggctgaggtggaagagaacaaaaaaatgtcccaacctggtagtccatcacccaagacacccacaccatccactccaggcgacacccagcccaacaccccagcaccggtgccgcccgccgaagatggcatcaagattgaggagaattcactcaaagaagaggagagcattgagggcgaaaaggaggtgaaatctaccgccccagagactgcgatcgaatgcacccaagctcctgcccctgcctctgaagatgaaaaggtggtcgtggagcctcccgaaggggaggagaaagtggaaaaggcggaagtcaaggaacggacggaggagccaatggaaaccgaaccaaagggcgctgccgacgtggaaaaggtggaagagaagagtgcaatagacctgacaccgatcgttgtggaagacaaagaggagaaaaaggaggaggaagagaaaaaggaagttatgcttcagaatggggagactcccaaagacctcaatgatgagaagcagaaaaaaaatattaaacaaaggttcatgttcaatattgcagacgggggttttaccgagcttcactcactttggcagaacgaggagagggccgcaacagtgaccaagaagacttacgagatctggcacaggaggcatgactattggctcctcgcggggattatcaatcatgggtacgcccgctggcaggacattcagaatgatccacggtatgccattctgaacgaaccatttaaaggggagatgaaccgtggaaattttctcgaaatcaagaacaaatttcttgccaggcggttcaagttgctagagcaggccctagttattgaggagcagctgcgccgtgccgcctacttaaatatgtctgaagatccatctcacccgagtatggcgctcaacacgaggtttgctgaggtggaatgcctggccgaatctcaccagcatctgtcaaaagagagcatggccggaaataaaccggccaacgctgttcttcataaggtgctgaagcagctggaagaactgcttagtgatatgaaggctgatgttacgcggctgcctgccacgattgctcgaatccctcctgttgcagtgcgcctccagatgagcgaacgaaatatcctgtctaggcttgccaacagggcccccgaacccactcctcagcaggtagcacaacagcagtag

SEQ ID NO: 23567 - DNA, 5739 bp, synthetic construct
  misc_feature 1..5739: note = Description of Artificial Sequence: Synthetic coding sequence
  source 1..5739: mol_type = other DNA
atggccagcggcctgggcagccccagcccctgcagcgccggcagcgaggaggaggacatggacgcgctgctgaacaattccctgccgcctccccaccccgagaatgaggaggatcccgaagaagatttatcagaaacggaaacacctaagctgaagaagaaaaagaaaccgaaaaagcccagagatcctaagatccccaaaagcaaaagacagaagaaggagaggatgctcctttgcaggcagttgggggattctagcggcgagggccccgaattcgtggaggaagaggaagaggtggcactccggtccgactctgaaggatctgattatactccaggtaaaaagaagaagaagaagttaggtcctaagaaggaaaagaagagcaagtctaagcggaaggaagaggaggaagaggaggatgacgatgacgacagcaaggagcctaaaagtagtgcccagctcctcgaggactgggggatggaagacatcgatcacgtctttagtgaggaagactataggacccttaccaattacaaagccttctctcagttcgtccgtcctttgattgcggccaaaaaccccaaaattgcagtgagcaagatgatgatggtactcggcgcaaaatggcgtgaattcagtaccaataacccattcaaaggcagttcaggggcctcagttgccgcagccgccgcagccgccgtggctgtggttgagtcgatggttaccgctacggaggtcgcccccccgccaccgcccgtcgaggtaccgattcggaaagcaaagactaaggaaggtaagggacctaatgccaggcgtaaaccaaagggatccccgcgggtacctgatgccaagaagccaaagccaaagaaggttgcgcccctgaagatcaagttagggggcttcgggtccaaacgcaagaggtcgagctcagaagatgacgacctggacgtggaaagtgactttgacgatgccagtataaactcatattctgtgtctgatggcagcacatccaggtcgtccagaagccgtaaaaagctcagaacaaccaaaaaaaagaaaaaaggggaggaggaagtcaccgcagtggatggctatgagactgaccatcaagattactgtgaagtctgccagcaaggtggagagattattctgtgcgacacctgtcctagagcctaccatatggtctgcttggaccccgacatggaaaaagcacctgagggaaagtggagttgtcctcactgcgagaaagagggtatccagtgggaagcaaaggaagataattctgaaggggaggaaatactggaagaggtgggaggagacttggaagaagaggacgaccaccatatggagttctgtcgagtgtgtaaagatggcggggagcttctctgttgtgacacttgcccatccagttatcatattcactgcctgaacccccctctacccgagatccctaacggcgagtggctgtgcccacgctgtacgtgccccgctttgaaaggcaaagttcagaaaattcttatctggaagtggggccaaccgccaagccccacacccgtgcctcgtcctcctgacgctgaccctaatactccttcgccaaagccattagagggaaggcccgagagacagttcttcgtgaaatggcagggtatgtcctactggcattgcagttgggtgtcggagctgcagctggagcttcactgccaggtgatgtttcgcaactatcaaagaaagaatgatatggatgagcctccgtctggcgattttggtggcgatgaggagaaaagcagaaagcgaaagaacaaagatcccaagtttgccgagatggaggagagattctaccgttatggtattaaaccggaatggatgatgatccacagaattctcaaccacagtgtcgacaagaagggacacgttcattatctaattaagtggagggatctaccttacgaccaggcgagttgggaaagcgaggacgtcgaaatccaggactacgacctgttcaagcaatcttactggaaccaccgcgagctgatgagaggcgaagagggtcgtcctgggaagaaactgaaaaaagtgaagctgaggaagcttgaacgccctcctgagacccctaccgtggacccaaccgtgaaatacgagcgccagccagagtatctagacgctactggaggcactcttcacccgtatcagatggagggcctcaattggttacggttttcctgggctcaaggcacagacacaatcctggctgacgagatgggtctggggaagacggtccagacagccgtcttcctgtatagcctgtataaagaaggccacagcaaagggccatttctcgtgtctgctccattgagcacgatcattaattgggagcgggagtttgaaatgtgggccccggacatgtatgtggtaacttatgtcggcgataaggactcccgtgctattatccgggagaatgaattcagcttcgaagacaacgctatcagaggcggaaaaaaagcgtccagaatgaagaaggaagcctctgtcaagttccacgtgttgctcacctcctatgaactgattactattgacatggccatcttggggtctattgattgggcgtgcttaattgtagatgaggcgcacaggctcaagaataatcagagcaaattctttcgcgtcctgaacgggtatagtttgcaacacaaactcttgctcaccggcaccccgctccaaaacaatcttgaggagttgtttcatctgcttaacttcctcactccagagaggttccataaccttgagggcttcctggaagaatttgctgacatcgccaaagaagatcagattaagaagctgcatgacatgctgggccctcatatgctcagaagactgaaagcagatgtattcaagaacatgcctagcaagaccgagctgatagtgcgcgtagaacttagccccatgcaaaagaagtattacaagtatattctgacgcggaactttgaagcactgaacgcacggggtggggggaaccaggtgtctctgctgaacgtggttatggacctgaagaaatgttgcaaccacccttaccttttcccagtggccgccatggaagcacctaagatgccaaatggaatgtacgatggatcagcccttattcgagcatctgggaaacttttgctattgcagaagatgttgaagaatctgaaagagggcgggcaccgggtgctgatatttagtcaaatgactaagatgcttgacctgctggaggacttcctggagcacgagggatacaaatatgagcgcattgatggaggcatcaccgggaatatgcggcaggaggcaattgacagattcaacgcgccgggggcccagcagttctgtttcttgctaagcacgcgcgccggcgggcttggaatcaatttggcgaccgcggatactgtgattatctacgattcagactggaatcctcacaacgatatacaggccttttctcgagctcacaggatcggccagaataagaaagtcatgatttatcgcttcgtgactcgcgcatcagtggaggagcgtatcacacaggtagccaaaaagaagatgatgcttacccacctggtggttcggccaggtctggggtccaaaaccggcagtatgagcaagcaagaacttgatgacattcttaagttcggtactgaggagctcttcaaggacgaagcgaccgatggaggcggggataataaggaaggagaggacagcagcgtgatacactacgacgacaaagctatcgaaagacttctcgatcggaaccaggatgaaacggaggataccgagctgcagggtatgaatgagtatctctcctccttcaaagtagcccagtacgttgtaagagaggaagaaatgggagaagaggaggaagtggagcgtgaaattatcaagcaggaagagtcagttgaccctgattactgggagaagcttttacggcaccactacgaacagcagcaggaggacctggcaagaaatttagggaaaggcaaaaggatccgcaaacaggtaaactataacgatggaagccaggaggatagagactggcaggatgatcagagcgataatcagtccgactactccgtggcctctgaagagggcgacgaagacttcgatgagcgttctgaggcgccacgtaggccctctcggaagggcctgcgcaacgataaagataaaccactacctccactgctcgccagggtcggaggaaatattgaagtgctgggtttcaacgcacgtcagcgaaaggcctttctcaatgcaataatgagatatggcatgcctccacaggacgcgtttactacccagtggctcgtgagagacctgaggggcaagtctgaaaaagaattcaaagcctacgtgagtctgtttatgagacacttgtgtgaaccgggtgctgacggggccgagacctttgctgacggcgtgccgcgtgagggcctgtcacgacagcatgtcttgacaaggataggtgtaatgtctcttattaggaagaaggtgcaggaattcgagcacgtgaacggtagatggagtatgccagagctcgctgaggtggaagagaataaaaaaatgtcccagcccggaagcccatctccaaagacaccaacccctagtacgcctggcgatacccagccaaacacgccagctccagtgcctcccgctgaagacgggattaaaatcgaggagaactccctgaaggaagaggagtctatcgagggggagaaggaggtcaaatcaactgcccccgaaacagccattgagtgtacccaggccccagcaccagcttccgaggacgagaaagttgttgttgagcctcctgaaggtgaggagaaggtcgagaaggccgaggtgaaagagcggactgaagaaccaatggagaccgaaccaaagggtgccgccgacgtggagaaagtggaggagaagtccgccattgatctgacgcctatcgtcgttgaagacaaagaagaaaaaaaggaagaggaggagaaaaaagaggtgatgctccagaatggcgagacacctaaagacctcaatgatgagaaacaaaagaagaatattaaacaacgcttcatgtttaacatcgccgacggcgggtttacagagttgcattctctgtggcagaatgaggaacgggccgcaaccgtgacaaagaagacctacgagatttggcacagacgccacgactactggttactggccggcattatcaatcatggctatgcccgctggcaggacattcaaaatgacccaaggtacgctatattaaacgaaccatttaaaggcgagatgaaccggggcaacttcctcgaaatcaaaaataaatttttagcaaggagattcaaactcctggaacaagccttggttatcgaggagcagctgcgcagggcggcatacttgaatatgtccgaagatcccagtcacccctccatggccctcaatactcgcttcgcggaggtcgagtgcctcgccgagtcacaccaacacctgagtaaggaaagcatggccggtaataagcctgctaacgccgtgctgcacaaggtgctcaagcaactggaggaactgctttccgacatgaaagctgacgtgacacgcctccccgccacaattgctagaatacctcccgtggccgtccggctgcagatgtcagagaggaatatcttgagccggctcgcaaaccgcgctcctgaacccacaccgcagcaggtggcacagcagcaatag

SEQ ID NO: 23568 - DNA, 5661 bp, synthetic construct
  misc_feature 1..5661: note = Description of Artificial Sequence: Synthetic coding sequence
  source 1..5661: mol_type = other DNA
atggacgccctgctgaacaacagcctgccccccccccaccccgagaatgaggaagacccagaggaagacctgagcgagactgaaactcctaagctgaaaaagaagaaaaagcctaaaaagccccgagacccaaagataccaaaaagcaaacgccagaagaaagagctgggagatagcagcggagagggacccgagtttgtcgaagaagaggaggaagtggcactgagaagcgatagtgagggaagtgactatactcccgggaagaaaaaaaagaaaaagctgggcccaaagaaagagaagaaaagtaagtccaagagaaaagaggaggaagaagaggaggacgacgacgatgacagtaaggaacctaagtcctctgctcagctgctagaagactgggggatggaagatatcgaccatgtgttcagtgaggaggactatcgcacactaaccaattacaaggcattttctcagtttgtcaggccgttaatcgctgcaaagaaccccaagatcgccgtgagcaaaatgatgatggtcctgggtgccaagtggcgggaatttagcacgaataaccccttcaaaggctcatctggtgcttccgttgcagcagccgccgctgctgcagttgcagtcgtcgagagtatggtgacagccactgaggtggcgcccccacctccccccgtagaggtcccaattaggaaggctaagacgaaagaaggtaagggacccaacgcccgaagaaaaccgaagggtagccctcgtgtgcctgatgccaagaagccaaaacctaagaaggttgcaccactgaagattaagctgggcggctttggttcaaagcgcaagaggtcaagctctgaggacgatgacctggacgtggagagcgatttcgacgatgcatctataaattcctacagtgtcagtgatggctctacctcgcgttctagtcggtcaaggaaaaaacttcggactaccaaaaagaaaaaaaaaggggaagaagaggtgaccgcagttgacggctacgagactgaccaccaagactactgtgaggtctgtcaacaaggcggggagatcatattgtgtgatacgtgtccaagagcttatcacatggtgtgtctcgatccggatatggagaaggcaccagagggcaaatggtcctgtccccattgcgagaaggagggcatccagtgggaggctaaggaagataacagtgaaggagaggaaattctagaagaagtcggtggagacctagaagaagaggacgatcaccatatggaattttgccgcgtgtgcaaagatgggggcgaactcttatgttgtgacacttgccccagtagctaccacattcactgtttaaatcccccattgcctgaaatccctaacggcgaatggctctgccccagatgcacgtgtcctgccctgaagggcaaggtgcaaaaaatcttgatctggaagtggggccagccaccgtcgccgacccctgtcccacgcccccctgatgccgaccccaatactccctcccccaagcccctggagggacgccccgagcgccaattctttgtgaaatggcagggcatgagttactggcattgtagctgggtgagcgaactgcagctcgagctccactgccaagtgatgttccgaaattatcagcgcaagaacgacatggacgaacctccatctggagacttcggcggcgacgaagagaaatccagaaagaggaaaaacaaggatcccaagtttgccgagatggaagagcggttctatcgatacggaatcaagccagaatggatgatgattcacagaatcctgaaccattctgttgacaaaaaaggccacgttcattacctgataaagtggcgtgaccttccttacgaccaagcttcttgggaatctgaggatgtggaaattcaggattacgatttatttaaacaatcatactggaaccatcgcgaattgatgcggggggaggagggccgtccaggaaagaagctgaagaaggtgaaactgcgaaagctcgagaggccccctgagacccctacagtggaccctacggtcaagtatgagcgccagccagagtacctcgatgctaccggggggactctgcatccataccagatggagggactgaattggctcaggttcagctgggcgcagggaacagacaccattcttgccgatgaaatgggactcggcaagactgttcagacggcagtgtttttgtactctctttacaaggagggccattcgaaggggccctttttagtgagtgcgccattgagtacaatcattaattgggaacgggagtttgagatgtgggccccagacatgtacgtggtcacgtatgtcggcgacaaggactctcgggccatcattcgggagaacgagtttagcttcgaggacaacgccatccgcggcggcaagaaggcatcccgcatgaagaaggaggcttcggtaaaatttcatgtcttgctcaccagttatgaattgatcacaatcgatatggcaatcctgggctccattgattgggcatgcctcatcgtcgacgaggcccaccggctgaagaacaaccaatcaaaattctttagagtccttaacgggtacagccttcagcataaattgctcttgaccggaacgcctttacagaacaatctagaggagcttttccacctccttaactttcttacccccgagcggtttcacaatctggagggttttctcgaggagttcgcggatatcgccaaggaggatcagatcaagaagctccacgacatgctaggtcctcatatgctgaggagattaaaagctgacgtgttcaaaaacatgcccagtaaaaccgagcttattgtacgggtggaattatcccctatgcagaagaagtactataagtacatccttactagaaacttcgaagctctgaatgctcgtggagggggtaaccaggtctcactcctgaacgtggtcatggacctgaagaaatgctgcaaccatccgtatttattcccagttgccgcgatggaggcacccaaaatgccaaacggcatgtacgatggtagcgccctgattagggccagtggtaagctcctgctgctccagaagatgctgaaaaatctgaaggagggtggccaccgcgttcttattttctctcaaatgaccaaaatgttggaccttctagaagattttctggagcacgagggctataagtacgagcggatcgacgggggcattacagggaacatgagacaagaggcaatcgacaggttcaacgccccaggggcacagcaattttgcttcctccttagcacacgcgcaggtggcctcggcatcaatctggcaacagcagacactgtaatcatttacgattccgattggaatccgcacaacgatatccaggcgttctccagggcccatagaatcggtcagaataagaaagttatgatttataggttcgtcaccagagcctcagtcgaggagcggattacccaggttgcgaaaaagaagatgatgctgacacacctggtcgtcaggcccggtcttggaagcaaaactggttcaatgtccaagcaggaacttgatgacatcctgaaattcggtaccgaggaattgttcaaggacgaagctactgacgggggcggcgacaataaagagggcgaggattcaagcgtgatacattacgacgacaaagcaatcgaacgtcttctggacaggaatcaggatgaaactgaggacacagagctgcaagggatgaacgaatacctcagctcgttcaaggtggcgcagtacgtggttagagaggaggagatgggtgaggaagaagaagttgagcgcgaaataatcaagcaggaagaatccgtggatcccgattactgggagaagctcctccggcaccattatgagcagcagcaggaagaccttgcccggaacctaggcaaaggtaaaagaattcgcaaacaagttaattataatgacggcagtcaggaggatagagattggcaggatgatcagagcgacaaccagagtgactattccgtagcatccgaagagggcgatgaggattttgatgagcgctccgaggccccccgtcgtccatctcggaagggtctgagaaatgacaaagataagcctctccccccacttctcgctcgcgttggggggaacatcgaggtcttaggatttaatgccaggcagcgaaaagcattcctgaatgccattatgcgctatggaatgcctccccaggacgccttcacgacacagtggctcgtccgggatttgagaggtaaaagcgagaaggaatttaaagcctacgtatcactgtttatgcgccacctctgcgagccaggagccgacggggctgagacctttgccgatggtgtgccacgggagggactcagcaggcagcatgtacttacacgtatcggggtgatgtccctcatccggaaaaaggtccaggagttcgagcacgttaatggaagatggtcaatgcccgagctagctgaggtagaggagaataagaaaatgtctcaaccggggagcccctccccaaaaacacccactccctccactccaggcgacacacagcccaatactcccgcccccgtgccccccgcagaagatgggattaaaatcgaggagaattctctgaaggaagaggaatctatcgagggcgagaaagaggtaaagagtaccgccccggaaacagcaatcgaatgcacccaggccccagctccagctagtgaagacgaaaaagtggtggttgaaccacccgaaggtgaagagaaggttgagaaggcagaagtgaaggagcggactgaagaaccgatggagactgagccgaagggcgccgccgatgttgagaaagtggaggagaaatctgccatagatctaaccccaattgtagttgaagacaaagaggaaaaaaaagaggaagaagaaaagaaggaggtaatgctccagaatggagagaccccaaaggacttgaacgatgaaaagcagaagaaaaacattaagcagaggttcatgttcaacatagccgatggagggtttacggagctgcactctctctggcaaaatgaagagagagcagctactgtgacaaaaaagacctatgaaatatggcatcgcagacatgattattggttactagctgggattataaatcatggctacgctcgttggcaggatatccagaatgaccccagatacgccatccttaacgaaccatttaagggggaaatgaaccgcgggaacttcttggaaattaaaaacaaatttctggctaggcgattcaagcttcttgaacaggcattagttatcgaggagcagctccgcagagccgcatacttaaatatgagcgaggacccatcgcatccgtctatggcccttaacacacgcttcgccgaggtagagtgcctggcagagagccaccagcatctcagcaaggaatctatggcgggaaacaagccagccaacgctgtcctgcataaggtgctgaagcagttggaggagctgctgtctgacatgaaggccgatgtcacaagactgcctgcaacaatagctaggattccacctgtcgccgtaagactccagatgagtgagagaaacatcctgtcaaggctcgcaaaccgcgcccccgagcccactccgcagcaagtcgctcaacaacagtag

SEQ ID NO: 23569 - DNA, 5718 bp, synthetic construct
  misc_feature 1..5718: note = Description of Artificial Sequence: Synthetic coding sequence
  source 1..5718: mol_type = other DNA
atggccagcggcctgggcagccccagcccctgcagcgccggcagcgaagaggaggatatggacgcactcctaaataattctctccccccaccccatcctgaaaatgaagaagaccccgaggaggacctgagcgaaactgagaccccgaaattaaagaagaagaagaaacccaagaaaccccgcgatcccaagattccaaaatccaagcgccaaaagaaagaacttggagactcctccggagaaggcccagaattcgtggaagaggaagaagaggtcgcattaagatccgacagcgaaggatctgactacacaccaggaaagaaaaagaaaaagaagcttggccccaagaaggaaaaaaagtcaaaatctaaaagaaaggaggaagaggaggaagaggacgatgatgacgacagcaaagagcccaagagctccgcccaactcctggaagattggggcatggaggatattgaccacgtgttttctgaagaagactaccgcaccctgactaattacaaggcttttagccagtttgtccgccccctgattgccgcaaagaaccctaagatagccgtgtcaaaaatgatgatggtgttgggcgccaaatggagagaattctcgacaaataacccgtttaaagggtccagcggtgccagcgtggcggctgccgccgccgctgctgtggctgtcgtggaaagcatggtcaccgctaccgaggtggcccctcccccacctcccgtcgaggttcccatcaggaaggctaaaactaaagaggggaaaggcccgaatgcgagaaggaagcctaaaggaagcccaagagtcccggatgctaagaaacccaagcccaaaaaggtggccccgctgaaaataaaactcgggggtttcggaagcaagaggaagcgatcttcaagcgaagatgacgacctcgacgtggaatccgatttcgacgacgcatccatcaattcctactccgtttctgacggttccacaagtaggtcttcccgttcacgtaaaaagttgagaacaactaagaaaaagaagaaaggcgaagaggaagtcactgctgtcgatggttacgagacggaccatcaggactactgcgaggtctgccagcagggcggtgaaatcatcctgtgcgatacctgccctagggcatatcatatggtgtgtcttgacccagacatggagaaagcccccgaaggtaagtggtcttgtccccactgcgaaaaggaaggtatacagtgggaagccaaagaggacaattccgagggagaggaaatacttgaggaagtgggcggagatctggaggaggaggacgaccaccatatggagttttgtagagtgtgtaaggatgggggcgagttattatgttgtgacacctgtccttcctcctaccacattcactgtctgaacccaccccttccagagatccccaacggagagtggttgtgtcccagatgtacttgccccgctctgaagggcaaggtgcagaagatcctcatttggaaatgggggcagccaccttctcctacaccagtacccagaccaccagacgccgatcctaacaccccatcccctaagcccctggaggggcggcctgaaaggcagttctttgttaagtggcagggcatgtcctattggcactgctcatgggtgagcgaattgcagcttgaactgcattgccaggttatgtttaggaattaccaacggaagaatgatatggatgaaccgccatccggcgactttgggggcgacgaggagaaaagtcggaagcggaagaataaagaccctaaatttgccgagatggaggagaggttctataggtatgggatcaagccggaatggatgatgattcacaggatcctgaaccattcagtagataaaaaaggtcacgtgcattaccttattaaatggagagaccttccctatgaccaggcttcctgggaatcagaggatgttgagatccaggactatgatctcttcaagcagagctactggaaccatcgggagctgatgcggggagaggaagggagacccgggaagaagctgaagaaagtcaaactgaggaagttggagagaccaccagaaaccccgaccgttgatcctacagtgaagtacgaacgacagcccgaatacctagatgctacgggaggcactcttcatccttatcagatggagggcttaaattggctacgcttttcttgggctcaaggaaccgataccatattagccgacgagatgggtctcggcaagacggtacagactgccgtgttcctttattccctctataaagaggggcattccaagggtcccttcctggtgtccgcccccctgagtactatcattaattgggagcgtgagttcgaaatgtgggctcccgatatgtacgtggtcacatatgttggcgataaggattctcgggctatcattagggagaacgagttctctttcgaagataacgccatccgtggggggaaaaaggcttcgaggatgaaaaaggaagcctcggtgaaattccacgtgctgcttactagctacgagctgattactattgacatggctatactgggttccattgattgggcctgcctcatcgtggatgaggcacacaggctgaagaacaaccagtctaaattctttagggtcctgaatggatactctctgcaacacaagttgctcttgactggaacgcctttacagaataatctggaagagttgttccacctgcttaacttcctcacacccgaacgcttccacaatctagagggatttttagaggaatttgctgatatcgccaaggaggaccaaatcaagaagcttcacgatatgctaggccctcacatgctccggcgcctgaaggctgacgtgttcaaaaatatgccttccaagaccgagctcattgtccgggtggagctgagtccgatgcaaaagaagtattataaatacattctcactcgtaacttcgaagcactcaatgctcgcggggggggtaatcaggtctcgctgctgaatgtagtcatggacttaaaaaagtgctgcaaccatccatacctgtttcctgtagcagccatggaggcccccaagatgccaaatggtatgtatgacggttccgcattaatccgcgcttctggaaagctgctgctgctgcagaaaatgctgaagaatcttaaggaggggggacatcgagttctgatcttttcccagatgacgaagatgctcgacctcttagaggattttctggaacatgaaggctacaagtacgagaggattgatggcggaatcaccgggaacatgcgacaggaggcaatcgataggttcaacgctcccggggcgcagcagttttgcttcctcttgagtacacgggctggaggtctcggtattaaccttgccacagcagacaccgtaatcatttatgattcagactggaaccctcacaatgatatccaagctttcagtcgagcccataggattgggcaaaataaaaaggtaatgatttatcgattcgttacgcgggctagcgtggaggaacgcatcacacaggttgcaaaaaaaaaaatgatgctgactcacctagtcgtaagacccggtctcgggtctaaaactgggagcatgtcgaagcaggaacttgacgacatactgaagttcggcacggaagagctattcaaggatgaggctactgacggcggtggagacaacaaagagggggaggattcctccgttatccactacgacgacaaggcaatcgagagactccttgatagaaaccaggacgaaaccgaggacaccgaactacaggggatgaatgaatacctgtcctcttttaaagtggcacaatatgtggtacgcgaagaggagatgggggaggaggaagaagtggagcgtgagattattaagcaggaagaatctgtggatccggattactgggagaagctgcttcggcatcactacgaacagcaacaggaagacctagcacgcaatctgggcaagggcaaacgcattaggaaacaggttaattacaacgatggctctcaggaggaccgggactggcaggatgaccagagcgataaccagagtgactattccgttgccagcgaggaaggagatgaagattttgacgaacggagcgaggccccgcgccggccctctagaaagggccttagaaatgacaaggacaagccacttccgcccttgttagcccgggtgggcggcaatatcgaagtactggggttcaacgcccggcagcgcaaggcatttctgaacgctatcatgcgctacggtatgcccccccaagatgcctttaccacccaatggctggtacgggatctgcgggggaagagcgaaaaagagttcaaggcctatgtttctctcttcatgaggcatctttgtgaacctggtgctgacggagcagaaacctttgccgacggcgtgcccagagaaggtctcagcaggcaacacgtgctgaccagaatcggcgtcatgtccctcattaggaagaaagtgcaggagtttgagcatgtgaatgggcgatggtccatgcctgagctggccgaagtggaagaaaataaaaaaatgtcccaacctggatccccctcaccgaagactcccactccatcaacacccggcgatacccagcctaacacacccgcccctgtgccgcctgctgaggacggcatcaaaattgaggaaaactcgctgaaggaagaggaaagtatcgagggggaaaaggaggtgaagtcaacagctcctgaaactgccatcgaatgcacccaggctcccgcccccgcgtctgaggacgagaaggtggtggtggaaccgcccgagggcgaagagaaagtcgaaaaagctgaagtgaaagagcgcaccgaggaaccgatggaaacagaacccaagggcgctgcggatgtcgaaaaggtggaagaaaagtctgcaatcgacctgactcccatcgtagtcgaggacaaagaagaaaaaaaggaggaggaggaaaagaaggaggtgatgctgcagaatggggaaacaccaaaggacctcaatgacgagaagcaaaaaaaaaacattaagcagcgattcatgttcaatattgccgatggaggatttactgaactccactcactctggcagaacgaggagcgggccgccactgtcactaaaaagacatacgaaatctggcaccggcgccatgactattggctcttagcaggaatcatcaatcatgggtacgccagatggcaggatatccaaaacgacccacgctatgccatacttaatgagccatttaagggcgagatgaaccgcggcaactttctggaaatcaaaaataaattcctggcaagacgttttaaattattagaacaggccctcgtgattgaggaacaactgaggcgcgccgcatatctcaacatgagcgaagacccctcacacccctccatggcccttaacacccggttcgcggaggtcgaatgcctagccgaatctcaccagcatctttcgaaggagagcatggctgggaacaaacccgccaacgcggtgttacacaaggttttgaaacagcttgaagaactgctcagcgacatgaaggcagatgtgactagactgccagcgacaatcgcccggatccctccagtagctgtgcgactgcaaatgtccgagcgaaacattttgtcccgcttagctaaccgggctcccgagcccacaccacaacaggtggctcaacaacaatag

SEQ ID NO: 23570 - DNA, 5814 bp, synthetic construct
  misc_feature 1..5814: note = Description of Artificial Sequence: Synthetic coding sequence
  source 1..5814: mol_type = other DNA
atggccagcggcctgggcagccccagcccctgcagcgccggcagcgaggaggaagatatggatgctctgttgaacaattctttgcctcctccccaccctgaagaccccgaggaggacctgtccgaaactgaaactcccaagctgaaaaagaagaagaagccaaaaaagcctcgggaccctaagatcccaaagagcaagagacaaaagaaagagaggatgctactctgcagacagctgggcgacagtagtggcgaaggtcccgaattcgtggaggaggaagaagaagtggccctgcgatctgactccgaagggagcgactacactcccgggaaaaaaaaaaagaaaaaactggggccaaagaaggagaagaaatctaagtcgaaacggaaggaagaagaagaggaagaagatgacgacgacgacagtaaggagcccaagtctagcgcacaactgctcgaggattgggggatggaagacatcgaccatgtcttctccgaggaggactaccggaccctgaccaactataaggcatttagtcagttcgtgagaccacttatcgctgctaagaatcctaagatagcggtaagcaagatgatgatggtgctcggcgccaaatggagggaattcagtaccaacaatccctttaagggttcaagcggggccagcgtagccgctgccgcggcggctgctgttgcggtggtggaatcgatggtgaccgctacagaggtggccccaccccctccacccgtggaggtgcccattcggaaagcaaaaactaaggagggaaaaggtcctaacgcccggcggaaacccaaaggctcccctcgggtgcctgacgcgaaaaagcccaagccgaagaaagttgcgcccctgaagatcaagctggggggcttcggcagtaagagaaaaagatcatcctcagaggacgatgatctcgatgttgagagtgactttgacgacgcctcaatcaattcatacagcgtttcagatgggagcacctcccgcagctcccgctcgaggaaaaagttgagaacaactaaaaaaaagaaaaaaggcgaggaagaggtgaccgctgtggatgggtacgagacggatcaccaggactattgcgaggtctgccagcagggtggagaaattatcctgtgcgacacctgtccacgtgcgtatcacatggtatgccttgatcccgacatggaaaaggcaccggagggaaagtggtcatgtccgcattgcgaaaaggagggtatacaatgggaggcgaaagaggacaatagtgagggagaggaaattctagaggaagttggcggcgatctggaggaggaagacgaccaccacatggagttttgtcgcgtgtgtaaggacggcggtgagctcctatgctgcgatacgtgcccatcgagttatcacatacactgcctgaaccccccattgcctgagataccaaacggggaatggttatgcccacggtgcacgtgccccgctctgaaaggcaaagttcagaagatcctgatttggaaatggggccagcccccctcaccgacgcctgtgcccaggccaccagatgcagacccaaatactccaagtcccaaaccactggaaggaaggcctgaacgacagtttttcgtcaagtggcaggggatgtcgtactggcactgcagctgggtgtccgaactccagctggaactgcactgccaggtgatgttcagaaattaccagcgcaaaaacgacatggatgagcccccaagcggagacttcgggggagacgaggaaaagagccggaagcggaagaataaagatccaaagttcgccgagatggaggaacgcttttatagatacggaatcaaacccgaatggatgatgattcatcggatcctaaaccattccgttgacaagaagggccacgtccactatctgattaaatggagggatctgccttacgaccaggcatcttgggaatccgaggatgtggagattcaggactatgatctcttcaaacagtcttactggaatcatagagaacttatgcgtggagaagaggggcgacctggcaaaaagctgaaaaaggtgaagctccgaaagctcgagagaccccctgaaaccccaaccgtcgaccctaccgtgaagtacgagcggcagcccgaatacctggatgctacgggcggcaccttgcatccctaccaaatggagggtttgaactggctgcggttttcatgggctcaaggtaccgacacgatcttggccgatgagatgggcctgggtaagactgtccagaccgcggttttcctgtatagcttatacaaggaaggacattctaaaggcccattcctagtaagcgcccctctgtctacgattatcaattgggaaagggagtttgaaatgtgggcacccgatatgtatgtggtcacttatgtaggagacaaagattcccgagccattataagagaaaacgagtttagctttgaggacaatgccattcgcgggggcaagaaggcgagtcgcatgaagaaagaggcttccgtcaagtttcacgttttgctaacctcatatgagctgattaccatcgacatggcaatcctgggatctattgattgggcgtgtctgatcgtggatgaagcgcacaggctgaagaacaaccaaagcaaattcttccgcgtgctaaatgggtacagtttgcagcataagttactactgaccggaactcctttgcagaacaaccttgaggagctgtttcatttactgaattttctgactcccgaacgcttccataacctcgaagggttcctagaggagttcgcagatatcgccaaggaggaccaaatcaaaaagctccatgacatgctaggaccccacatgctgagacgactcaaagcagacgtatttaagaacatgcctagtaaaactgagcttatcgtcagggtcgaactgagtccaatgcagaagaagtactacaagtacattctaacgcgaaactttgaggctctgaacgctcgcgggggcggaaatcaggtatcgcttttgaacgtggtgatggacctcaaaaaatgctgtaaccatccctacctatttcctgttgctgctatggaagcgcctaagatgccaaatggcatgtatgatggttccgcactgattcgcgctagcggcaagctgctgctcctgcagaagatgctaaagaatctgaaggaaggtggtcatagggtgctcattttttcacagatgaccaaaatgctggaccttttggaggacttcttggaacacgagggctataaatatgagaggatcgacggagggatcaccggaaatatgaggcaggaggccatagataggttcaatgctccgggggctcagcagttttgttttttattgtcaactcgtgctggggggctgggcattaacctggccactgcggacactgtaattatatatgacagtgattggaatccacacaacgatattcaagcattctccagggctcacaggattggccaaaataagaaggtcatgatctacagattcgtgacacgtgcttcagtggaggagagaattactcaagtcgctaagaaaaaaatgatgctgactcatttggtcgtgaggcctggtcttggatctaagaccggctccatgtctaagcaagaactggacgatatcctgaagttcggcaccgaggaactgtttaaggacgaagcaactgacggtgggggggacaataaggagggggaagactcatccgttatacactatgatgacaaagctattgagagattgctggatcggaatcaagatgagaccgaagatactgagctccagggaatgaacgagtatctctcgtcattcaaggtagcgcagtatgtggtccgggaggaggaaatgggggaggaagaggaggtcgagagagaaattatcaagcaggaagagtcagtggatccagactactgggaaaagctactgcgacaccactacgagcagcagcaggaggatcttgcacgaaacctgggtaaaggcaaaaggatacgcaaacaggtaaactacaacgatggctcgcaagaagatcgaggagtgtgtggccggccacgtcctcctcctatgggcagatcaactcgcgccgtcgggccagcgcatttaccttctctgcctccagattggcaggacgaccaatccgacaatcagagcgactactctgtcgcatctgaagaaggcgacgaggactttgacgagcgttccgaggcaccccggcgcccttcccgaaaaggactacggaacgataaggataaacccctgcccccactgctggcacgcgtgggaggcaatattgaagtattgggattcaacgcacggcagcgaaaagccttcctgaatgctattatgcggtatggaatgccgcctcaagatgcttttactacacagtggcttgtgcgggatttgcggggaaaaagtgagaaagagtttaaagcttacgtgagtctctttatgagacatctgtgcgagcccggagcggacggagctgagaccttcgccgacggcgtgccacgggagggactttcccgccaacatgtcctcactcgaattggcgtaatgagtctaattcgaaagaaggtccaggaatttgagcacgtgaacggcaggtggtccatgccggaactggctgaagtagaagagaacaagaagatgtcccagccggggtccccctccccaaagactccaacgccctcaactcctggagatacacagcccaacacccccgccccagtccctcctgcagaagacgggataaagatcgaggagaatagcctgaaagaggaggagtctatcgaaggcgagaaagaagtgaagtcaacagctcccgagaccgcaattgaatgtacacaagctcccgccccagcctctgaggatgagaaagttgtggtggagcctcccgaaggcgaggagaaagtcgagaaagccgaagtgaaagagaggacagaggaaccaatggagaccgagcccaaaggcgcagctgatgtggagaaggtagaagagaagagcgcaatagatcttacccccatagtcgtcgaggacaaagaggaaaaaaaggaagaggaggaaaaaaaggaggtgatgttgcagaatggcgaaactccaaaggatctgaacgacgaaaaacaaaaaaaaaacataaagcagcggttcatgtttaatattgcagatgggggcttcacagagctccatagtctatggcaaaacgaggagagagcagctaccgtcactaagaaaacctacgagatttggcaccgacgccatgactattggttactcgccggtatcattaatcacggctacgccagatggcaagatatccagaatgatcctcggtatgcgatcctaaacgagccttttaaaggtgagatgaatcgcgggaacttcctagaaattaagaacaagttcctggcccggcggtttaaattacttgaacaggctcttgttatcgaggaacaattaagaagggctgcctacctgaacatgtcggaggacccgagccaccctagcatggcactgaacactcgcttcgcagaggttgaatgcctagctgagtcccatcagcatttgagcaaggaatctatggccggaaataaacccgctaatgctgtgctgcacaaagtcctcaagcagctggaggagttgctgtccgatatgaaggcagacgtcactaggttgccagctaccattgctagaatccccccagttgcggtgagactgcagatgtctgaacgcaatattctctccaggctggccaaccgggcccccgagcccaccccacagcaggttgcgcagcagcagtag

SEQ ID NO: 23571 - DNA, 1065 bp, synthetic construct
  misc_feature 1..1065: note = Description of Artificial Sequence: Synthetic coding sequence
  source 1..1065: mol_type = other DNA
atggccagcggcctgggcagccccagcccctgcagcgccggcagcgaggaggaggatatggacgcgctgctgaataattctctgcctcccccacatcctgagaacgaggaggaccctgaggaggatttatctgaaacggagactcccaagctcaaaaagaagaagaagccaaaaaagccgcgtgatcccaaaatccccaagtcaaagcggcaaaaaaaggagcggatgttgttgtgtcggcagctgggggacagctctggagagggccccgagtttgttgaagaagaggaggaggtggctctccgctccgatagtgagggatcagactatacacctggaaagaaaaagaagaaaaaactaggcccaaaaaaagagaaaaagtcgaagagtaagcgcaaggaggaggaggaagaagaagacgacgatgacgattctaaggagccaaagagctccgcccaactgctggaggactggggtatggaagacatcgaccatgtgttttcagaagaggattaccggacacttacaaattacaaggccttctctcaatttgtaaggcctctgattgccgcgaagaacccaaagattgccgtttccaagatgatgatggtgctgggcgctaagtggagagaattttctactaataatccattcaagggcagtagtggcgccagcgtggcagccgccgcagctgcagcggttgctgtggttgagtctatggtgactgccacggaggtggctccacccccacctccagtggaagtacccatcaggaaagcaaaaaccaaggagggaaaaggccccaatgcccgaaggaaacctaagggctcccctcgcgtccccgacgccaaaaagccgaaaccgaaaaaggtggctcccttaaaaatcaagctgggaggcttcggctccaagcgaaagcggtcaagctcggaagatgacgacctggacgtcgagtctgattttgatgatgcctcaataaatagctattctgtgtccgatggatcaacttctagatcctctcgaagtcgtaagaaactgcgcacaaccaagaagaaaaagaagtag

SEQ ID NO: 23572 - DNA, 1065 bp, synthetic construct
  misc_feature 1..1065: note = Description of Artificial Sequence: Synthetic coding sequence
  source 1..1065: mol_type = other DNA
atggccagcggcctgggcagccccagcccctgcagcgccggcagcgaggaggaagatatggacgccctgctaaataattcactgcctcctccccatccagaaaacgaagaggaccccgaggaagatttgtcagagacagagacccccaaattaaagaaaaagaaaaaacccaaaaagcctcgagacccgaaaattcccaagtctaaacgccaaaaaaaagaacgcatgctgctttgcaggcagctgggcgacagcagcggggagggccccgaattcgtcgaggaggaagaagaagtcgccctcaggagtgattcagaggggtctgattacactccagggaaaaaaaaaaagaagaagctgggacctaaaaaggagaaaaagtccaagtccaaacggaaggaagaggaggaggaagaggatgatgatgacgacagtaaagagccaaagagttccgctcagctgctggaagactgggggatggaagacattgaccacgtgttctcagaggaggattatagaaccttaaccaattataaagctttcagccagtttgttcgaccgttgattgctgccaagaaccctaagattgcagtctccaaaatgatgatggttctgggcgccaagtggcgggagttttctaccaataaccctttcaagggcagctccggagcctccgtcgccgcagccgccgctgccgcagttgctgtggtcgagagtatggtgaccgctacagaagtggccccacccccccctccagtggaggtgcccataaggaaggccaagacgaaggagggtaaaggccctaacgcccgccggaaacccaaaggcagcccgcgggtgccagacgccaagaagccaaagccgaaaaaggtcgcaccacttaaaatcaagctgggcggcttcggcagcaagaggaagagatcttcgtctgaggatgacgacctggacgttgagtctgacttcgacgatgccagcattaattcttatagtgtgtccgacggctcaacatctcggtcttccaggtctcgcaaaaaactcaggacaactaagaaaaagaaaaagtag

SEQ ID NO: 23573 - DNA, 2562 bp, synthetic construct
  misc_feature 1..2562: note = Description of Artificial Sequence: Synthetic coding sequence
  source 1..2562: mol_type = other DNA
atgttcctgccccacatgaaccacctgaccctggagcagaccttcttctcccaagtgcttcctaaaaccgtcaaactgtttgacgatatgatgtacgagctgacaagccaggctagagggctgtcttcccagaacctggagattcagaccacccttaggaacatactgcagacgatggtgcagcttctgggcgctttgacaggatgtgtccagcatatttgtgcgacacaggagagcatcatcttagaaaacatccagagtcttccttccagtgtcctgcatatcattaagtcaacttttgtccactgcaaaaacagtgaatctgtctatagcgggtgccttcacttggtgagcgacttgctgcaggcgctgttcaaagaggcctactccttacagaagcagctgatggagctgttagatatggtgtgtatggaccctctggttgacgacaacgatgatatcctcaatatggtgatcgttattcattctttgttagacatctgcagtgtgataagttccatggatcacgccttccacgccaacacgtggaaattcataatcaaacagtcacttaaacaccagtccatcataaagagtcaactcaagcataaggacatcatcacctcactctgtgaggacatcctgtttagctttcacagttgcctacagctggctgaacagatgacccaatcagacgcacaagacaacgccgattacagactctttcaaaaaacactgaagctctgtcggttttttgctaacagccttctgcattacgccaaagagttcctgccatttctgagcgactcctgctgcaccctgcatcagctttatcttcagatacactcaaagttccctccctccctctatgcaacacgcattagcaaggcccaccaagaagaaatcgccggtgcttttttggtcacacttgacccactgatctcccagttactaactttccaaccttttatgcaggtggtgctggacagcaaactggaccttccctgtgagctacagttcccacagtgtcttctgctcgtcgttgttatggataagctgccctcccagcctaaggaggtccagacgctatggtgtacggacagtcaggtctccgagactaccacccgaatttcgctactcaaagccgtgttttactctttcgagcagtgtagcggggagctgagcctaccagtacacctacaagggttgaagagcaaaggcaaggctgaagtggccgtgaccctctatcaacacgtgtgtgtacatctatgtacttttattacgtctttccacccttccctgtttgccgaactggacgccgcactgctgaacgccgtgttgtccgccaacatgataaccagtcttttagctatggacgcctggtgcttcctggctagatatgggaccgccgagctctgtgcccatcacgtgactatcgtagcacatctcattaaaagctgtcctggggagtgttatcaacttataaatctgtcaatcctgcttaagagactgttctttttcatggctccgcctcaccaactggagttcattcagaaatttagtccgaaggaagccgagaacctgcctctctggcagcacatctctttccaggccctcccgcctgagttacgcgagcagactgtgcatgaggtgaccacggtgggcaccgccgaatgccgcaagtggctgtctcgaagccggacactgggcgaactggaatcgctcaataccgtgcttagcgccttgctggccgtttgtaactccgcaggggaggcgttggacaccggcaagcagacagctattattgaggtggtgagtcagctgtgggcattcctgaacatcaaacaggttgccgaccagccatatgtgcaacaaacgttcagtttgctattgccccttctggggttttttattcagacgctcgatcccaagctcatcctacaggccgtgaccctgcagaccagtctgctcaagctggagctgcctgactatgtcaggctggccatgcttgacttcgtctctagtctgggcaaactttttatacccgaagccatccaggaccgtatactgcctaatctgagctgcatgttcgcactgctcttagctgatagatcctggctcctggaacagcacactcttgaggcatttacccagtttgcggagggcactaaccacgaagagatcgtccctcagtgcctatccagtgaggagaccaagaataaagtcgtctctttcctggaaaagacggggttcgtggatgaaaccgaggctgctaaagtcgaaagagttaaacaagaaaagggtatcttttgggaaccattcgcaaatgtcaccgttgaggaagccaaacgtagctctctgcagccctacgccaagcgcgctcgccaggagtttccatgggaagaggagtacaggtctgctctgcacaccatcgcaggcgcactcgaggccacagagagcctgttgcaaaaaggcccagccccagcctggctgagtatggaaatggaggcactccaggaacgcatggataagctgaaaagatacatccataccttaggctag

SEQ ID NO: 23574 - DNA, 2562 bp, synthetic construct
  misc_feature 1..2562: note = Description of Artificial Sequence: Synthetic coding sequence
  source 1..2562: mol_type = other DNA
atgttcctgccccacatgaaccacctgaccctggagcagaccttcttttcacaggtcctccctaaaactgtgaagctgtttgacgatatgatgtacgaacttacctcgcaggcccgggggttgtccagtcagaatctggagattcagacaacactcagaaatatattacagactatggtgcagctgctgggcgcacttacaggctgtgtccaacacatctgtgccacccaggaatccattatcctggaaaatatacagtcattgccatcatcagtactgcatatcatcaaatcaactttcgtgcactgcaagaattccgaaagcgtgtatagtgggtgtctccatctggtgtctgacctgctgcaagctttgtttaaagaggcgtactcactacaaaagcaacttatggagctcctggatatggtttgcatggacccgttggtcgatgacaatgatgatatcctgaatatggtgatagtgattcatagcttgcttgacatttgttccgtgatttcatctatggatcatgcctttcatgccaacacgtggaaatttattatcaagcagtcgttaaagcatcagagcatcatcaagtctcaactcaagcacaaggacatcataacttccctctgtgaggatattttattttcattccatagctgtttgcaactggccgaacagatgacgcagtccgacgcgcaggataatgctgattaccgcctcttccaaaagactctgaagctgtgtagattttttgctaattccctcttacattacgccaaggagtttctgccattcctgtcggacagctgctgtacactgcaccagttgtacctgcagatccatagcaaatttcccccgagcctttatgccacccgaatttctaaagcacaccaggaagaaatagctggcgctttcctcgtaacactggaccccctgatcagccaacttctgactttccaaccattcatgcaagtggtgctagattcaaagttagacctgccttgtgagttgcagtttcctcagtgcctactcctggtggtcgtcatggataagctgccttctcagccgaaggaagtgcagactctgtggtgcacagactctcaggtttccgaaaccacaacacggatcagtctgctaaaagctgttttttactcattcgagcagtgtagcggcgaattgtccctgcccgtgcatctccagggccttaagagcaaggggaaagcagaagttgcagtcacgctctatcaacacgtgtgcgtccacctctgtaccttcatcacatccttccacccctccctgttcgcagaactggatgccgccttactgaacgccgtattatctgccaacatgataaccagtctcctggccatggatgcttggtgttttctagcccgatacggtacggctgagttgtgcgctcaccatgtgaccatcgtcgctcaccttattaagtcatgtcctggggagtgctatcagttgatcaatttatctattcttctaaagagacttttctttttcatggctcctcctcatcagctggagtttatccagaaattcagccccaaggaggcagaaaatcttcctctctggcagcatataagcttccaagcactgcctcccgagcttagggagcagacagtgcacgaggttaccacagtggggaccgccgaatgtaggaaatggttgtcacgaagtcggaccttaggtgaactcgagagtttgaacacagtgcttagcgctctgctggcggtgtgcaacagcgccggtgaagccctggataccggtaagcagaccgccatcattgaagttgtcagtcaactgtgggcatttctgaatataaagcaagttgctgaccaaccctacgtgcagcaaaccttcagcttactgttgccacttctgggatttttcatacaaactcttgaccccaaactgatactgcaggcggtcacgctccaaacatccctgctcaagctcgaactgcctgattatgtgcggctcgccatgttggactttgtcagttcccttggaaagcttttcatcccggaagccatccaggaccgaattctgccgaacctgtcctgcatgtttgccctactgctggctgatagatcttggctgcttgagcagcatactctggaggcattcactcagttcgccgagggcaccaaccatgaagaaattgtgcctcagtgcctgtcttcagaggagaccaaaaacaaagttgtttctttcctggagaagactgggttcgtggatgagaccgaggctgctaaagtggagagggtcaagcaggaaaaggggattttttgggagcctttcgccaacgtgacggttgaggaagctaagcgctcctctctccagccttacgcaaaacgggcgagacaggagttcccatgggaagaggagtatcgtagtgctctgcacacgattgcaggagccttagaagccaccgaaagtttactccagaaggggcctgctcctgcgtggctctctatggagatggaagccctgcaggagcgtatggataaattgaagcgctatattcatacactgggctag

SEQ ID NO: 23575 - DNA, 993 bp, synthetic construct
  misc_feature 1..993: note = Description of Artificial Sequence: Synthetic coding sequence
  source 1..993: mol_type = other DNA
atgatgtacgagctgaccagccaggcccggggcctgagcagccagaaccttgagattcagactactctccgtaatatcctgcagactatggtgcaactgcttggcgctctgacgggctgcgtgcaacatatttgcgcaactcaggagagcattattctagaaaatatccagtccctgcccagtagtgttctacatattattaaaagcacctttgtgcattgtaagaattcggaatctgtttactccggctgcctccacctggtttccgacctcctgcaggccctatttaaagaagcttactcgctccaaaaacaacttatggaattgctggacatggtgtgcatggatccactggtggacgacaatgatgatatcctcaatatggtcattgtgattcacagtctgctcgacatatgttccgtaatctcttcaatggatcacgcgtttcatgccaacacctggaagttcattattaagcaaagcctgaagcaccagagtatcattaaaagtcaattaaagcacaaagacattatcactagcttatgcgaggacattcttttttcctttcatagctgcttacaactagcagagcaaatgacacaatctgacgcgcaggacaatgccgattaccggctgtttcagaaaactctgaaactgtgtaggtttttcgccaattcactcctccactacgctaaggagttcctgccatttttgagtgactcctgctgtactctgcaccagctttatcttcagatccactcgaaatttccccctagtctgtacgcaacccgcatcagcaaagctcaccaagaagagatcgctggtgccttcctggttacactggatccattaatcagccagctgctaacgtttcaacctttcatgcaagtcgtcctcgattccaagctgggatatctgtatagtaaaccgttttccacagtactctcttccgtgttggtgaattctctgtaccttttcatttatagggattag

SEQ ID NO: 23576 - DNA, 1047 bp, synthetic construct
  misc_feature 1..1047: note = Description of Artificial Sequence: Synthetic coding sequence
  source 1..1047: mol_type = other DNA
atgagccaggagggcgccgtgcccgccagcgccgtgcccctggaggaactgtcctcctggcccgaagagctgtgtaggagagaacttcccagcgtcttacccagactgttgagtctgagccagcacagcgatagctggatcgagcacatacagatattaaagataatagtggaaatgttcctcccacacatgaatcatctgaccctcgagcagacgttcttttcacaggtgctgcctaaaactgttaagctgttcgatgatatgatgtacgagctgacaagtcaggcaagaggccttagcagtcagaacctggagattcagacaacgctacgcaatatcctgcaaacaatggtccaacttctcggcgccctgaccggctgcgtgcagcatatctgtgctacccaggagagtatcatcttagaaaacatccagagtctgcctagctctgttctgcatattatcaagtcaactttcgtgcactgcaaaaattcagagtcagtctattccgggtgtctacacctggtctctgatcttctgcaggcactcttcaaagaagcctatagcctccagaagcaactgatggaactcctggacatggtatgcatggaccctttggtcgacgataatgatgatattctgaatatggttatcgttatacactctctgctggacatctgttctgtgatctcatccatggatcacgcctttcatgccaatacatggaaatttattattaaacagagtctcaaacaccagtccatcatcaagagtcaattaaaacacaaggacattatcacttccctgtgcgaggatatcctgttttcctttcactcttgcctacaactggccgagcagatgacacagagtgacgcccaggataacgctgactatcgacttttccagaagaccctcaagctctgtcgctttttcgcaaatagtctcttgcattatgccaaggagttcctgccgtttctcagtgattcatgttgcaccctccatcagctgtacctgcaaatccatcgatggtcctttgctctagctgtgtag

SEQ ID NO: 23577 - DNA, 2100 bp, synthetic construct
  misc_feature 1..2100: note = Description of Artificial Sequence: Synthetic coding sequence
  source 1..2100: mol_type = other DNA
atgctgaagctgagcggcgagggcctgcgggacagctaccacagccgccgggaccagattgcactgaagaacttgcagtccgacgtgaccgaggcgaagtcagacttcactaaagaaaccctcgcctctcagaacacaaaaatgattagctctatcgtcatttcacaaatgatagacgagaataagtcgcgggaaaatcgcgcttcacttcccctcccttgtgctatcgctcagtctcgggcccatcacgccaaacagtcactggctaacagatcgggagtgaatattcacagggcattcgccctactgcccgggcggctcggaatacccgccccgtcagacgagcgtggtcctgaagccgagctgccaccaaaggaagagcggccctgtggaggtccaagacgaggtttcgcctccattactatcacggctcgacgcgttggaccaccggcacgggccctggtatggggtactgctggagactcactctgccctaaatgtcgggccgaggacactctgtttcaggccccgcctgcactggctaacggagcacatcccggtcggcatcagcgttcatttgcctgtactgaattttccagaaattcatcagtcgtgagactcaaagtcccagaagcccacaccgggctctgtgagaggcgcaaatactgggtaactcatgctgacgacaaggaaaccagcttttcccccgataccccgctgagcgggaaatctcccttggtcttctcatcttgtgtgcatcttagagtatcacagcagtgtcctgatagtatctactacgtagacaaatccctgagcgtccctatagaaccccctcagatcgcatcccccaagatgcatcgtagtgtcctgagcctcaaccttaactgctccagccaccgacttactgccgacggggtggatggattagtgaatcgggagcctatttcggaggccttaaaacaggagctgcttgagggtgatcaggatctcgtggggcagcggtggaatcctggtttgcaggagtcccatctgaaagagactccatccctgcggcgggtgcacctgggaaccggcgcctgtccgtggtcaggcagctttccgcttgagaacactgaactggccaacgtgggcgccaaccaggtgaccgtgcgaaaaggagagaaagaccataccacccactgccatgcttccgaccacgcaaatcagctctcaattcacatccccggctggtcataccgggccgtgcacactaaagtgttttctggatcttcaaagcgccaacagggcgaggtgtgcatgactgtcagtgctccccccgtagagcaaaagcctacgcgtcactttctgccaataggcgatagctctcccagcgacgattgtctgtccagggatctctcggagccgaccgagagaagacaccagtcttttctaaaacccaggattctttttccaggcttcctgtgccctcttcaagacgtctgtgcctcattacaagaggacaatggcgttcagattgagtctaagttccctaagggagactacacatgctgtgatttggttgtcaagattaaggagtgtaaaaaatccgaggaccccactacaccagagccttcgcccgcagctccctcccccgcccctcgcgatggcgccggctccccgggcctgtccgaggactgttctgagagtcagcagactccggcaagatcgcttaccctgcaagaggccctcgaggtgagaaagccccagttcatttccagatcccaggaaaggttgaagaaactagagcacatggttcagcagcgtaaagcccaacgaaaagaagacttacggcagaagcaaagtctcttgccaataaggacaagtaagaagcagtttaccattccccatcccctcagcgataatttgtttaaaccaaaggaacgatgcatatctgagaaggaaatgcacatgcggagcaagcgcatctatgataatttacccgaggtgaaaaagaagaaggaggaacagaggaagcgagtaatacttcagtctaatagactgcgtgcagaggtgtttaaaaagcagctgcttgaccagctgctccagagaaatgctgtgtag

SEQ ID NO: 23578 - DNA, 1959 bp, synthetic construct
  misc_feature 1..1959: note = Description of Artificial Sequence: Synthetic coding sequence
  source 1..1959: mol_type = other DNA
atgatcagcagcatcgtgatcagccagatgatcgacgagaacaagtcccgcgagaatcgggcgtccctgccactcccctgcgccatcgcccaaagcagggcccatcacgccaagcagagcctggccaatcggtcgggggtgaacattcatagggccttcgccctgctgcctggtcgactgggcatcccggctcccagcgatgagcgcgggcccgaagccgaactgccccctaaggaagagagaccgtgtggcgggccgaggagaggatttgcttcgataaccataaccgcaaggagagtgggccccccggccagggcgctagtttggggcactgccggagattctctatgcccaaagtgtcgagccgaggataccctgtttcaggctccacctgccttagccaatggtgcccaccctggcagacatcagcgctctttcgcctgcaccgagttctcccggaattcttccgtcgtccgcctcaaagtgcctgaggcccacaccggcctgtgcgagcgtcgaaagtattgggtgacacatgcggatgacaaggagacgtcattcagtcctgatacgcccctaagcgggaagtctcccctcgtcttttcgtcttgtgtccatcttcgagtcagtcagcagtgccctgactccatctattacgtggataagtcccttagcgtgcccattgagcctccccagatagcatctcccaaaatgcaccgcagcgtgctgagccttaatctgaactgtagctcacatcgcctgaccgccgacggcgtggatggactcgtcaatcgggagcctataagcgaggccctgaaacaggaactgctcgagggagaccaggacctggtcgggcagagatggaaccctgggctgcaggaaagccacttgaaagagaccccaagcctaagacgggtacatctggggacaggcgcatgcccatggagcgggtcattccctctcgagaatacagaattagcaaatgtgggtgccaaccaggtcaccgttcggaagggcgagaaggaccacacaacacactgccacgccagtgatcacgccaatcaactttctatccacattccaggctggtcgtatcgcgccgtgcataccaaggtgttttctgggtcctccaagcgccagcagggggaggtgtgcatgaccgtctcagcaccgcccgtcgagcagaaacccacaaggcactttcttcctatcggggattcttctccgtccgatgattgcctgtccagagatctatctgagcccaccgaaagaagacaccaaagcttcttgaagccaaggattctattccccggattcctgtgcccactacaggatgtttgcgcatctttgcaggaagacaacggagtacagatcgaaagtaaattccctaagggcgactatacatgctgcgacttagttgtcaaaatcaaggagtgcaaaaagtccgaggatccaactacgccagaaccaagccccgccgctccttcccccgccccgcgggacggagcgggcagtccggggctttctgaggattgctccgagtctcagcagacaccggctcgctcgttaactctgcaggaagccctggaggttcggaagccacagtttatctctaggtcccaggaaaggctcaaaaaactcgaacacatggtgcagcaaaggaaagctcagagaaaggaagatctgaggcaaaaacagtccctacttccgattcgcacctccaagaaacagttcacgatcccgcaccccctatcggacaacctctttaagccaaaggagcggtgtattagtgaaaaggaaatgcacatgaggtctaagcgtatctacgacaatttgccagaggtcaagaaaaaaaaagaagagcaaagaaagagggtaattttacagagcaacaggttgagggccgaagtgtttaaaaagcagttgctggaccaactgcttcagagaaatgccgtctag

SEQ ID NO: 23579 - DNA, 1152 bp, synthetic construct
  misc_feature 1..1152: note = Description of Artificial Sequence: Synthetic coding sequence
  source 1..1152: mol_type = other DNA
atgatcagcagcatcgtgatcagccagatgatcgacgagaacaagtccagggaaaatcgcgctagcctgcccctcccctgcgcaattgcccagagccgcgcccatcacgccaaacagtccctagcaaacagatctggggttaatatccaccgcgcatttgccctgctgcctggccgattgggcatacccgccccttccgacgaaagaggcccagaggccgaactcccccctaaagaggagagaccctgcggcggtcctcgacggggatttgcatctataactatcactgcccgaagagtcggcccccccgccagagcactcgtttgggggaccgcgggcgacagtctgtgtcctaagtgtcgagcagaagacactctatttcaagctcccccagcactggccaacggggcccaccccgggcgccatcagaggagctttgcctgcactgagttcagccggaattccagcgtagtgcgtcttaaagtacctgaggcccacacgggcctttgcgagcgacggaagtattgggtgacacacgccgatgataaggaaacctcattctcaccagacacccccctgtccggcaaaagcccactggtcttcagctcatgcgttcacttgagagtatcccaacagtgtccagatagcatctactatgtagacaaatctctgtcagtgcccatcgagcccccgcaaatcgccagtccaaaaatgcaccggagcgtcctctcactgaacctcaactgcagctctcataggttgacagccgatggcgtcgatggtctcgttaaccgcgagccgatctccgaagctctcaagcaggagctgttagagggggatcaagatctggtgggacagcgttggaaccctggcctgcaagagtcccatttaaaagagaccccgagcctgagaagagtgcatctggggacaggggcctgtccttggagcggttccttcccgctggagaatacagagctagccaatgtcggcgcaaaccaagttacagtccgaaaaggagaaaaggatcacacgacccattgtcacgcctccgaccacgcaaatcaactgtcgatccacatcccgggatggtcttatcgagccgatctgctgcaggaaggtcagcacaaacagctgtcaatgttccaaagatag

SEQ ID NO: 23580 - DNA, 1152 bp, synthetic construct
  misc_feature 1..1152: note = Description of Artificial Sequence: Synthetic coding sequence
  source 1..1152: mol_type = other DNA
atgatcagcagcatcgtgatcagccagatgatcgacgagaacaagagcagagagaacagagccagcttgccgcttccgtgcgccatcgctcagagccgggcccaccatgctaaacagtctcttgcgaacaggtcgggcgtgaatatccatcgggcttttgctctgttgcccggaaggttgggcatcccagcaccttctgacgaacgagggccagaggcagaacttcctccaaaggaggaaaggccatgcgggggaccgagacgcgggtttgcttctatcactatcacagctaggcgggtgggacctcccgctcgggctttggtttggggaacagcaggagacagtctctgtcctaaatgccgtgccgaggatacactcttccaagcccctcccgcgctagcaaacggagcccaccccggccggcatcagaggagcttcgcatgcaccgaattctcaagaaacagcagtgtggtccggctcaaagtccccgaagcccatacaggcctttgcgaacgaagaaaatattgggtcactcacgcggacgacaaggagacctctttcagccccgatacaccacttagcggaaaaagccccctggtgttttcaagctgcgtgcacttgagagtttcccaacagtgtcctgactctatctactacgtcgacaaatcactcagcgttcctattgagccaccgcagattgccagcccaaaaatgcacaggtcagtgctgtcgctcaatcttaactgttcctctcacaggttaacggctgatggagtggatggcctggtgaacagggagcccatttctgaggccctaaagcaggaactcttggagggcgaccaggatctggtcgggcaaagatggaaccccggtctccaggaaagccaccttaaagagactcctagcttgcgccgggtgcacttggggaccggcgcttgtccgtggtcaggttccttccctctggaaaatactgagctcgctaacgtaggagccaatcaagtaaccgtgcggaagggcgagaaggaccacactactcactgccatgcaagcgatcacgctaaccagctgagtatccatatccccggctggtcttacagagccgatctgctgcaggaaggccagcataaacagttaagcatgttccagaggtag

SEQ ID NO: 23581 - DNA, 729 bp, synthetic construct
  misc_feature 1..729: note = Description of Artificial Sequence: Synthetic coding sequence
  source 1..729: mol_type = other DNA
tgatggagcggcagcttccccctggagaacaccgagctggccaacgtgggcgcaaatcaggtgacagtacgaaagggcgagaaagatcataccactcattgtcacgcgtcagaccacgcgaaccaacttagcattcatatacccggatggtcctacagagccggcgattatacgtgctgtgatcttgtggttaagattaaggaatgcaagaagagcgaggacccaaccacacccgaacctagcccggcagctccctctccggctccacgtgacggggcggggtcccctggccttagtgaggactgcagcgagtcccagcaaacacctgcaagatcactgacactgcaagaggctctggaggtgcgcaaaccccagttcatttctcggagccaggaaagactgaaaaaattggagcacatggtacagcaaagaaaggctcaacggaaggaagatctgcgccagaagcagtctttgctacccattcgaacgagcaaaaaacagtttaccataccccatccactgagtgacaatctgttcaaaccaaaagagcgctgcattagtgaaaaggaaatgcacatgaggtccaagcgtatttacgataatttgccagaagtcaaaaaaaagaaagaggagcaacgaaaaagggttattctgcagagtaacagactccgagccgaggtgtttaagaaacaactgctagatcagttgttgcagcgaaatgctgtgtag

SEQ ID NO: 23582 - DNA, 1989 bp, synthetic construct
  misc_feature 1..1989: note = Description of Artificial Sequence: Synthetic coding sequence
  source 1..1989: mol_type = other DNA
atgctgaagctgagcggcgagggcctgcgggacagctaccacagccggcgtgatcagattgccctgaagaaccttcagtctgatgtgactgaggcgaaatccgactttaccaaggagacgttggccagccaaaataccaaaatgataagctcaatcgttatctctcagatgattgacgaaaataagtctcgagagaatcgcgctagcctcccattgccatgtgccatcgctcaatctcgggctcaccatgccaagcaatccctcgccaatagatccggagttaacatccaccgggcctttgctctcctgccaggcagacttggaattcccgccccgtccgacgagaggggcccagaggcagaactgcccccaaaagaagaacggccttgtggagggccccgacgcggctttgccagcattaccattactgctcgacgagtcgggccacctgctcgggcgttagtgtgggggactgccggggattctctgtgtccaaaatgtagggccgaggacacgttgtttcaggctcccccagccctggccaacggtgctcatcctggccgccaccaacgctccttcgcctgtactgagttttccaggaacagctctgttgttcgtctcaaagtgccagaggcccatacgggtctatgcgagcgcagaaaatactgggtgacccatgccgacgataaggagacgagtttctctccagatacgcctctctctggaaagtctcctctcgtgttttcatcctgtgtacatcttagggtgagtcaacagtgcccagattctatttactacgtcgataaaagcctgtcagtccctatcgagcctcctcagatcgccagccctaagatgcacagaagtgtgctctctttgaacttaaactgttcatctcacagactgaccgccgatggagtcgacggcttggtgaatcgcgagccgatatccgaggctcttaagcaggagctgctggaaggagaccaggatctggtaggccagcggtggaacccaggactgcaggaaagccatctgaaggaaacaccatcacttcgccgagttcatctaggtacaggagcctgcccctggagcgggagcttccctctggagaataccgagctggccaacgtgggagccaaccaagtgacagttcgaaagggggagaaggaccatactacacactgtcacgcctcagatcatgcgaaccagttatctatacatatcccgggatggagctatcgggcagtgcacactaaagttttcagcgggagctccaagcgccagcagggagaagtttgtatgaccgtgtcagcaccacctgtcgagcagaaaccaacccgacactttttacccatcggggattcatccccaagtgatgattgtctctcaagggacttgagcgagcctaccgaacgaaggcatcagagttttcttaagccacgcatcttgtttcccgggttcttatgtcccctgcaggatgtttgtgcctctctacaggaggataacggagtccagattgagtcgaaattcccgaaaggagactacacctgctgtgacctggtcgtgaaaattaaggaatgtaagaagagcgaagaccctactactcccgagccctctcctgctgccccaagccctgctccacgcgatggcgcaggttctcccggtctatcagaagattgcagcgagtcccaacaaacccccgccagaagtctaacgttgcaagaggccttggaagtgagaaagccacaatttatctcgcgaagccaggagcggttgaagaagcttgagcacatggtgcagcagcggaaagcacaacgtaaggaagacctgaggcagaagcagagtcttctgccaatcaggacaagcaagaaacagtttacaataccgcaccctctaagcgacaatctctttaaacccaaagagcgatgcatatctgagaaggagatgcacatgcgctctaaacgtatctatgataacctccctgaggtgtag

SEQ ID NO: 23583 - DNA, 1809 bp, synthetic construct
  misc_feature 1..1809: note = Description of Artificial Sequence: Synthetic coding sequence
  source 1..1809: mol_type = other DNA
atgctgaagctgagcggcgagggcctgcgggacagctaccacagccggcgcgaccagatcgctctaaagaacctgcagtccgatgtgacagaggccaagagtgatttcacgaaggagacactggcaagccagaatacgaaaatgatttccagcatcgtgatttcccagatgatcgacgagaataaaagtcgggagaatagagcttcactgcccctgccttgtgcaattgcgcagtccagagctcaccatgccaagcagtccctggccaaccgttccggcgtgaatattcaccgcgcctttgcactgcttccaggcagactgggaattcccgccccttcggatgagagaggcccggaagccgagcttccgccgaaagaggagcgaccctgtggaggcccacggaggggatttgcttcgatcacaataaccgccaggcgcgtcgggccacctgctcgcgccctggtgtggggaacagctggcgactcactctgtccaaaatgcagggctgaagacacattatttcaagcgcctcctgcactcgctaatggtgcgcacccaggtagacaccaacgtagcttcgcctgcaccgagttttctagaaactcttctgtggtaagattgaaggtgccagaagctcataccgggctgtgcgagagacgcaaatactgggtcacccatgcagacgacaaggagacaagtttctctcctgacacaccactctcaggcaagtcccccctggttttctcttcctgcgtacacttgcgtgtcagccagcagtgccctgactccatctactacgtcgacaaatctctctccgtgcctatagagcccccgcagattgcaagccccaagatgcatcgcagcgtactgtctctgaatctgaattgctctagccacaggttaacagccgatggagtcgacgggctcgttaatcgagaacctattagcgaggcactgaagcaggagctcctcgagggagatcaagacctcgtcggccagaggtggaatcctggactgcaggaatctcacttgaaagaaacccctagcctacgcagggttcatttgggcaccggggcctgtccatggtccggctcttttcctcttgagaacacagaactggccaatgtcggggcgaaccaggtgacagtcaggaaaggcgagaaggaccatacaacccactgccatgcttctgaccatgccaatcagttgagcatacatattcctggatggagctatagggcaggggactacacatgctgcgacctggtcgtgaagataaaggagtgtaaaaagtccgaggacccaactaccccggagccttcccccgctgcaccaagtcccgccccacgagatggggctgggtcccccgggctgtctgaagattgtagcgaatctcagcagacacccgctagatcattaacattacaggaagccctagaggtgaggaaaccccaattcatttcaagaagccaagaacgacttaagaaacttgagcacatggtacagcagaggaaggcccagcgcaaggaagacttgcggcagaagcagtcactcctgcctattaggacctcgaagaaacagttcaccattccgcaccctctctcagacaatctgtttaagcccaaagaaagatgcatatcagaaaaagagatgcatatgcggtccaaacgtatatatgacaacctgccagaagttaagaagaaaaaggaggagcaacggaaacgggtgatactccaatccaaccggctgagagccgaggtttttaaaaaacaactcctagatcagctccttcagagaaacgctgtgtag

SEQ ID NO: 23584 - DNA, 2391 bp, synthetic construct
  misc_feature 1..2391: note = Description of Artificial Sequence: Synthetic coding sequence
  source 1..2391: mol_type = other DNA
atgcagcacagcggcatccccaccaagacccacccccagggctacgcagcccggtatactgagaccgcagtccaccgtacctttcagattaagaccttttccacagaactgaagaaccacgttatggtgatggatttcgtcaaatccaactggttccccagccagagaagggccaaggtgtgcatcatccatatgtgccaggggctcaagaccgctgaacagaccgccagccgctatgagatccacagccggctattttcaagtcctaaggaccacagcgcctgggaaaggaacgaaagtttaagtaacgcggggctccgcgactcctaccatagcaggcgtgaccagatcgctcttaaaaatctgcaatccgacgtgaccgaagccaaatccgacttcaccaaggagaccttagccagccaaaacactaagatgatctcaagtattgtgatatctcagatgattgacgaaaacaaatccagggagaatagggctagcttacctctcccttgtgccatcgcgcagtcccgggcccatcacgctaaacaatcattggccaacagaagcggtgtgaatatccatcgggctttcgcgttgctgcccgggaggctcgggatcccagctccttctgatgaacgcggtcccgaggcagaactgcctccgaaagaagaacggccttgcggcggaccgaggcgcggctttgcctcaataactattaccgcccgccgcgtgggcccaccagcaagggctctcgtttggggcaccgcaggcgactccctctgtccgaaatgtagggcagaagacaccctgtttcaggcgcctcctgccctggccaatggcgcccaccctggacgtcatcaaagaagctttgcctgcacggaattttcccggaacagctcagtagtgcgccttaaagtgccagaagcccatacagggttgtgtgagagacggaagtattgggtcacacatgccgacgacaaggaaacctcgttctctccagacactccgctgtcggggaaatctcccctcgtgttttctagttgcgtgcatctgcgggtttctcagcaatgccccgattctatctactacgtggataagtccctctctgtgcctattgaacctccccagattgcttccccgaagatgcaccggtcagtgctgagcctcaacctaaattgctcctcgcacagacttacggcagatggcgtcgacggcctggtgaatagggaacccatcagcgaggccctcaaacaggagttactagaaggagaccaggacctcgttggccaacgttggaatcctgggctacaggaatcgcacctcaaggaaactccatctttaaggagggtgcatctggggactggcgcttgcccatggagcggatctttcccccttgagaatactgaactggctaacgtgggcgccaaccaggtcaccgtacggaagggtgagaaggatcacaccacacattgtcacgcgtctgaccacgccaaccagctgagcatacatatccctggctggagctatcgggccgtccacacaaaagtattctctggcagctccaagagacagcagggagaagtgtgcatgactgtgtctgctcccccagtggaacaaaagccaactagacacttcctgccgattggcgattcatcacctagcgatgactgcctgtccagggatctctctgagcccaccgaaaggcgacatcagtcatttctcaaacccagaattttgttccctggatttctgtgtcctctgcaggatgtatgtgcgagcctgcaagaggataatggagtccagatcgaatcaaagttcccaaaaggagactacacatgttgcgacttggtggttaagattaaggagtgtaaaaagagcgaggatcctactacacccgaaccgagccccgctgccccgagtccggcaccccgtgacggggccggtagccccggcctgagtgaggactgttcagaatctcagcagacgcctgcacgctcgctgaccctgcaggaggctctggaagtacgcaagccacagttcattagtcggtcccaggagcgcctgaaaaaactggagcacatggtgcaacaaagaaaggctcagcgcaaggaggatctaagacagaagcagtccttactccctatacgtacctccaagaaacagtttacaatccctcacccactgtcagataacctcttcaagccaaaggaaaggtgcatttcagagaaagagatgcacatgcgctcaaagagaatttacgataatctccccgaggtcaaaaagaaaaaagaagaacagaggaagcgcgtgatactacagagcaacaggctgcgcgctgaagtattcaagaaacagctcctggaccagttactgcagcgaaatgcggtgtag

SEQ ID NO: 23585 - DNA, 786 bp, synthetic construct
  misc_feature 1..786: note = Description of Artificial Sequence: Synthetic coding sequence
  source 1..786: mol_type = other DNA
atgagcaccaccacctgccaggtggtggccttcctgctgagcatcctcgggctcgcgggttgtatagccgctaccggcatggatatgtggtccacacaggacttatacgacaatcccgtgacctctgtgtttcaatatgaaggtttatggaggtcttgcgtgcgtcagtccagcggattcacagagtgtaggccctactttaccattctgggcctgcctgcgatgcttcaagcagtgcgtgcacttatgatcgtggggatcgttttaggggccatagggctgctggtcagcatctttgcccttaaatgtatcagaataggcagcatggaagatagcgcaaaggcaaacatgactctgaccagcgggattatgtttatcgtatcagggctgtgtgctattgcgggagtctccgtgttcgccaatatgcttgtgacaaacttctggatgtctaccgctaatatgtacaccggtatgggagggatggtgcagacagtacagactagatacacattcggcgctgccctgtttgtgggttgggtggctgggggtttaacgctcatcggcggagtgatgatgtgcatagcatgtaggggccttgcccccgaagagactaattacaaggcagtatcataccacgcctctggacacagcgtcgcttacaaaccaggtggtttcaaggcctcaacagggtttggcagcaacaccaaaaataagaagatatacgatggcggggccagaacggaggacgaggtgcagtcttaccccagtaagcacgactatgtatag

SEQ ID NO: 23586 - DNA, 786 bp, synthetic construct
  misc_feature 1..786: note = Description of Artificial Sequence: Synthetic coding sequence
  source 1..786: mol_type = other DNA
atggccgtgaccgcctgccagggcctgggcttcgtggtgagcctgattggaatcgccggaattattgctgccacttgcatggatcagtggtccacacaagacctgtataacaatccagtgacagcagtcttcaattatcagggattgtggcgctcttgcgtgcgagaatcttccggttttactgagtgtcgtgggtacttcactctgttaggtcttcctgccatgctgcaggcagtgagggccctcatgatcgtggggatcgtcttaggtgccattgggttactggtgtccattttcgccctcaaatgtatcaggatcggaagcatggaagattccgcgaaagctaatatgacccttacaagcggcatcatgttcattgtctccggcctctgcgccattgccggcgtaagcgtcttcgccaatatgctcgtgacgaatttctggatgagcaccgcaaacatgtacacaggcatgggaggaatggttcagacagttcagacccggtacactttcggtgccgctctatttgtcggctgggttgccggagggctcaccttaatcggaggagtcatgatgtgtatcgcgtgcaggggtttggccccagaagaaacgaactataaggcagtttcatatcatgcctccggccacagcgtcgcttacaagccaggagggttcaaggcatccactggattcggttccaatactaaaaataaaaagatctacgatgggggtgctcggactgaggacgaagtacagtcctacccctccaaacacgactacgtgtag

SEQ ID NO: 23587 - DNA, 753 bp, synthetic construct
  misc_feature 1..753: note = Description of Artificial Sequence: Synthetic coding sequence
  source 1..753: mol_type = other DNA
atgagcaccaccacctgccaggtggtggccttcctgctgagcatccttggcctggcaggctgtatcgcagctacgggcatggacatgtggagcacccaggacctttatgataaccctgtgaccagcgttttccaatacgagggcctctggcgatcctgtgtccgccaaagttcagggttcacagagtgccgcccttactttacaatcttgggcttgcccgcaatgttacaggccgtgagagcccttatgattgtcgctatattcgccctgaagtgtatcagaattggcagcatggaggatagtgccaaagccaatatgaccctcacctcagggatcatgttcatcgtgtccggcctgtgcgccattgcgggcgtgtccgtgttcgccaatatgctagtgactaacttctggatgtctactgccaacatgtacactggcatgggcgggatggttcagaccgtgcaaaccaggtatacgttcggtgccgctctgttcgtcgggtgggtggccggtggcctgaccttaataggcggagtgatgatgtgtatagcctgccgtggactggcccctgaggaaaccaattacaaggccgtgagctatcatgcgagcggccactctgtggcgtacaagccaggcggcttcaaggccagtaccgggttcggttccaatacaaaaaataagaaaatctatgatggcggcgcacgcacagaggatgaggtacagtcatacccttcgaaacatgattatgtctag

SEQ ID NO: 23588 - DNA, 3000 bp, synthetic construct
  misc_feature 1..3000: note = Description of Artificial Sequence: Synthetic coding sequence
  source 1..3000: mol_type = other DNA
atgggccccgcccccctgcccctgctgctgggcctgttcctgcccgctttatggcggcgagctatcactgaggctcgggaggaggctaaaccctatcccctgtttccaggtccgtttcctggctccctccagacagatcacacaccactcttgagtttgccacatgcatctggttatcagcctgcgctcatgttctcacccactcagcccggcaggccccatacaggaaatgtggccattcctcaggtgacttcagtcgaatcaaaacccctcccccccctggctttcaaacatactgttgggcatattatactctccgagcacaagggtgtgaaattcaactgctcaatcagcgtgccaaatatctatcaggatacaacaattagttggtggaaggacggtaaggaactgctcggtgcacatcacgctatcacacagttttatcctgacgacgaggtaactgccatcatcgcatcattctccataacttcagtccagcgcagtgacaatggttcatatatctgtaagatgaagatcaacaatgaggagatcgtgtcagaccccatctatatcgaggttcaggggctgcctcatttcaccaagcagcccgagtcaatgaatgtaacgagaaatacagcctttaatctaacctgtcaggctgtggggcctccagaacctgtgaacatcttctgggtacaaaacagcagtcgggttaacgagcagccagagaaaagcccatcggtactaactgtgcccggcctcaccgagatggccgtcttttcatgtgaggcacataacgataagggcctgaccgtgtctaagggcgtgcaaattaacatcaaggcgatccccagtccccctacagaggtgagcattaggaactcaaccgcacattcaatccttatctcgtgggtgcccggctttgacgggtattccccatttcgtaactgcagtatccaggtcaaagaagctgacccccttagtaacgggtctgtgatgattttcaatactagtgcgctgccccacctttaccagattaagcagctacaagcactggccaattactctattggtgtatcctgcatgaatgagatcgggtggagtgctgtatctccatggatcctagctagtacaactgagggcgcaccaagtgtggcccctttaaacgtcacggtgtttctgaacgaaagttccgataacgtagatattcgctggatgaagcccccaaccaagcaacaggatggcgagctcgtcggatatcggattagccacgtgtggcaatccgccggaatctctaaagaactattagaagaagtgggtcagaacgggtcccgcgcccgtatcagtgttcaggtacataacgctacttgtactgtaagaatcgcagccgtcacaagaggaggagtaggacccttctccgatcctgtgaaaattttcatccccgctcatggatgggtagattatgctcctagcagtacgccggccccaggaaacgcagacccagtcctgatcatttttggctgcttttgcgggtttatattaattggactgatcctttatataagcctggcaatcagaaagcgcgtgcaggaaaccaagtttggcaacgctttcactgaggaagattctgagttggtagttaactacatcgctaaaaagtccttctgcaggagagccatcgagcttactctgcatagcttaggcgtgtccgaggaattgcagaataaacttgaggacgtcgttatcgatcgtaacctgctgattctgggaaagattctcggcgagggagagttcggtagcgtaatggaagggaatctcaagcaggaagacggcaccagcctgaaggttgcagtgaagacaatgaagttggacaatagctcgcagcgagagatcgaggaatttctgagtgaggcggcttgtatgaaagattttagtcatcctaatgttattcggttgctgggcgtctgtatagagatgtcctcacagggtatacctaagcccatggtgatcctgccttttatgaaatacggggacctgcacacatatttgctttacagtagactggaaactggtccgaaacatatcccacttcagacactcctaaagttcatggttgacattgccttggggatggaatatctgagtaacaggaattttctgcacagagaccttgccgctcggaattgtatgcttcgagatgatatgactgtgtgtgtggctgattttggtctcagtaagaagatttactcaggagattactaccggcaggggagaatcgctaagatgcccgtgaaatggatagcaatcgagtcactcgcggaccgagtctacacctcaaaatccgacgtctgggctttcggggtaacaatgtgggagatcgccactcggggtatgacaccgtaccctggcgttcaaaatcatgaaatgtatgattaccttctacacggacacaggctcaagcagcccgaagattgtctggacgaactgtacgaaatcatgtattcttgttggcgcaccgacccgcttgatagacctaccttttctgtgcttcgattacaattggagaagttattggagtccctgcctgatgtgaggaatcaggcggacgtgatatacgtcaacactcagctgctggagagctccgaggggcttgctcagggttccaccctcgcacccctggacctgaacatcgatcccgactctattattgctagctgcacaccacgtgcagccatcagtgtggtgacagctgaggtgcatgattccaagcctcatgagggcagatacatacttaatggcggctctgaggaatgggaagacctcaccagcgcgccttccgccgccgttaccgccgaaaagaactccgtcctcccaggagagcggttggtgcgcaacggcgtttcatggagtcattcatccatgttaccactcggctcatccctaccagacgaattacttttcgccgatgatagcagtgaaggatcggaagtgctgatgtag

SEQ ID NO: 23589 - DNA, 1671 bp, synthetic construct
  misc_feature 1..1671: note = Description of Artificial Sequence: Synthetic coding sequence
  source 1..1671: mol_type = other DNA
atgaagccccccaccaagcagcaggacggcgagctggtgggctaccggatcagccatgtctggcagtccgcaggtataagtaaggagctgctagaagaggtcggccaaaatggtagcagagcacgcataagcgtgcaggtccacaatgctacctgtacggttcgcatcgcagcggtgactagaggcggcgtgggacctttcagtgacccagtgaagatttttatcccagctcatggcgaatcttatacccatgctcagatcgccagaaacttacataaagtgcgacccgcctacatatctttgaccatttgttcatctctgctgcaggcttccgttagccacatttttcaaacaatgaccgggctgttagtttctacaaggctgggccgattatgcccactttttaattcaggagcctggcagaggcggagttgcgcccaccacctctggttgttactatggatccttataggcctgatcttgtatatctctctagctatcaggaagagagtccaggaaacaaaattcgggaatgcttttaccgaagaggacagtgagctggttgtcaattacatcgcaaagaagtcattctgccggcgggctattgagcttaccctccacagcctgggggtgagcgaggagctgcaaaacaaactcgaggacgtggtgatagatcgaaacctgctcatactgggaaagatcttaggggaaggagagttcggatccgtaatggaggggaatcttaaacaggaggatggcacttcacttaaggttgcagtcaagaccatgaagctcgataattcttcgcagcgcgagattgaagaatttctaagcgaagctgcgtgtatgaaggacttctcccacccaaacgtgatacggttgctcgggactagcgagaagtgtcggtgggtcgccaagagagcccttctaatttgctccgtcccaaaggagaagatttccggcgttgacaagaactgcctacagattcatatccctctgcagactctgctgaaattcatggtagacatcgcattagggatggaatatctttctaacagaaatttcttgcatagagatctggccgccaggaactgcatgctaagggacgatatgacagtttgtgtcgcagacttcgggctttccaagaaaatctattccggggactactatcgacaggggcggatcgcaaagatgcctgttaagtggattgctatagagtcccttgctgatcgcgtgtatactagtaagagcgacgtttgggcattcggcgtgacgatgtgggagatcgcgactcggggcatgacaccgtaccctggcgtgcagaaccacgagatgtacgactatctgctccatgggcacaggctcaagcagcccacagcttggatgaattgtgatcaagtcgggatgtgtagaggggtggaacctactgatacccctgctcaggaaccattcctgatgtgggaaatagtgtacgaatgcaccctagcaggagagcctatccccgacagaccaaccttcagtgtgttgaggctgcaactcgagaagttgctggagagcctgccagacgtgagaaaccaagctgatgtcatctacgtcaacacccaactacttgaatcatctgaagggctggcattgcatccctgctcaaccggcctagagcaccgcccatag

SEQ ID NO: 23590 - DNA, 2472 bp, synthetic construct
  misc_feature 1..2472: note = Description of Artificial Sequence: Synthetic coding sequence
  source 1..2472: mol_type = other DNA
atgaagatcaacaacgaggagatcgtgagcgaccccatctacatcgaagtgcaagggttgcctcacttcacaaaacagcccgaatcgatgaacgtaactagaaacaccgccttcaacctgacatgccaggccgttggcccccctgagccagtaaatatcttctgggtgcagaactcttccagagtgaacgaacagcccgagaaaagccccagcgtgttgaccgttcctggcctcacagaaatggccgtgttttcttgtgaggcccacaacgataaggggctcaccgtgagcaaaggggttcagatcaacattaaagcaatcccatccccccctacagaggtcagtatccgaaactcaaccgcacactcgatactgatcagctgggtccctgggtttgatggttactccccgttccgaaactgctcaattcaagttaaagaggcggatccactgtccaatggtagtgtgatgatattcaacaccagcgccctgcctcatttatatcaaataaagcagctgcaggccttggccaattactccattggggtctcatgtatgaacgaaatcggatggtcggcagtgtccccgtggattcttgctagtacgactgagggcgccccaagcgtagctccattgaatgtgacagtcttcctgaatgaatccagcgataatgtggacatccgttggatgaaacccccaaccaagcagcaggacggcgagttggtgggttatcgtatttctcatgtttggcaaagcgctggaatcagtaaagagctgctggaggaagtaggtcaaaacggatcacgtgctaggatttcagtgcaggtgcataacgcaacctgtaccgtgaggattgctgctgttaccagaggaggtgtgggaccgttctcggatcctgtaaaaatctttattcccgcacacgggtgggtggattacgcgccaagctccacgcccgcaccagggaacgctgaccccgtcctcatcattttcggatgcttttgcgggttcatactgattgggctgatcctgtacatttccctagcgatccgcaaacgtgtgcaggaaactaaattcggcaatgccttcaccgaggaagattcagaactcgtagtgaactacatcgccaaaaagagcttctgtcgaagagctattgaactgactcttcacagcttgggagtctcggaagagctgcagaacaaactagaggatgtcgtgattgatagaaatctgctgatcctcggcaagatattgggagagggggagtttggctcagtcatggagggcaaccttaaacaggaggacgggactagcctgaaagtggctgttaagacaatgaaattagataattcctctcaacgcgagattgaggaattcctatctgaggcagcctgcatgaaagatttttcccaccctaacgtaattaggctgctgggtgtatgtatcgaaatgagttcacaaggcatccctaagcctatggttattctcccctttatgaaatacggggacctacacacctacctgttatactctaggctcgaaaccggcccgaagcacatccccctgcagacacttctcaaatttatggtggatatcgcactgggaatggaatatctatctaatcggaacttcctgcacagagacctggccgctcgcaattgcatgttacgtgatgatatgacggtgtgcgtagctgactttggactgtcaaagaaaatctattctggtgattattacaggcagggccgcatcgcgaaaatgccagtcaaatggatcgcaatcgaatctctggcggaccgggtctatacatctaaatctgatgtctgggctttcggggttactatgtgggagattgctacgcgtggcatgaccccctatccaggcgtgcagaaccacgagatgtatgattatctgctccacggacaccgacttaagcagcctgaggactgccttgatgaactgtacgaaattatgtacagttgctggcggactgaccctctagataggccaacattttcagtcctgaggctgcagctggagaaactacttgaaagcctgccagacgtgaggaaccaggccgacgtcatctacgttaacactcagctcctggagtcatcggaaggactggctcaggggtcaactctcgccccactggatttaaacatcgatccagactcaataattgcttcctgcacccctcgcgcagctatctccgtggtcactgccgaagtccacgactcaaagccccatgaagggcggtacatattgaatgggggcagcgaagagtgggaggatttaacatctgcaccgagtgccgccgtcacagcagagaagaattccgtgttaccaggtgagcggttagtgcggaatggggtatcctggtctcattcctccatgttgcccctggggtcctcccttcccgatgaattgctgttcgcggatgattcctcggaggggtctgaggtgctgatgtag

SEQ ID NO: 23591 - DNA, 3000 bp, synthetic construct
  misc_feature 1..3000: note = Description of Artificial Sequence: Synthetic coding sequence
  source 1..3000: mol_type = other DNA
atgggccccgcccccctgcccctgctgctgggcctgttcctgcccgctctctggcgccgggccattaccgaagccagggaggaggccaagccatacccgttattcccaggccccttcccgggcagtctccagacagaccacacacccctcctgagtctccctcatgcatctggttatcagcccgccctcatgttcagtccaacccagcccggccgacctcatactggaaacgtcgctatcccccaggtgactagtgtggagtccaagccactcccaccactggcttttaaacacacggtgggacatatcatactctcagagcataagggggttaaatttaactgttcaatctctgtccctaacatatatcaggacaccaccatcagctggtggaaggacggcaaggaactgctcggggcccaccatgccataactcagttttatccagatgatgaagttacagccattattgcaagtttttctattacctcagtgcagagatcagataacggatcatacatttgcaagatgaagattaacaacgaagagatcgtctcagatcctatttatatcgaggtccagggtttgccacacttcacaaaacagcccgagtccatgaatgtcactcggaatactgctttcaacctgacatgtcaggctgtaggtcccccagagcccgtgaacattttttgggtgcagaactctagtagggtgaacgaacagcctgagaagagcccctcggtgcttactgtgccgggcctcacagagatggcagtgttctcgtgtgaggctcacaacgacaaaggacttacagtctctaagggggtgcagattaatatcaaagccataccgtcacctccgaccgaggtttccatcaggaatagtacggcccactccatcctgatctcctgggtgcccggtttcgacggctattctccatttcggaattgctcaatccaggtgaaagaggcggatccactctccaatggcagcgtgatgatctttaatactagcgccctcccccacctatatcagatcaagcagttgcaagccctggcgaattattccattggggtgagctgtatgaatgagatcgggtggtccgcagtttccccctggatactagcctctacaactgagggcgcgcccagtgtagccccactgaatgtaaccgtttttctgaacgagtcatcagacaacgtagacattagatggatgaagccacctacgaaacagcaggatggcgagctggtaggatatcgtataagccatgtgtggcaatctgcgggcatctcaaaagagcttcttgaggaagtaggacagaatggtagtcgcgctcgcattagtgtgcaggtgcacaatgctacctgtaccgtccgtattgccgcagttactaggggcggggtgggacccttttccgatccagtgaaaatctttattcccgcacatggttgggtagactatgccccgagctcaacgcccgcccccggcaatgcggaccctgtgctgatcatctttggttgcttttgcggctttatcctcatcgggttaatcctttacatatcactggccatccgcaagcgcgtccaagaaaccaagttcggaaatgcctttaccgaggaagattccgagctggttgtgaattacattgcgaagaagagcttttgcaggcgtgcaatagagctgacattacatagccttggcgtctccgaagagcttcagaataagcttgaagacgtggttattgaccgtaacctcttgatactcggcaaaattttaggtgagggtgaattcggctcagtaatggagggaaaccttaagcaggaggatggcacaagcttaaaagttgccgtaaaaaccatgaaacttgacaactcgtcccagcgcgagatcgaagagtttctgagcgaggctgcctgcatgaaggatttctctcacccaaatgtcatcaggcttctcggagtgtgcatcgagatgagcagtcagggtatccccaagcctatggttattctccccttcatgaagtacggagatctacatacttatctgctttattcccgactggagaccggccccaagcacatacctctgcagacccttctgaaattcatggtggatatcgccttgggtatggaatatcttagtaacagaaactttctgcaccgggatctggcagctcgcaattgtatgctgcgggacgacatgacagtttgtgtagcagacttcggtctttctaagaaaatctattcaggagactactaccgtcaggggagaatcgccaagatgcccgtgaaatggattgcaatcgagtccttggcagaccgagtttatacatccaagtccgatgtgtgggcttttggtgtgaccatgtgggaaatcgctacaagaggcatgaccccataccccggagtgcagaatcatgaaatgtatgattacctcctccacggccacagactaaaacagccagaggactgcctagatgaactgtatgaaatcatgtatagctgttggcgtaccgacccattggaccgccctacattttccgtcttgagactgcagctggaaaagcttctcgaatctctgcccgacgtgcgtaatcaggccgatgtgatctatgtcaatacccagctgctggaatcttcagagggtcttgcacaggggtcaaccttagctccgctggatctgaacattgaccccgatagtatcatcgccagctgtacccctcgggctgccatatcagtcgtgacggccgaagttcatgactccaagccccacgagggccggtacatcctgaacggaggatccgaagagtgggaggacttgacatcagcccccagcgcagcggtgaccgcagagaaaaactcagttctgccgggcgaaagattggtgcgtaatggagtgtcttggtcccactctagcatgttacctctggggagttcactccctgacgaattactctttgcggacgacagcagcgaggggtccgaggtgttgatgtag

SEQ ID NO: 23592 - DNA, 501 bp, synthetic construct
  misc_feature 1..501: note = Description of Artificial Sequence: Synthetic coding sequence
  source 1..501: mol_type = other DNA
atggccagcggcgtggccgtgagcgacggcgtgatcaaggtgttcaacgatatgaaggtgcgtaagtcaagcactcccgaagaggtgaagaaaaggaaaaaggccgtgctgttctgtctgtctgaggataagaagaacataatcttggaagagggaaaagaaattctcgtgggtgacgtcggacagacggtggacgacccatacgcaactttcgtgaagatgctgcccgataaagactgtaggtacgccctctacgatgctacatacgagaccaaagaaagtaagaaggaggaccttgtgtttatattctgggcccctgagtccgcaccgctcaagagcaaaatgatttatgcctccagcaaggacgcgattaaaaaaaaactgaccggcatcaagcacgagctgcaggctaactgctatgaagaagttaaagaccgatgtacattggccgagaagctaggcgggagcgccgtcatcagtctggaaggaaaacccttgtag

SEQ ID NO: 23593 - DNA, 501 bp, synthetic construct
  misc_feature 1..501: note = Description of Artificial Sequence: Synthetic coding sequence
  source 1..501: mol_type = other DNA
atggccagcggcgtggccgtgagcgacggcgtgatcaaggtgttcaatgatatgaaggtccgaaaatcaagcacccctgaagaagtaaagaaacggaagaaagcggtgctgttttgcctgtccgaggataaaaagaatattattctggaggagggcaaggaaatccttgtaggagacgtagggcaaacggtagacgacccctatgccacatttgtcaaaatgctgccagacaaagactgtcggtatgcgttatatgatgctacctatgaaactaaagagagtaagaaggaagatttggttttcattttctgggcccccgaaagcgcccccctcaagtccaagatgatttatgcgtcctctaaggatgcaattaaaaaaaagctgacaggtattaaacacgagctgcaagcaaattgctacgaggaggtgaaagatcgctgcacactggctgaaaagctgggcgggagtgcagtgatctctctcgagggaaagcctctttag

SEQ ID NO: 23594 - DNA, 276 bp, synthetic construct
  misc_feature 1..276: note = Description of Artificial Sequence: Synthetic coding sequence
  source 1..276: mol_type = other DNA
atggccagcggcgtggccgtgagcgacggcgtgatcaaggtgttcaatgacatgaaagtaaggaaaagcagtactccagaggaagtgaagaagaggaaaaaagctgtgctgttctgccttagcgaagacaaaaaaaacatcatcctggaagagggcaaggagatccttgtaggtgatgttggacagaccgttgacgacccttatgctacatttgttaagatgctcccagacaaggactgcaggtacgctctctacgacgcaacatatgagacgtag

SEQ ID NO: 23595 - DNA, 4101 bp, synthetic construct
  misc_feature 1..4101: note = Description of Artificial Sequence: Synthetic coding sequence
  source 1..4101: mol_type = other DNA
atgctgagcttcgtggacacccggaccctgctgctgctggccgtgaccctctgtcttgcgacgtgccagagcttgcaggaagaaacggtgagaaagggaccggccggagacaggggccctagaggagagcggggacctccagggccacctggaagggacggagaggacggtcccacagggccgcctgggccccccggcccaccaggcccgccgggcctgggcggaaatttcgcagcccagtacgatggcaagggagttgggttgggacctggccccatgggactgatgggacccagaggacccccaggagcagcaggcgcccccggcccccagggatttcagggccccgctggtgagcccggtgagcccggccagactgggccagcaggcgctcgcggcccagcagggcctcccggcaaggctggcgaagatggtcaccctggaaagcccggcaggcccggcgaaaggggcgtggtgggaccacagggagctcgtggcttcccaggaaccccgggtctccctggctttaagggcatccggggccacaatgggctagacggcctaaaggggcagcctggcgccccaggggtcaagggggaacccggtgcaccaggggagaatgggacgccaggtcaaacgggggcacggggactgcccggggagaggggcagagtaggcgctccaggacctgccggtgcacgaggcagcgatggatccgtaggccccgtggggccagctggcccaatcggaagtgccggcccaccaggttttcccggcgctcctggcccgaaaggcgagattggagctgtgggcaacgcaggccccgctggtcctgcagggcctcgcggggaagtcgggctgcctggtttgtccggcccggtcggaccccccggcaaccccggagctaacggtttaacaggtgccaaaggggcagccggtttgcccggtgttgccggggcaccaggcctgccgggacctaggggaatccctggccccgtgggtgccgccggcgcgactggcgcccgggggctcgtgggcgagcccggccccgcagggtccaaaggggagtccgggaataaaggagagccgggaagcgccggtccccagggccccccgggccctagcggtgaggaggggaaaaggggacccaatggtgaggcgggctccgctgggccccccggccctccagggctgaggggctcaccgggtagtcgcggccttcccggagctgacgggcgggccggcgtcatggggcccccagggagccgtggagccagtggaccagctggagtcagaggaccaaacggtgatgcggggaggcccggtgagccaggactgatgggtccacgaggtctgccgggtagccctggcaacatcgggcccgcaggaaaagaaggccctgtgggactaccaggcattgacgggcggccaggcccgattgggcccgccggcgcccgcggagagccagggaacataggattcccaggccctaagggtcctactggcgatcctgggaagaacggggacaaaggtcatgccggactcgcaggtgcacggggagcccccggcccagacggaaacaatggggctcaaggaccaccaggcccacagggcgtgcaaggaggaaaaggagagcagggtccccccggtcctccaggctttcaggggctgcccggaccgagtggccccgccggcgaagtcggtaaaccaggtgagagaggccttcatggcgagttcggccttcctgggcccgcgggaccgagaggggagcgcggtcctcccggagaatccggcgccgctggacctactggtcctatcggctctaggggaccctccgggccccccgggcccgacggcaataaaggcgaacccggggtagtgggtgcggtcgggacagctgggccctccggcccatccgggctccccggtgaacggggcgccgctggaatcccaggaggaaaaggggagaaaggcgagccaggcttaaggggggaaattgggaacccggggcgtgatggagccaggggggctcctggagcagttggagctccaggcccagcgggggctacaggagatagaggcgaagccggtgccgcaggtcctgcagggcccgcagggccccgaggttcgcccggggaacgcggagaggtgggccccgcagggcctaacggatttgctggaccagccggcgccgcaggtcagcctggtgctaaaggtgaaaggggagccaaggggccaaaaggggagaatggggtcgtaggccccaccggacccgtgggcgcagcagggccagccggtcctaatgggccccctggtcccgccggctctcgtggtgatggcggaccccctgggatgactggttttccgggcgcagctgggcgtactgggccacctggcccaagtgggatctcaggccctcccggcccacccggccctgccgggaaggaagggctgagaggccccagaggggaccagggccccgtaggtaggacaggcgaggttggggccgtgggtcccccgggcttcgctggcgaaaaaggacctagcggagaagctggaacagcgggtcctccagggaccccagggcctcagggactgttaggagccccggggatcctgggcctgcccggctcccgaggggagcgtggcctgcccggagtggcaggggctgtgggagaacccggtcccctgggaattgctgggccacccggagccagaggtcccccaggtgcagtcggatccccaggggtcaatggcgctcccggagaggctggacgcgacggtaacccaggtaacgacgggccaccaggcagggatggtcagcccggtcataaaggagagaggggttacccgggaaacatcgggccggttggagccgctggcgcacccggtccacacggcccagtcggcccagctggcaaacacggcaacagaggggagactgggccctccggccctgtggggcccgcgggggctgtaggcccacggggcccttccggcccacagggcattcgaggcgacaaaggtgaacccggcgaaaaaggacctcgcggtctgcccggtttgaagggccacaatggccttcaaggcctgccaggcatcgccgggcaccacggcgaccagggggctccaggctcagttggacctgccggtccgcggggacctgctggtcccagtggaccagccgggaaggatggtcgaacaggccaccccgggactgtaggtccagctgggattagagggccgcaagggcatcagggaccagccggcccacccgggcccccaggacctcccgggcccccgggggtgtccggcggcggatacgacttcggatatgacggagacttctaccgcgccgaccagcctcggtccgctccatcattgaggcctaaggactatgaagtcgacgctactctgaaatccctcaataatcagattgagacactccttactccagagggtagccgaaagaaccccgcccggacatgccgtgacctgcgactgtctcatccagaatggtcatcgggctactactggatcgatcccaatcagggctgtaccatggatgctattaaggtatattgtgacttttctactggagagacctgcatccgcgcgcagccagagaatatccccgccaagaactggtatcggtcatccaaagacaagaagcacgtgtggttaggcgaaacaatcaatgctggttctcagtttgagtacaatgtagagggggtgacatctaaggagatggctacccagctggcatttatgagacttctggctaattatgcctcgcagaatattacctaccactgcaagaactctatcgcttatatggatgaagagacgggaaatttaaagaaggcggtcatcctccaagggtcaaacgatgtggaactggttgccgaagggaattcgcgttttacatacactgtgcttgtggacgggtgctcaaagaaaactaacgagtggggcaaaaccattattgaatacaaaactaataagcccagcaggctgcctttcctggacatcgcaccattagacataggaggcgcagaccaggaattcttcgtggacattggaccagtatgctttaagtag

SEQ ID NO: 23596 - DNA, 4104 bp, synthetic construct
  misc_feature 1..4104: note = Description of Artificial Sequence: Synthetic coding sequence
  source 1..4104: mol_type = other DNA
atgctgagcttcgtggacacccggaccctgctgctgctggccgtgaccctctgccttgccacatgccagtgcactctaggcggccagacactgtccaagttccccccgtatcttcacattgagcgctccgagcagggcccacccggacccccaggccgagatggagaagacggacccactggccctcccgggccccctggaccccctggtcctccaggcctaggcgggaactttgctgcccagtatgatggaaaaggggtgggtctggggcccggacccatgggcctgatgggccctcgcggaccccctggtgccgcgggggctcccgggccgcaaggcttccagggccctgcaggggagccgggcgagcctggccagaccggacctgctggggcacgcggcccagccggaccaccaggaaaggccggagaggacggacatccaggcaaaccgggacgcccaggcgaacgcggagtggttgggccccagggcgccagaggattccctggtacacctggacttcctggttttaagggaattcgaggacataatggcttggatggactgaagggacagcccggcgcccccggcgtaaaaggggagcctggggcccctggggaaaacggaaccccggggcagactggcgcacgcggtttgccgggggagcgcggccgggtgggtgccccaggccctgcaggagcccgcggatctgacgggagcgtgggacccgtggggcccgctgggcctatcggttctgcagggcctcccgggtttcctggtgcgccaggccctaaaggggagattggcgccgtcggtaacgccggccctgccggtccagcgggcccaaggggcgaggtgggcctcccagggttatcaggtccagtgggcccccctggcaatcccggggccaacggtctaacaggggccaaaggggccgcgggtctgccaggggtagccggcgctccaggtcttcccggacccagggggatcccaggccccgtgggtgccgcgggggccacaggtgctcgcggtctggtgggcgaacctggccccgccgggtctaagggcgagagcgggaataagggcgagccgggctcagctgggcctcagggcccacccggcccatctggcgaggaaggcaagaggggtcccaatggtgaagcgggatccgctggccctccaggaccacctgggttacgcggctcacctggcagtcggggactgcctggagcggatgggcgggccggggtgatggggcctcctggaagcagaggggcgtctgggcctgccggagtgcgcgggcctaacggcgatgctgggagaccaggtgaacccggactgatggggcctagaggcctgccaggcagccccgggaacatcgggcccgctgggaaagaaggccctgtcgggctcccgggcattgacgggagacctggccctataggcccggcgggagctcgcggcgagcccgggaacatcggctttcccggacccaaaggtccgacaggggacccgggaaaaaatggtgataaagggcatgccggtctggccggagccaggggcgccccaggacccgacggaaacaatggagctcaaggaccccccgggccccagggagtgcagggcggcaagggagaacaggggccaccgggtcccccaggcttccaaggtttacccggcccctcagggcctgccggtgaggtgggtaaacccggggaacgaggactgcatggagagttcgggctgccggggcccgccggaccccgcggcgaacgtgggccacccggcgagtctggagccgcaggcccaaccggccccataggcagccgcgggcctagcggacctcccggacccgatggaaacaaaggtgagccaggcgtggttggcgcagtgggcaccgcaggtccaagtgggcctagcggcctgcccggtgagcggggggcagccggaataccaggcgggaagggagagaaaggtgagcctggtctgcggggtgagatcggcaacccaggacgagacggcgcccgaggcgcccctggcgctgtgggagctcctggtccagctggtgcaaccggagacagaggagaggcgggagccgccggcccggctggcccggccggacctcgcggtagccccggtgagcgaggggaggtcggacctgcggggccgaatggctttgcagggcccgcgggggccgccggccagccgggcgcgaagggtgagcggggtgcaaaagggcccaagggggagaacggagtcgtgggcccgaccggacccgttggagccgcaggacccgcagggcccaatggtccgcccggacccgctggatctagaggggacggtggcccacctggaatgaccggatttcccggcgcggccgggagaacgggccctcctggccccagcggtatctccggcccccccggccctccgggccctgctggcaaggagggcctgcggggaccaaggggcgatcaggggccagtcgggaggaccggagaggtgggtgctgtcggaccgccaggatttgcaggcgagaaaggtcctagtggcgaagccgggaccgccgggccacctggaacacctgggccccagggtctattgggcgccccaggaatcttgggactgcccggctctcggggagaaagggggctgcccggtgtggctggtgctgtaggggagcccgggcccctcggcatcgccggacctcctggggccaggggacccccaggagccgtgggcagtcctggcgtgaacggggccccaggagaagctggacgggatggaaatcccggcaatgacgggccccctggtcgagacggccagccgggacataaaggagagcggggctatcccggcaacatcggcccagtgggcgccgcgggagcacccgggcctcacggtccggtcgggcccgccggcaagcacgggaataggggggaaacgggcccctcgggacccgttggacctgcgggagccgtgggacctcgggggccttccgggccgcagggaatcagaggtgacaaaggagaaccaggagaaaagggccctaggggcctgcccggtttaaaaggccacaacggactgcaagggctccctggcattgcagggcaccatggggaccagggtgctcccggcagcgtcggcccagccgggcctagaggccccgcaggaccgtctggccccgccggaaaagacggacgtaccggacacccaggaacagtaggcccagcgggcattcgcgggcctcagggtcaccaggggcccgccgggcctccgggccctccagggcctcctggcccccctggggtgtctggtggcgggtatgacttcggttatgacggagatttctatcgcgccgaccaaccccgatctgctcctagccttcgccctaaggattacgaagtggatgccaccctcaagtctctgaataatcagatcgagacactccttactcctgaagggtccagaaagaacccagctcggacttgcagggacttaaggttgagccaccctgagtggagttccggctactactggatcgaccccaaccagggctgtaccatggacgccatcaaggtgtactgtgatttctcgaccggtgagacttgcatccgggcacagccagaaaatatccccgctaagaattggtaccggagcagcaaggataagaaacatgtgtggctgggcgaaaccatcaacgccggctcccagttcgagtacaacgtcgaaggcgtgacatccaaggaaatggcaacccagctggctttcatgcgcctgctggccaattatgccagccaaaacatcacttaccattgcaagaatagtattgcgtatatggatgaagagaccggcaatctgaagaaggctgtgattctgcagggctcaaacgatgtggaattagtagcagaaggcaattccagattcacttataccgtgctcgtcgacgggtgctccaagaaaacaaatgagtggggaaaaactatcatcgaatataaaaccaacaagccctccaggcttcccttcctcgatatcgcccctctcgacatcggcggggctgaccaagaatttttcgtcgacatcggcccagtgtgttttaagtag

SEQ ID NO: 23597 - DNA, 4401 bp, synthetic construct
  misc_feature 1..4401: note = Description of Artificial Sequence: Synthetic coding sequence
  source 1..4401: mol_type = other DNA
atgatgagcttcgtgcagaagggcagctggctgctgctggccctgctgcaccccaccatcattctggcccagcaggaagccgtcgagggaggatgtagccacttagggcagagctacgctgaccgtgatgtgtggaaacctgaaccttgtcagatctgtgtatgcgatagcggcagcgttttatgcgacgacatcatctgcgatgatcaggaactggactgtcctaatcccgaaataccttttggtgagtgttgtgccgtgtgccctcaacctcccacagcgccaactcgacctcctaatggtcaaggaccccagggccctaaaggggacccgggtcccccaggaatcccgggccgaaatggcgacccaggcatcccgggacagcccgggtctccagggagcccgggcccacccggaatctgcgaaagctgccctactggtccacagaattatagccctcagtacgactcttacgatgttaagtctggggtcgctgtcggggggctggccggataccccggtccagccggacccccgggcccacccggtcccccagggacttcaggccaccccggctcaccggggagtccggggtatcaaggtccacctggtgagccaggtcaggctggaccatctggcccgcctggcccacctggtgcaatcgggcctagcggcccggcgggcaaggatggcgagagtggtaggccaggtcgcccaggagagcgcgggcttcccgggccaccgggaataaagggccccgcgggcattccagggttccccggcatgaaaggccataggggcttcgacgggcgcaacggggaaaagggtgagacaggtgcccccggtctgaagggagaaaatggcctgccaggcgagaacggcgccccaggcccgatgggcccaaggggtgccccaggcgagagggggcggccaggtctaccaggtgccgcaggcgctagggggaatgatggcgcccgggggtccgacggccagcctggccctcccggcccacccggcactgccggattcccaggatcgcccggggctaagggcgaggtggggcccgcaggatcacctggctcaaatggggcccctggacaaagaggagaaccagggccacaagggcacgccggggcacaaggccctcctggccctcccggaattaacggttcaccaggaggcaagggtgagatgggcccagccggcattcctggcgcccccggactgatgggcgcccgggggccccccgggccagctggcgcaaatggtgcacctggcctgcgcggaggagccggtgagcctggcaaaaatggcgcgaagggagagcccggcccccggggagaaaggggggaggcagggattccgggcgttcccggcgcaaagggggaagacggtaaggatggctcgcctggtgagcctggggccaacgggctgccgggcgctgcaggggagagaggggcaccgggatttagagggcctgccgggcccaatggaattcccggagaaaaggggcccgctggtgaaaggggggcacccggccccgccgggcctcgaggtgctgccggggagcctgggcgcgacggggtgcctggcgggcccggaatgagaggcatgcccggctctccggggggtcccggctcagacgggaagccaggacccccaggctctcagggggaaagtggccgccctggtccccccggtcccagtggcccccgtggacagccgggggtgatgggatttcccggcccaaaaggaaatgatggtgcgcctggaaagaatggcgaacggggggggcctgggggccctggtccccagggacctccagggaagaatggggagacgggcccccagggcccaccgggacccacgggtccagggggtgataaaggtgacaccgggccacctgggccccagggcctacagggtttacccggaaccggcggtccaccaggcgaaaacggaaagccgggtgaacccgggcctaaaggggatgccggagcccctggggcccctgggggcaagggggatgctggggcccccggggaacggggaccccctggtctggccggtgcaccagggctgcgagggggagccggcccaccagggcctgagggcggcaagggagccgccggaccaccaggacccccaggtgcggccggaacccccggactacaaggcatgcctggagagcgagggggcctggggagtccaggtccgaagggggataaaggtgagccagggggacctggggctgatggggtgccgggcaaagacggaccccggggtcctacaggcccgatcgggccacctggaccggcgggccagcccggtgacaagggggaaggtggtgctcctgggctgcccgggatagctggtccgcgggggtccccaggagagagaggggaaacaggccctccaggtccggcagggttccctggcgccccgggccagaacggggaacctggcggcaaaggagagagaggcgctccaggcgaaaaaggggagggcggaccgccaggagtggctggccccccaggcgggagtggcccagccgggccccctggtcctcaaggcgtgaagggcgagagagggtctccgggcgggcccggcgctgcaggctttccaggcgcccgaggcttacctggcccgcctggcagtaatggaaatcccggtcccccgggcccctcgggctccccagggaaagatggcccacctgggcctgccgggaacaccggcgctccgggctcacctggcgtcagcggccccaagggtgatgccggccagccaggtgagaaaggctcgcctggtgctcaggggccacccggagccccaggacctcttggaatcgcaggcatcacaggcgcccgaggacttgccggtccaccaggaatgcctgggcccagaggcagtcctggccctcagggagtcaaaggcgaatcaggcaagccaggggctaatggactctctggagaacggggtcccccaggaccgcagggcctgcccggacttgccggaacagccggcgaaccgggcagggatggcaacccgggctcagacggcctgccgggaagagatggtagtcctggcggcaagggagataggggggaaaatggaagtccgggcgctccaggtgcccccggtcacccaggtcctccaggccccgtgggccctgcagggaaatccggggacaggggcgaaagcggcccagcaggaccagccggcgcccctgggccagcggggagcagaggtgctccgggcccgcagggccccagaggagacaagggggagaccggagaaaggggagcagcaggtatcaaaggtcacagggggttcccaggtaatcccggcgcgccaggctccccaggccccgccgggcagcagggagctattgggtctccagggcccgcaggaccacgcgggcccgttggaccgtctggcccccccgggaaggacggaacgtctggccatcctggtccaatcggcccgcctgggcctcgtggcaatcgtggggagcgcggatctgaaggcagcccaggacaccccggacaaccaggccctccaggcccgcccggcgccccaggaccttgttgcggcggggttggtgccgcggcgattgctggaatcggaggtgagaaggccggaggcttcgcgccttactacggtgatgagcccatggacttcaagatcaacacagacgagatcatgacatctctcaaaagtgtcaatggccagattgaatccctgatcagtcccgatggtagcaggaagaatcctgccaggaattgtagggacctgaagttttgccatccggaacttaagtccggtgaatattgggttgaccctaaccaggggtgtaaactggatgccattaaggtcttctgcaacatggaaacaggtgaaacatgtatatctgcaaaccctctcaatgtccctcgtaaacattggtggacagactctagtgctgaaaagaagcacgtctggttcggggaaagcatggacgggggatttcagtttagctatgggaaccctgaattgcccgaagacgttctggatgtgcatctcgcatttctgagacttctgtcctccagagcttctcagaatattacatatcactgcaagaattctattgcctatatggatcaggcatccggcaatgtgaagaaggcattgaaactcatgggcagcaatgagggcgaatttaaagccgaagggaattcaaagtttacctacaccgtcctcgaggacgggtgtactaagcatacgggtgaatggtccaaaactgtttttgagtatcggactcggaaggctgttagattgcccatagtggacatagctccttatgacattggaggaccagatcaggagtttggagttgacgttggacccgtgtgctttttgtag

SEQ ID NO: 23598 - DNA, 3492 bp, synthetic construct
  misc_feature 1..3492: note = Description of Artificial Sequence: Synthetic coding sequence
  source 1..3492: mol_type = other DNA
atgatgagcttcgtgcagaagggcagctggctgctgctggccctgctccatcctacaatcatcctggcccaacaggaagccgttgagggcggctgctcgcacttggggcagagctacgccgatcgggacgtttggaagccagaaccttgccagatctgtgtatgtgattccgggagtgtcctgtgtgacgatatcatttgtgatgaccaggagctggactgccccaatccagaaattcctttcggtgaatgttgcgccgtgtgcccccagccgccaactgctcctacgagaccacctaatggccaagggccccaggggccaaaaggagatcccgggccccccggtattccgggtcgcaacggtgatcctggaatcccgggacagcctggttcccctggaagcccaggcccacccggcatatgcgagtcttgtcccaccggtcctcagaactactctccacagtacgattcttacgatgtaaaatccggcgtggcggtaggaggtctcgctgggtaccctggacccgcaggcccacctggtccacccggccctcccggcacatccggacatccaggttctcccgggtcccccggatatcaaggacctcctggtgaacctggccaggcgggaccttctggtccccccggccccccaggggccatcggaccctccggccccgcaggtaaggatggcgagtcagggcgccccggacgccccggcgagcgtggcctgcctggtcccccaggcattaagggaccagcaggcattccaggtttcccaggcatgaaagggcatcggggattcgacggacgcaacggcgagaaaggagagaccggcgctcccggcctgaaaggagaaaacgggctgccaggtgagaacggagcaccggggccaatgggtccccgaggtgccccaggagagcggggccgaccaggacttcccggtgccgcgggcgcgcggggaaacgacggggcaagaggtagcgatggccagcccggcccccccggaccccctggaacggccgggtttcctggctctcctggagctaagggagaggttggacctgcgggaagtcctggaagcaacggcgccccgggacagcgcggagaaccaggaccacaggggcatgccggggcccaaggcccccctggccctccagggataaacggatccccaggaggtaaaggcgagatgggcccggccggaatccctggcgcacccgggctcatgggggcgcgggggccaccggggcctgcaggcgcaaatggagctccaggcttacggggcggggctggtgagcctggcaagaatggcgccaaaggggagcccgggccgcggggcgaaaggggagaagccgggatccctggagtgcctggagccaagggagaagatggaaaggacggctctcccggagaaccaggggcaaatgggctaccaggtgctgccggtgagcgcggtgcccctggattccgaggaccagctggccctaacgggattccgggcgagaaggggcctgctggggagcggggagctccaggccccgccgggcctaggggggcagccggcgagccagggcgggacggggtgcctggggggcccgggatgcggggaatgcctggtagtcccggcggacctgggtccgacgggaagcccggcccacccggcagtcaaggtgaaagcgggcggcctgggcctccgggcccgagtggtcctcgggggcagcctggcgtgatgggctttccaggccccaagggcaatgatggcgccccaggcaaaaacggggaaaggggcggtcccgggggccccggtccacaagggccccctggaaaaaatggtgaaaccggccctcagggccctccgggaccgacaggaccagggggcgacaaaggtgacacaggtccacctggacctcaaggtctccagggactgcctggcacaggagggcctccaggtgaaaacgggaaacccggcgagcccggccctaagggagacgccggcgcccccggggcccccggcgggaagggggacgccggcgcgcctggtgagcgtgggcctccagggttggccggagcccccggactccgaggtggagcggggccgccaggcccggagggaggtaagggagccgcaggccctcccggcccgcccggcgctgcggggactcccggtctccaaggcatgccaggggagaggggcggcctcgggagtcccggcccaaagggcgacaaaggcgaacctggcgggcctggtgccgacggtgtgccaggcaaggatggcccccgggggccaaccggacccataggcccgccaggacccgcaggacagcctggtgacaaaggggagggcggagcccctggccttcccgggattgccgggcctcggggcagcccgggtgaaaggggggaaaccggtcctccagggccagctggcttccctggcgcacccggtcagaatggagagcctggcgggaagggcgaaagaggagccccaggtgaaaaaggtgaaggcggccccccaggattgtttggaccacctggaaaggacggaacctctgggcatcctggcccaatcggccctcccggacctagaggaaatagaggagagcgtggttcggagggtagccctgggcacccgggacaaccaggaccgccaggacccccgggagcccctggcccgtgctgtgggggcgtgggcgcagctgccatcgcaggaattggaggagagaaagccggtggcttcgcaccgtactatggcgatgagccaatggactttaagattaacaccgacgaaatcatgacatcgctgaaatcagtgaacggtcagatcgaaagccttattagccctgacgggagcagaaagaaccccgctaggaactgcagagatcttaagttctgccaccccgagcttaagagcggggaatactgggtcgaccccaaccagggctgtaagctggatgccattaaggtattctgcaatatggagacaggcgagacctgcatttccgcaaatcccctgaacgttcccagaaagcactggtggaccgactcatccgccgagaaaaagcacgtgtggtttggagagtctatggatggagggttccagttttcttatgggaacccagagctgcctgaggatgtgttggatgttcatcttgccttcttgagactgttgtccagcagagccagccagaacatcacataccattgcaaaaacagcatcgcctacatggatcaggcgtccgggaatgtcaagaaggctctgaagctcatggggtcaaatgaaggcgagttcaaagcagaggggaatagcaagtttacctatacagtgctcgaagatggctgtaccaagcacactggtgagtggtctaagaccgtttttgagtaccggactagaaaagctgtgcggctaccaattgtggatatcgcaccctacgacatcggcggtcccgaccaggaatttggcgtggatgtggggccggtgtgcttcctttag

SEQ ID NO: 23599 - DNA, 5139 bp, synthetic construct
  misc_feature 1..5139: note = Description of Artificial Sequence: Synthetic coding sequence
  source 1..5139: mol_type = other DNA
atgggccgggaccagcgggccgtggccggccccgccctgcggcggtggcttctcctgggtacagtgacagtgggctttctggcacagtccgtcctggccggagtaaagaaattcgatgtaccttgtggcggcagggactgctctggggggtgccaatgctacccagagaaagggggaagggggcagcctggccctgtggggccccaggggtacaatggcccccctggcctccagggcttccccggattgcagggacgcaagggcgataagggcgaaagaggtgctccaggcgttacaggacctaagggcgatgtcggagctagaggagtatccggctttccaggcgctgatgggattcctggccaccccggacagggagggcccaggggtcgaccaggatacgacgggtgcaatgggacacagggcgactccggcccccagggcccaccaggctccgaggggttcaccggccctcctggccctcagggtccaaaaggacaaaagggagaaccctatgcccttccaaaggaggaaagagatagatatcgcggagagcctggcgagcccggattggtgggtttccaggggcctcccggtcggcccggccacgtcgggcagatgggccccgtgggagcgccaggcagaccgggacccagcagcgacgaaagtttcaagaataagttgaaaaacaaaggcttgaattactatactgtgaactccatgcagggagatgtgggtcagcccggcccgaacggcatcccctccgacaccttgcacccaattattgcacctacaggggttaccttccaccccgaccaatataagggtccagtggggtggagagggagaccttgggtagctggtatttctttgaagggcgaagaaggcataatggggtttcctggcctgcggggttatccaggtctgagtggggaaaagggttcacccgggcagaagggctcaagagggttggacgggtaccaaggacccgacggtcctagaggtcccaaaggagaggccggagatccgggcccccctggcttacccgcgtattctcctcatcccagcttggccaaaggagccagaggagatcctggttttcctggcgcgcagggggagccgggttcacaaggggagccgggagaccctgggctaccaggtccaccaggattgagcattggtgacggcgatcagaggcggggcctgcccggggagatgggtcccaaaggctttattggggatcccggcatcccggccctatatgggggcccccccggaccagacggcaaacgcggaccgccgggtccccccgggcttcccggccctccgggtccagatggttttcttttcggacttaagggagccaaaggtcgcgcaggcttccccggactgcctggctctccaggggcaagaggccccaaggggtggaagggcgatgctggcgaatgtcgctgtaccgaaggcgatgaagcgattaagggactgccaggactgccaggccctaaggggttcgccggtatcaacggcgaaccggggcggaaaggagatcgtggcgatccgggacaacacggattaccagggtttccagggctgaaaggggttcctgggaacatcggcgcacctgggccaaaaggggccaagggcgactcacgaacgatcaccaccaagggcgagcggggacagccgggagtgcccggcgtacctggcatgaaaggcgatgacggcagccctggtagggacggactggacggcttccctggcctgcctggtcccccaggggacggtattaagggccccccaggtgatcctggttatccaggtattcccgggacaaaagggactcccggtgaaatgggaccacctggactcggacttcccgggctcaagggacaacgcggcttccctggagacgcggggcttccagggccacctggttttcttggccctccaggacccgccggcacaccaggccagattgattgtgatacagacgtgaagcgggctgtagggggggaccgccaggaagcaattcagcctggatgcatcggaggccctaagggattacccggtctccccggacctccaggaccaaccggcgcaaagggcctccggggaatcccaggatttgccggcgctgacggcggtcctggcccacgcggattgcctggcgatgctggacgcgagggattcccaggtcccccggggtttatcggacctagaggcagcaaaggtgccgttggtctgccaggcccagacgggagtcccggccctataggtcttccaggtccagacggtcctcccggagaaagaggcctgcccggagaagtgctgggtgcccagccaggtcctcggggtgacgctggtgtgcccgggcagccaggtctcaaagggctccccggagatcggggacctcccggattccgaggctcgcagggcatgccagggatgcccggactgaaggggcagccaggtctcccaggcccatccggccagcccggtctgtacggcccccccggcctacacggctttccgggtgctccgggccaagaggggcctctgggactgcctggcatcccagggcgcgagggcctgcctggagataggggagatccaggcgatactggcgcgcccggacctgtcggcatgaaggggctgagcggcgatcgaggtgacgccggttttacgggcgaacagggacatcccggtagtcccggttttaaggggattgacgggatgccaggcacccccgggcttaagggggatcgggggagtccgggtatggatggattccagggcatgcctggtctgaaggggaggccgggattcccgggatccaaaggagaagcagggttttttggaatccctgggctaaagggtctggccggtgaaccaggtttcaagggaagccggggcgatccgggcccgcctggacccccacccgtgattctccctgggatgaaagatatcaaaggagaaaaaggcgacgaagggcccatggggcttaaggggtatctgggcgctaaaggcatccagggcatgccagggattccggggttgagtggaatcccaggtctgcctggacgtcctgggcacattaagggagtgaagggagatataggcgtgcctggaatcccgggacttccgggcttccccggggttgccggtccaccgggcattacaggttttcctggtttcatcgggagccgcggcgacaaaggcgcccccggccgggctgggttgtatggcgagattggcgccactggagatttcggcgacatcggggacaccattaacctgccgggaaggccaggcttgaagggcgaacgcggaaccaccggcatccccggattgaagggattcttcggagaaaaaggcacagagggagacatcggcttcccggggattaccggggtgaccggcgtgcagggcccccctgggctgaagggacaaacaggatttcctggactgactgggcctcctggtagccagggagaactagggcgcatcgggctacctgggggtaagggcgacgacgggtggccaggcgcccctggactgccagggttcccgggcttgcgtgggattagaggtttgcacggcctgccggggacgaaggggttcccgggctctcccgggagcgacattcatggcgatcccggcttccccgggccaccaggtgaaagaggcgaccccggagaggcgaatactttgccaggccccgttggagtcccaggccagaaaggagaccaaggagctcctggcgagcgggggcctcccggttctcccggactgcaaggcttcccaggcattacgcctccttccaacatctccggagctcctggcgacaagggcgcccctgggatttttggcctcaaaggctacaggggcccaccaggaccaccaggctccgccgctcttccagggagcaagggggatacaggcaaccccggtgccccaggcactccaggcactaagggatgggcaggagattccggccctcagggtcgaccaggagtgttcggccttccaggagagaaaggtccgcgtggagaacagggttttatggggaacacaggcccaaccggcgctgtgggtgatcgtggtcccaaggggcctaaaggagatcctgggttcccaggcgccccaggtactgtcggggcaccaggtatcgccggcattccccagaagatcgccgtgcagcccggaacagtcggaccacagggacggcgaggccccccaggtgcaccaggggaaatggggcctcagggaccacctggggagcctggctttagaggggcacctgggaaagcaggcccacagggacgtggcggcgtgagtgctgtccccgggttccgcggagatgaagggcccatcgggcaccaagggcccattggccaggagggagcaccagggaggcccgggagtcctgggttacctggaatgcctgggcggagcgtgagtatcggttacctcctggttaagcattcccagacagaccaggagcctatgtgccccgtcggaatgaataaactgtggtcagggtattcgctgctgtatttcgagggtcaggagaaggcccataaccaggatcttggactggccggatcttgcctggcacggttttcaacaatgccatttttatattgcaaccctggggatgtctgttactatgctagtagaaatgataaaagttattggctgtccaccacagctcctctccctatgatgcccgtagccgaggatgaaattaaaccttacatctctcggtgcagcgtctgcgaagcccccgccattgcgattgcggtgcattctcaggacgttagtattccccattgccctgccggttggcgcagcctatggatcggttacagttttctgatgcataccgcggccggggatgaggggggcggacaaagcctagtctcacctggatcatgcctggaggatttcagggctaccccgtttatcgagtgtaatggaggccgcggaacctgtcattactatgccaataaatacagcttttggcttacaacgatccctgagcagtcttttcagggctcgccatctgctgatactctcaaggccggtctgataagaacgcacataagccgctgccaggtgtgtatgaagaacctctag

SEQ ID NO: 23600 - DNA, 5139 bp, synthetic construct
  misc_feature 1..5139: note = Description of Artificial Sequence: Synthetic coding sequence
  source 1..5139: mol_type = other DNA
atgggccgggaccagcgggccgtggccggccccgccctgcggcggtggctattgctgggcaccgtgaccgtgggattcttggcccagtcagtactggccggagtcaagaagtttgatgtcccttgcggtggccgggactgctcggggggatgtcagtgttacccggagaagggcggccgaggccagcctggcccggtcgggccacagggttataacgggccacctggactacaggggttcccaggcctgcaggggagaaaaggcgataaaggagagcggggtgcacccggcgtgaccggacctaaaggggatgtgggggcacgtggcgtgtctggcttccccggcgcagatggcattcctgggcaccccggacaaggggggcctagaggacgcccaggttacgacggatgcaatggaactcagggggacagcggccctcagggtccgccgggaagcgagggctttactgggcctccaggaccacagggacctaaaggccaaaagggcgagccatatgcgcttcctaaggaggagcgcgatcggtataggggcgagcccggggagcctggccttgtggggttccaggggccgcccgggcggcccggacacgtggggcaaatggggcctgtcggcgcccctggccggccgggccctccagggccccctgggccgaagggtcaacaagggaaccgcggtttgggcttttacggcgtgaaaggggaaaagggggacgtgggtcagcccgggcccaatggaattccaagtgatacattgcaccccataatcgcccctaccggagtgacattccaccctgaccaatataagggcgaaaagggcagtgaaggcgaaccgggaatccgaggaatttccctgaaaggcgaagagggcataatgggttttcccggcctcagaggttatcctgggctctcgggcgagaagggttcccctgggcaaaagggatccagagggctcgacggctaccagggacccgacggccccaggggccctaaaggcgaggctggtgacccagggcctccaggactacctgcttactctcctcatcctagccttgccaagggagcccgtggcgaccccggctttccgggggctcagggggagcctggcagtcaaggtgaaccaggcgatcccggactacctggtccacccgggctgagtatcggagacggagatcagcgcagaggcttgcccggtgaaatgggccccaaaggatttatcggtgatccagggattccagcactctacggggggccccctggcccagacgggaagcgcggccctccaggtccccctggactgcctgggccgcccggccccgacggtttcctgtttgggctgaaaggggcaaagggcagggccggatttcccgggcttccagggtcaccaggagcaagaggtcctaaaggctggaagggtgacgcgggtgagtgcaggtgcacagaaggtgatgaggcaatcaaggggctgccagggttgcctggtcccaagggattcgcaggcatcaatggagaacccggtcgtaagggcgataggggcgatccaggacagcatggccttccaggatttcccggtttgaagggggtgcccggaaatattggcgccccgggtccgaagggggcgaaaggcgatagtaggacaatcacaacaaagggtgagcggggccaacctggagtacccggtgtccctggcatgaaaggggacgacgggtcccctggaagagacggtctcgacggtttccctggcctgcccgggcctcctggtgacggcattaaaggtccccctggcgaccccggctacccaggcatcccaggtacaaaaggaaccccaggcgaaatggggccaccaggactcgggttgccggggctgaaaggccagagaggcttccctggagacgccggtcttccaggccctcccggatttctcggcccacctggtcccgcgggcaccccagggcaaatcgactgtgacaccgatgtcaaaagggccgttgggggggacagacaggaggccattcaacccggttgcataggggggcctaagggattgcctggcctgccagggcctcctgggcctaccggagctaagggattacgtgggattcccggctttgctggggccgacggcggccccggcccccgcggcctcccaggagatgccggaagagagggatttcctggaccccccggctttatcggtccacgtggaagcaaaggggctgtcggccttccaggcccagatgggtctccgggccctatcgggctgccaggccccgacggaccacccggcgaacgcggtctccccggagaggtccttggtgcacagcccggacctagaggcgacgcgggggtcccgggtcaacccgggttaaagggactgccaggcgacagaggcccgcctgggttccggggatctcagggtatgcctggcatgcccggcctgaagggtcaaccaggattacccggtccaagtgggcagcccggtctatacggccctccaggactgcatggatttccaggtgcccctggccaggagggacccctggggctccccggaatacccggcagagagggactcccaggggaccgcggcgacccgggagatacaggagctcctggacccgtggggatgaaggggttgtctggtgaccggggagatgccggtttcactggggaacagggccaccctggctcccccggatttaaagggattgatggcatgcccggaactcctggcctcaagggggatcgaggcagccctggaatggatgggttccaagggatgcctggcctaaagggccgtcccggatttcctggctctaagggtgaagcaggcttttttggtatccctggactgaagggtctcgcaggggagcccggcttcaagggcagtcgtggcgacccggggccacctggccccccacctgtgatccttcctggaatgaaggatatcaagggtgaaaagggcgatgaggggccaatgggcctgaagggctacctcggcgccaaaggaatacagggaatgcctggaatccccggtctcagtggcattccgggtctgcctgggaggccagggcatatcaagggggtcaaaggcgacattggcgtccctgggatccctggcctacccgggtttcctggcgtggcaggacccccgggcattaccgggttccccgggttcatcggctcgagaggcgataagggcgcgcctggccgagcgggcctttacggagagatcggggccacgggagactttggtgatatcggcgatacgattaacctcccgggaaggcccggtctgaaaggggagcggggcacgaccggcattcctggactgaagggtttttttggagaaaaggggacagagggcgatattggctttcccggcatcacgggggtgacaggggtgcaggggccaccaggcttaaaaggacagaccgggttccctggcctgactggacctcccggatcgcaaggcgagttagggaggattgggttacctggcggaaagggcgacgacggatggcccggggcgccgggcctgcctgggttccctggtctgagaggtatcaggggacttcacggcttacccggcaccaaggggtttccggggagtccaggaagtgatatccatggagatccgggcttccctggacctcctggtgagcgaggagatcccggcgaggccaatacactccccggcccagtgggggttcccggccagaagggcgaccagggagctccgggagagcgcggcccaccggggtccccagggctccaggggtttccaggcatcacccctcctagcaatatctcaggggctcccggggataaaggcgcccctggcattttcggcctgaaagggtatcgcgggccaccaggcccccccggcagcgctgctctgcccggctccaagggtgacacgggaaatcccggtgcgcctggcacccctgggaccaagggctgggccggcgacagcgggccccagggccggcctggggtttttggcctcccgggagagaagggacctcgcggagagcagggctttatgggcaacacaggacctacaggagccgtgggtgacaggggtcctaagggccctaaaggcgaccctggattccctggtgcacccggcaccgtgggggcccctggaattgcaggcatccctcaaaagatcgctgtgcaacccggcacagtgggcccgcaggggaggcggggacccccaggtgcacctggggagatgggtccccagggccccccgggcgaacctggtttcagaggtgcacctggtaaggctggtccgcaggggcgcgggggggtgtctgctgtcccgggtttcagaggcgatgaggggccgattggtcaccaggggccaatcggacaggaaggtgcccctggccggccaggctcccccgggctacccggaatgcctgggcgcagtgtttccatcggctacctgctcgtaaagcactcgcagactgaccaggagcccatgtgccccgtgggcatgaataaactatggagcggctattctctgctgtatttcgaaggacaggagaaggctcacaatcaggatctgggactcgctggttcttgcctggctagatttagcaccatgccattcttatattgtaatcctggcgacgtctgttattacgcaagccgcaacgacaagtcttactggttgagtaccaccgccccactgccgatgatgcccgttgccgaagacgagattaagccatatatttcacgctgcagtgtgtgcgaagctcccgccatagcaatcgccgtgcattcacaggacgtgtccattcctcattgccctgccggctggcgctctctgtggatcggctacagctttctgatgcataccgccgcaggggatgaaggcgggggccaatctcttgtatctcccggcagctgtctggaagattttcgggctactccgttcatcgaatgcaatggagggagagggacatgccactattatgccaataaatactcattctggctcacaacaatacctgaacagagtttccaaggctctccaagtgctgacacactaaaggccgggttaatccgtacgcacatctctcgctgtcaagtctgtatgaagaatttatag

SEQ ID NO: 23601 - DNA, 318 bp, synthetic construct
  misc_feature 1..318: note = Description of Artificial Sequence: Synthetic coding sequence
  source 1..318: mol_type = other DNA
atgggccgggaccagcgggccgtggccggccccgccctgcggcggtggctgctgttgggcactgtaacagtgggctttctcgcacagtcagtgctcgcgggagtgaagaaatttgacgtcccctgcgggggacgggactgcagcgggggttgtcagtgctatccagagaagggcgggaggggacagcccgggcctgtggggcctcagggctataatgggccacccggccttcaagggttccctgggcttcagggtaggaagggagacaaaggggagcgaggtgccccgggagttacggggccaaaaggagacgtgtag

SEQ ID NO: 23602 - DNA, 4497 bp, synthetic construct
  misc_feature 1..4497: note = Description of Artificial Sequence: Synthetic coding sequence
  source 1..4497: mol_type = other DNA
atgagcgcccggaccgccccccggccccaggtgctgctgctgcccctcctgctcgtgctgctcgctgccgctccagccgctagtaaaggctgcgtgtgtaaggataaagggcagtgtttctgtgacggagctaagggcgagaagggcgaaaagggattccctggcccacctggctcacctggacagaagggctttacgggccccgagggtttacccggcccccagggccccaaatctttcagagctattccgtcttattccggtggtaaatcactgcagggcattagtgggttaccaggattttcaggctctccagggctgccgggaacgcctggcaatactgggccttacgggctggtaggggttccggggtgtagcggctctaagggcgaacagggcttccccggactccctggcaccttgggctatcctggtattcctggaattcacaacctgaagatatttaagggagctccagctaaggaggaggacatcgagctggatgctaaaggtgatccgggattgccaggagccccaggtcctcaggggttaccaggaccccctgggttccctggccctgtgggtccgcccgggcctccaggcttttttggcttccccggggcaatggggccgcgggggccgaagagctttgtattaagctcacgaatatccaccaaaggcgagaaaggagtaaagggcctcaccggtcctccgggccctcctgggactgtaattgtcactttgacaggcccagataacaggacggacctgaagggtgagaaaggcgataaaggagccatgggcgagcctggtccgcccggcccttctgggctgcccggggaatcttacggcagtgagaaaggggcacctggggatcctggtctacagggcaagcccggcaaagacggagtcccgggttttcctgggtcggaaggggtgaagggtaacagaggcttcccaggcctcatgggtgaggacggtataaaagaggaaaaaagagatgtagctattgtttcattttctagtaaaacagaatattatgacacctaccaggagaagggcgatgaaggaacgcccggcccgccagggccaaggggcgctaggggcccccaggggaaaaacaagttccggtgtatccccgggagtcagggttcttcccggcccgggctcaggggggcccccgggtggccagggctcaagggcagcaagggcgagagggggcgcccaggcaaggacgccatgggcactcccggctctccaggctgcgctggatcaccaggactccctggcagccctggccccccgggtcccccaggagatatcgtttttagaaaaggccctcctggcgaccatgggttaccaggctaccttggcagccccgggattccaggcgtggatgggcctaagggggagccgggtcttctttgcacccaatgtccctacattcccggaccgcctggcctgcctggcttgccaggactgcatggggtgaagggcataccagggcgccagggagcagctggtctgaagggctcacccgggagcccgggaaatacaggactgcctggtttccctggattccctggagctcagggcgatcccggcctgaagggagagaagggtgagaccctccaacccgagggacaggtcggagttcctggcgacccagggctccgcggccagcccggacgaaaagggctagacggcattcctggcactcccggcgtaaaagggctgcccggcccaaagggagagctggccctgtccggtgaaaaaggtgatcagggaccaccaggggatccggggagtcctggctctccagggcctgccggaccagccgggccacctggctatggcccacagggggagccaggcctccagggaacccagggggtgccaggcgcccctggaccacctggcgaagccggtccacggggggagctctctgtttcaacgccagtccccggacctcctgggcctcctggccctccggggcacccaggtcctcaggggccacctgggatcccaggctctttaggtaagtgcggcgacccaggcttgcccggcccagatggtgagcccggcatccctggcatcggctttcctgggcctcctggcccaaagggagaccaggggttccccggcaccaagggaagcctgggctgcccgggcaaaatgggcgaacccggcctccctgggaagcccggcctgccaggtgcaaaaggtgagcctgctgtggccatgcctggcggacccggaacccccggatttcctggcgagagaggtaattctggagagcacggcgagatcggattaccaggcctgccaggcctgccaggcacaccagggaacgaaggcctggacggacctcgaggagatcccgggcagcccgggcccccaggcgagcagggaccaccaggaagatgcattgagggaccaaggggtgcccagggcttgccagggctaaacggcctgaagggacagcaagggcggaggggtaaaactggaccgaaaggtgatcctggcattcccggacttgacagatctggattccctggcgagaccggttccccgggtatccctggacaccagggggagatggggccactgggacagagaggatatccaggcaatcctgggatcctgggaccgcctggcgaggacggggtaatcggtatgatgggatttcctggcgcgatcggcccgccagggccgccaggaaacccggggacacccggccagagaggctccccaggaatcccaggagttaaaggccagagagggacgcccggggcaaaaggtgagcaaggggacaagggtaacccaggaccatcagagattagtcacgttattggggataagggtgaacccgggctgaagggctttgctggcaacccaggcgaaaagggaaaccggggtgtgccaggaatgccggggttgaaaggcctgaaaggactaccgggccccgccggaccaccaggaccaagaggagatcttgggagcactggaaatcccggggaaccaggactaaggggaatccccggaagcatggggaacatgggaatgcccggcagtaaaggaaaacggggcacactcgggtttccagggagggcaggtcgcccagggttgccagggatccacggtctccagggggacaaaggggaaccaggatactctgaggggacaagaccaggtccacccggaccaaccggcgaccccggcctgcctggtgacatgggaaagaagggggaaatgggacagccaggaccaccaggccacctcggccccgccggccccgaaggcgccccagggagtcctgggtcccctgggctgcctgggaagcccggcccgcacggggacctgggctttaaaggaataaagggcctgctgggccccccggggattaggggccctcccggacttccaggatttcctgggagtcccggacctatgggcatacgcggtgatcagggcagagacggaatcccagggccagctggcgaaaagggcgagactggcctgttacgggcacctcctgggccgagggggaatcctggcgcacaaggggcgaaaggagatcggggcgctccggggtttcccgggctccccggcagaaagggggccatgggtgatgccggcccaagaggacctacaggtattgaaggcttccctggacctcctgggctcccgggtgctattatccccggccagactgggaataggggtcccccgggatccaggggtagtcctggagcaccgggacctcccgggccacctggaagccacgttatcggtatcaagggggacaaaggaagtatggggcaccccggccccaaaggtccgcctggcacggctggggacatgggaccacccggcagactcggcgcccccggaacccccggtctgcctggacccagaggcgatccaggattccagggttttcccggagtgaagggagagaaagggaaccctggcttcctgggatctatcggaccacccgggccaataggccccaagggaccaccaggggtcagaggggatcccggaactcttaagataatatcgctacctggcagcccagggcctccagggacccctggagaaccagggatgcagggagaaccggggcctcccgggcctccaggcaacctgggaccctgcggcccacgtggcaagccaggcaaggacggcaagcctggaacccctggccccgctggagagaagggtaacaaaggatcgaagggagagcctgggcccgcaggctccgacggtctgccaggattgaaggggaagcgaggcgattctggaagtcctgccacctggaccactcgtggtttcgtttttaccaggcactcccaaactactgcaatcccctcatgccccgaagggactgtgccgctgtatagtgggttttccttcctgttcgtgcagggcaaccaacgcgcccatggacaagacctagatgcgctgttcgtcaaagtgctcagatcaccctag

SEQ ID NO: 23603 - DNA, 4914 bp, synthetic construct
  misc_feature 1..4914: note = Description of Artificial Sequence: Synthetic coding sequence
  source 1..4914: mol_type = other DNA
atgagcgcccggaccgccccccggccccaggtgctgctgctgcccctcctcctggtgctgctggccgcagcacctgctgcttccaagggctgtgtgtgtaaagacaaaggccagtgtttctgcgacggagcaaaaggagaaaagggagaaaagggtttccccggccctcccggatcccctgggcagaaaggcttcaccggcccggagggtctgcctgggccacagggacctaagtcctttagagccatcccaagctactcaggcggtaagtcactgcaaggcatcagtgggctgccagggttctccggcagcccaggtctgcccgggacacctggcaataccggaccctatggattggtcggggttcctgggtgttcaggatccaaaggcgaacagggcttccctggactgccgggcactctcggatacccaggtatcccgggtatccataacttgaagatatttaagggtgctcccgctaaagaggaggacatcgaattggatgccaagggagatcccggactcccgggagccccaggccctcaggggctcccgggcccacctggttttccaggcccagttggacctccgggaccacctggttttttcggttttccgggggcaatgggaccccggggccctaaatccttcgtgctctcttcgaggatatccacaaaaggggaaaagggcgtcaaagggttaacaggccctccagggcctcctggtaccgtgatcgttactctcaccggccctgataacaggactgatttaaagggtgagaagggcgataaaggggctatgggagagccaggaccgcccggtccatctggcttgccgggagaaagttacggttctgaaaaaggtgccccgggggatcctggactccagggcaagcctgggaaggacggagtccctggttttcctggatctgaaggagttaagggcaataggggcttcccgggtttgatgggcgaagacggaatcaaagaggagaagcgggatgtggcaatcgtctcctttagttctaagaccgagtactatgacacttaccaggagaagggcgatgagggcactcctgggccgcccggacctaggggcgctagaggtcctcaggggaagaacaaatttcgctgcattcccgggtcccagggatcttctcgccccggcttgcgcggagcccctggttggcccggacttaagggaagcaaaggggagagaggacggcccggcaaagacgccatggggacccctgggtcacctggctgcgcaggctcccccgggctgcccggtagtcctgggcctccaggtccacccggggacattgtgtttcgaaagggaccgccaggcgaccatggcctgccagggtacctgggatctccggggatcccaggggttgatggtcctaagggtgagccaggcctcctgtgcacccaatgcccctatatacctggccctcccggcctgccgggactccccggcctgcacggggtcaaaggcatcccaggccggcaaggcgccgccggattgaaaggctctccgggttcccccggcaatacgggcctgcccggcttccctgggtttcctggcgcccagggtgaccccggattaaagggagaaaagggcgagaccttgcagcctgagggacaggtgggcgtgccaggcgatcccgggcttcgcggtcagcccgggagaaagggcttggacggcattccgggcacccccggggtcaaggggttgccaggccctaagggagagcttgccctgtctggtgagaagggtgatcagggcccccccggcgatcctggatcgccaggatccccaggccctgcagggccagcgggtcccccaggctatggtcctcagggggaaccaggcctgcagggaacacaaggtgtgcccggcgcacccggaccgccaggggaggctggtccacgcggcgaactgtcagtgtccacaccagtgcctggcccaccaggccccccaggcccacccgggcatcccggtccgcaggggccccccgggatacctggcagtttgggaaagtgcggcgacccaggccttcctggaccggatggggaacctggcatccccggcattggtttcccgggccctcccggtcctaagggagaccaggggtttccaggcactaagggatctctcggctgtcctgggaaaatgggagaacccggcttgccaggtaagccgggtttgccgggggctaagggcgaacccgcagtggctatgccgggcgggcctgggacccccggttttcctggtgaacgcggcaattctggcgagcatggcgagattggactacctggcttacccgggctccccggcacaccaggcaacgagggccttgatggacctaggggcgacccagggcaaccaggtccccctggtgaacaaggcccccctgggcgttgcatcgagggtcctcggggggctcagggacttcctggactgaatggactgaagggacagcagggaaggagaggcaaaactggtcctaaaggggaccccggaattcccggactggaccgcagtggctttcctggcgaaaccggtagcccaggaattcctggtcatcagggcgagatggggcctttagggcaaagagggtacccaggcaaccctggcattctcggcccacccggcgaagacggtgttattggcatgatgggttttccaggggctattgggccccccggtccgcctgggaatccaggcactccgggtcagcgagggagcccgggcattcctggcgtcaaaggtcagcgggggaccccaggcgccaagggggagcagggggataaggggaacccagggcctagcgagatcagccatgttattggtgacaaaggggagcccgggctgaaagggtttgctggcaatcccggggaaaagggtaatcgtggagtcccaggaatgcccggtctcaaaggactgaagggactgccaggaccagccggacctcctggtcccaggggggacttgggatctacggggaaccccggcgagcctggcctgcggggtatccccggctcaatgggaaacatggggatgccagggtccaagggcaaaagaggaacgttggggttccctgggagagcaggacgtccaggcctgccaggcatacatggtttgcagggcgataagggagagccaggatacagcgagggcacccgacctggacccccaggtccaacgggcgatcccggtctcccaggggacatggggaaaaagggagaaatgggtcaacccgggccccctggtcacctcggacccgccgggccagagggtgcaccaggctcgcctggaagcccaggccttccaggcaaacctggccctcacggggacctggggttcaagggcattaaggggttactagggccccctggtatacgcggaccccctggcttgcccggcttcccgggaagccctggccctatgggaatacgcggggaccagggacgcgacggtatcccaggacccgcgggagaaaaaggcgagactggcctgttgcgcgctcctcctggtccgcgaggcaaccctggggcccagggggcgaaaggagaccggggtgctccaggcttcccgggtctgccaggtcggaagggagcgatgggcgacgcaggcccaagaggccctacaggtatagaaggcttccccggccctcccggtctccctggtgcgattattccaggccaaactgggaacagaggcccacctggctccagaggctctccgggggcccccggccctcccgggccccctggtagtcatgtaatcgggatcaagggagacaagggctcgatgggccaccccggtcctaagggacctcccggcacggcgggagacatggggccaccaggaagactgggggcacccgggacccctggcctacccggccctcgtggggacccggggtttcagggcttccccggagtgaagggtgaaaaaggtaatcctggttttctgggctccatcgggccgcccggccccatcggcccaaaaggccctcccggagttagaggagatcccggcacactaaaaataatctctctgccaggatcccctggcccacctggcactccaggagaaccggggatgcagggcgagcctggacccccgggaccacctgggaacctaggcccatgtgggccacgtggcaaaccgggtaaagacgggaagccaggcaccccaggaccagctggtgaaaagggaaataagggttcaaaaggagaaccaggcccggcaggttcagatggcctcccaggactaaagggaaagcgaggtgacagtgggagtcccgccacatggacaacgcgaggtttcgtgttcacacgccattcccagacaacagctattccgagctgtcctgagggaaccgtgccattatattccgggttttctttcttattcgtgcaaggcaaccagcgcgcacacggacaggacttgggaaccctgggaagctgcctgcagcgctttacaacaatgccgttcctcttttgtaatgttaatgatgtatgcaactttgcctcaagaaacgactatagctactggctcagcactcctgccctgatgcccatgaacatggcccctatcaccggccgtgccctcgaaccatacatcagcagatgcacagtgtgcgaggggcccgctatcgcgattgctgtacattcacaaaccacagatatccctccctgcccacatggatggattagtctgtggaaaggcttttcatttatcatgaaggcatatagtattaactgcgaaagctggggaatcaggaaaaacaataagagcctgtccggagtccacgaagagaagacactcaagctcaaaaagaccgccgagctgcttttttttattctgaagaacaaggtcatgactgagcacgcagtaatttag

SEQ ID NO: 23604 - DNA, 4485 bp, synthetic construct
  misc_feature 1..4485: note = Description of Artificial Sequence: Synthetic coding sequence
  source 1..4485: mol_type = other DNA
atgagcgcccggaccgccccccggccccaggtgctgctgctgcccctactgctcgtgctgctggccgccgctccggccgccagtaagggttgtgtttgcaaggataaaggacagtgcttttgcgatggggctaagggagagaaaggtgagaaaggcttccccggtccacctgggtcacccggtcagaaaggcttcaccgggccagaggggctccctggcccccagggacccaaaagcttcagggctattccaagttactccggaggcaagtcactgcaggggattagtggcttgcctggcttctcaggaagtccgggcctccctggaaccccgggcaataccggcccctacggcctggtcggggtgcctgggtgctctgggtcaaaaggtgagcaggggtttcctgggttacctgggaccttgggctaccccgggataccggggatccataacctgaagatttttaagggggcaccagccaaagaggaagatatcgagctggatgccaagggagatccaggattgcccggagctccaggaccacaagggctgccgggccctcccggtttcccgggccccgtgggtccacctgggcccccgggtttttttggcttccctggggccatgggaccacgcgggcccaaatccttcgtgctgtcaagccgcatctctactaagggcgagaagggagtaaaaggcctgaccggcccccccggtccccccgggacagtgatcgttactctcaccgggcctgacaaccggactgatctcaagggcgagaagggggacaagggggccatgggtgagccgggtccacctggaccatcagggcttcccggcgagtcatacggctctgagaagggtgctcctggggaccctgggctccaaggaaagcccggtaaggatggtgttcccggctttcctggctcagagggggttaagggcaatcgcggatttccaggcttaatgggtgaggatggaataaaagaggaaaagagggacgtggctatagtgtcattctcgtccaaaactgaatactacgatacttatcaggaaaagggggacgaggggacacccggaccacccggtccacggggagctcgaggtccacaagggaaaaataagtttaggtgtatccctggaagtcaggggagtagcaggccagggttaagaggagctccggggtggcctgggctgaagggaagcaaaggagaacgagggagaccaggaaaagacgccatggggacacctggtagccccggctgcgcgggctctcccggactcccagggtcgcccggacccccgggaccccctggcgatatagtgttccgcaaaggcccacctggagatcatgggctgccaggttaccttggttcacccggaatccccggcgtggatggccctaagggggagcccggtctcctttgtacacaatgcccatacatccctggaccaccaggcttgcctggattgcccggcctgcacggagtgaagggcatccctggccgtcagggtgctgccgggctgaaaggcagccccgggagcccaggtaacactggactgccgggattccctggattccctggcgcacagggggatcccggtttaaagggtgagaagggagagactcttcagccagagggtcaagtaggggtgccgggagaccctggcctgagagggcaacctggccgaaaaggattagacggcattcccggaaccccgggggtcaaggggctgccaggacctaagggtgaacttgctctcagtggcgagaagggtgatcagggccccccgggagaccctgggtcacccggtagccccggccccgctggaccggccggcccacctggatatggcccccagggcgaacccggtctgcagggcacccaaggagtacccggggctcccggaccgcctggtgaggctggacctcgcggtgagctgtctgtcagtacgcctgtgcctggcccgcccggccccccagggccaccaggacacccaggtccacaaggacccccaggcattcctggtagcctggggaaatgcggtgacccaggcctgccgggacctgacggcgaacctggaatcccggggatcggtttcccgggcccacccggccctaagggcgatcagggctttccaggtactaagggaagcctagggtgtccgggcaaaatgggcgagcctggtctccccgggaaaccaggattaccaggcgctaagggagaacccgcggtcgcaatgccaggcggacccggaacgccaggtttcccgggcgagagaggcaactcaggcgaacacggtgaaatcggactgcctggcctgcctgggttaccgggaacccctggaaacgagggcctcgacggaccaaggggagatcctggacaaccaggccctcccggcgaacagggaccaccaggtcgctgcattgaagggcctcgaggagcacaagggctgccgggactgaacgggctgaagggccaacagggacggaggggcaagaccggcccgaagggcgatccaggcattccggggctggacagaagcgggtttccgggcgaaaccgggtcccccggtatccccggccaccaaggggaaatgggaccactggggcagagaggctaccctgggaatcctggcattctgggaccaccaggcgaagacggggtgatcgggatgatgggtttccccggcgctattggtccacctggacctcccggcaacccgggcacacccggtcagagaggctcccctggcattccaggggtgaagggacagagggggacaccaggcgctaaaggcgagcagggtgataagggtaaccctgggccctctgagatttcacacgttatcggagataaaggggagccaggactgaaggggttcgccggcaaccccggcgaaaagggcaacagaggcgtgcccgggatgcccggccttaagggcctcaaggggcttccaggacccgccggcccgccaggaccaaggggcgatctcgggagcaccggaaatccaggggaaccgggattaagagggattccaggatccatgggtaacatgggaatgccaggctccaaggggaaacggggcaccctgggatttccagggcgcgctggtcggcccgggctccccggcattcacggactgcaaggcgataagggcgaaccgggatatagcgagggcacacgcccgggtcctcccggtccaacaggcgatcccggcctacctggcgacatgggaaagaagggagaaatgggacagcctggccccccgggccatttgggccctgctggacccgaaggggctccagggtctcctggctcgccagggttacccggcaaacctggccctcatggtgatctgggctttaaggggatcaaaggccttctgggcccccccgggattcgtgggccacccggactccctggcttccctgggagtccaggaccaatggggattcgcggagatcagggccgtgacggtatcccaggccccgcgggggagaagggagagaccggactcctccgcgcacctcctggtccccgcggtaaccccggcgcacagggtgcaaaaggcgaccgcggtgcccccggcttccctggattgccggggcgcaagggcgctatgggggacgcagggccgagggggccgacaggcatcgaggggtttcctggcccaccagggttacctggggccatcattcccggtcagaccggcaaccggggtcctccaggatcccgggggtcccctggtgctcctggacctcctggcccccccgggtcacacgtgatcggcattaagggtgacaagggctcgatgggtcaccccggacccaaagggccaccgggaaccgccggcgacatgggtccacctggcagactaggcgcccccgggactcctggactgcccggaccacgaggagatccaggattccaaggatttccaggagtaaagggcgagaaagggaacccaggatttctaggctccataggacccccaggtccgattggtcctaaaggccccccaggcgtgcgcggcgaccccggcactctaaagatcataagtcttccaggctcaccaggaccaccaggcacccctggagaacccgggatgcagggcgaacctggtccgcccggtccccctgggaacctgggtccttgcggccctcgtggcaagccagggaaagatggtaagcccggcaccccagggcctgcgggagagaagggaaacaaagggtctaagggggagccaggcccggctggctccgatggtcttccaggcttaaaggggaagagaggtgattccggcagtcctgcaacatggactacccgggggtttgtcttcaccaggcactctcagacaacagcaattccatcatgtcctgaagggactgtgccactttattccggcttctccttcctgtttgtgcagggtaaccagcgcgcccacgggcaggatcttgaatcactgttccaccagctgtag

SEQ ID NO: 23605 - DNA, 4275 bp, synthetic construct
  misc_feature 1..4275: note = Description of Artificial Sequence: Synthetic coding sequence
  source 1..4275: mol_type = other DNA
atgagcgcccggaccgccccccggccccaggtgctgctgctgcccctcctgctggtgctactggcagccgcacctgcagcaagcaagggctgtgtatgtaaggataagggccagtgtttttgtgatggtgctaagggtgaaaagggagagaaaggtttcccagggcctcccgggtctccaggccagaagggattcaccggacccgaggggcttccaggcccgcaaggaccaaagtctttccgggccataccaagctattcaggagggaagtccctgcaggggatctcagggcttcccggcttcagcggttcaccgggactgcctggcacccccgggaacactgggccttatggtctcgtaggggttcccggttgtagcggatcaaagggagagcaaggattcccggggctgcctgggaccctcggttacccagggatcccaggtattcacaaccttaaaatattcaaaggagcacccgctaaggaagaagatatcgagctggacgctaagggcgatcctgggctcccgggagcccccgggccacaggggctgccaggacctccgggattccccggccctgtggggcctcccggcccacctggtttctttgggtttccgggagctatgggaccccgcggaccgaaaagtttcgttctgtcctccaggatttccacaaagggtgaaaaaggcgtgaaagggctcacggggcccccgggacctcccggaaccgtgatcgtgactctcaccggcccagacaatcgcacagacttgaagggcgagaagggcgataagggcgccatgggtgaaccaggtcctcctggaccttcaggcttacccggcgagtcttacggctctgaaaaaggggctccgggagatcctggcctgcaagggaagccagggaaagacggagtgcctggtttccctggttcggagggtgtgaagggcaaccgcggattccccgggctgatgggggaagacggaataaaggaggaaaaacgcgacgtggccattgtgtcattttcctccaagacagagtattatgatacgtatcaagaaaagggcgacgaggggacgccggggccacctggccctcgtggcgctagagggccacagggtaaaaataagtttagatgcattcctggctcccagggcagctcaaggcctggcctgagaggtgctccagggtggccgggccttaaggggtcgaagggcgaaagggggagacccggcaaggacgctatgggcacccctgggtccccaggatgcgccggctccccgggcctgcccggctctccaggcccccccggcccacctggggacatcgtattcaggaagggaccaccaggggatcacggcttgcccggttatctaggtagcccgggtattcctggagtcgacggtccgaagggcgagccaggcctactgtgcacacagtgtccgtacatacccggccctcctggattgcctggactgccgggcctgcatggagttaaaggcattccaggcagacagggcgctgccggtctgaaaggcagcccaggaagccccggaaatacaggcttgccaggatttcccggtttccctggggctcagggcgatcccggacttaaaggagagaagggcgaaacactccaacccgaaggccaggtgggcgtgccaggcgaccccggcctcagaggacagccggggaggaaaggcctggatgggatcccaggaacacccggtgtgaaggggcttccaggaccaaagggcgagctggccctgtctggggaaaaaggtgaccaaggcccacccggggaccccgggtcccccggtagccctggtcccgccggacctgccgggccaccgggttatggcccccagggcgaaccgggactgcagggcacccagggtgtccccggcgctccagggccacccggcgaagctgggccacgcggtgagctctccgtaagcacgcccgtccctggacctcccggtccacccggacctccaggccaccctggccctcagggccctcctggaattcctgggtccctcggtaagtgtggcgatccagggctgccggggccagatggcgagcctggtattcccggaattggatttcctggcccgccgggcccgaaaggagaccaggggttcccaggcaccaaagggtccctcggttgtccaggaaaaatgggagaacccggactaccgggcaagccaggcttaccaggcgcaaagggggaacccgccgtggccatgccaggagggcctggcactcccggatttccaggcgagcggggtaactctggcgaacatggtgagatcggcctccctggcctgcccggacttccagggacgccaggcaatgaagggctagatggaccccgcggggaccctggtcagccaggtccgccaggtgaacaaggcccccccggcaggtgcattgagggcccgagaggcgctcagggactgcctggactaaatggcctgaaaggacagcagggccggagaggcaagactggtccaaaaggggacccggggattcccgggctggacagatcaggctttcccggcgagacaggcagcccagggattcctggacatcagggggaaatgggcccactcgggcaaagaggctaccctggcaacccggggattctgggccccccaggtgaggatggcgtaatcggtatgatgggcttccccggtgcaattgggccgccggggcctccaggcaaccctggtacacctggtcagcgagggtcaccaggtattcctggggtgaagggtcaacgagggactcccggagccaagggcgagcagggagataagggcaatccaggcccttcagagattagccatgtgataggtgataaaggagagcccgggctgaagggcttcgcaggaaatcccggcgagaagggcaataggggggttccaggcatgccaggcctaaaaggactcaaagggttgccaggccctgccggccctccgggacccaggggcgacttggggtctaccggtaacccgggggagcctggactgcggggaatccctggctcgatggggaacatgggtatgcctggcagcaagggtaagagaggaacactgggtttcccaggcagagccgggcgacctggtttgcccggcattcatggactgcagggagataagggcgagcccgggtactctgagggcactaggccagggccgcccggacctactggagacccaggcctcccaggtgacatgggaaaaaaaggggaaatggggcaacccggccctcccggccatctgggccccgcaggtccagagggagcccccggaagccctggctctccaggactgcctggcaagcctggcccgcacggggacttgggctttaaaggcatcaagggactattgggaccgccaggcattagagggccaccaggccttccaggattccctggtagtccagggccgatgggaatcaggggcgatcagggtcgagatggaatccccggccctgctggtgaaaagggcgaaacaggcctacttcgggccccgcctggtccccgcggaaatcctggtgctcaaggggcaaagggggaccgcggcgctcctggcttccccggactgcccggcagaaagggggccatgggggacgctggcccacggggacctaccgggatcgaaggattccccggccctccaggactgccgggtgccatcattcccggacagacaggcaataggggccctccaggcagcaggggatcaccgggcgcccccgggccccccgggccccccggttcacatgttatcgggatcaaaggggacaagggctccatgggccaccccggacccaagggacccccaggcaccgctggagatatggggccccccggacgcctgggtgctcccggcaccccgggcctgccagggccacgaggcgaccccggtttccaggggttccctggagtgaagggcgagaaaggtaacccaggctttttaggctccatcggcccgcctggccctatcggacctaagggtccacccggtgtacgaggcgacccaggcacactgaagattatctctctgcctggctctcctgggccccctgggacacccggggagcccggtatgcagggcgaaccaggacctcccggacctccaggcaacctgggcccctgcggcccacgcggaaaacctggaaaggatggaaagccagggacgcctggccccgcaggagagaaaggtaacaaaggctctaaaggcgagccagagtccttgtttcaccaactgtag

SEQ ID NO: 23606 - DNA, 5013 bp, synthetic construct
  misc_feature 1..5013: note = Description of Artificial Sequence: Synthetic coding sequence
  source 1..5013: mol_type = other DNA
atgagcgcccggaccgccccccggccccaggtgctgctgctgcccctcctgctggttctgctggctgcagccccggcagcctcaaaaggttgcgtctgcaaggataaagggcagtgcttttgtgacggggccaaaggggagaagggcgaaaaaggcttcccaggtccccctggaagtccggggcagaagggttttactgggcccgaagggctgcctgggccacaggggcctaagggattcccagggcttccagggctgactggcagcaaaggggtgcgggggatctctgggctgcctggctttagcggttctccaggcctgcccggcaccccagggaacaccggaccttacggtctggtaggcgtgccaggctgcagcggatccaaaggagaacaaggattccccggattgcccgggaccctggggtatcccggtatccccggagcagccggacttaaaggccagaagggagctccagcaaaggaggaagacatagagcttgatgccaaaggcgatcccgggttaccaggcgcccccgggccccaaggcctacccggcccgccagggtttccaggccctgtggggccacccggtcctccaggcttctttggctttcccggagcgatgggacccagaggccctaagggccacatgggagagagagtcattggccacaagggcgaaaggggcgtcaaggggctaacaggaccacccggacctccaggcaccgtgatcgtgacactgaccggaccagataaccgcacagacctgaaaggagaaaagggtgataagggggccatgggcgaacctggcccacctggaccctcaggcctgccaggggagagttacggcagcgaaaaaggagcccccggtgatcccggactccagggaaagccaggaaaagatggggtgcccggcttcccagggtctgagggggtgaaaggcaataggggttttcccggccttatgggcgaggatggcattaaaggacaaaagggcgacatcggtccgcccgggttccgggggcccaccgagtactacgatacctaccaggagaaaggcgacgaggggacacccgggccccccggccctaggggcgctagagggccacaggggccgtctggcccgcctggcgtccccggttcaccgggatctagtcgcccagggctgcgtggcgccccgggttggcccgggctcaaaggaagtaagggagaacgtggcaggccaggtaaggacgcaatgggcacacccggtagcccaggttgtgccggcagccctggattgcctgggtcgcccgggccccctgggccaccaggcgatattgtgtttcgcaaaggcccgccaggtgaccacggtctccccggttatctgggttcaccaggcatccctggggtcgatgggcctaagggtgaacctggccttctgtgcacccagtgtccatacatcccaggcccgcccgggctcccggggctgcctgggctgcatggtgtaaagggaattcctggcaggcagggtgccgcgggactgaagggcagtcctggcagcccaggaaataccgggttacctggcttcccgggatttcccggagcccagggagacccaggactgaaaggagagaaaggcgaaaccctccagcccgaggggcaggtgggggtcccgggcgacccaggattgcgcggccagccaggacgcaaagggcttgacggaattcccgggaccccaggggtgaaaggcctgcccgggccaaaaggggagctcgcactcagcggagagaagggggaccaggggccccctggtgaccccggttcccctggcagtccagggcccgctggcccagcaggtccacccgggtacggcccgcaaggagagccaggcctgcagggaacccaaggagtgcctggagcgccaggcccccctggcgaagccggtcctagaggagaactgtcagtgtccactcctgtgcctggtccgccaggtccacctggacctcctggccacccaggaccccaaggccccccaggaatcccaggtagcctcggtaagtgtggggacccagggcttcccggtccagatggcgagcctggaatccccggcatcggctttccaggaccacctggacctaagggtgatcaaggcttccccggaacaaaaggatctctcggatgtcccggaaaaatgggtgagcccggactgcccgggaagcccgggctacccggggctaaaggtgaaccagccgtggccatgcccggaggacctgggaccccggggtttccgggggaacgtggaaatagtggagagcacggcgaaataggattgccaggactgcctggattgcctgggactccaggaaacgaaggcctggatggccctcgcggcgatcccggtcagccagggccccctggtgaacaaggtccgccgggcagatgcattgagggacctaggggtgcccagggacttcccggattgaacgggttgaaaggccagcagggccggcggggtaagacaggaccaaaaggagaccctggaatccctggacttgaccggagcggattccctggagaaacgggcagccccggtattccaggtcaccagggtgagatgggccctctgggccagcgcgggtatcctggcaatcctgggattctaggcccccctggcgaagacggcgtgatcggcatgatggggttccctggggccatcggtccacccgggcctcccggaaatcccggtactccggggcagaggggctcacctgggatcccaggggtaaagggacagcgcgggacgccaggagctaagggcgagcaaggcgacaaaggaaacccaggcccttccgagatttcccacgtgattggggacaagggtgagcccggtctgaagggcttcgccggcaatcccggtgagaaaggcaaccgcggagtgccaggaatgccaggattaaagggattgaagggtctccctgggcctgcaggacctccagggcccagaggtgacctgggcagtacaggaaatccaggggaaccgggactgaggggaatccccgggtctatgggtaacatgggcatgccaggttcaaagggaaaacgggggaccctagggtttccggggcgggctgggagacccggtctcccaggcatccatggcttgcagggagacaagggggagcccgggtacagcgaaggcacgcggccgggtcctccaggtccgactggagaccccggtttgcccggggacatgggcaagaaaggagagatgggtcagcctggaccccccgggcatctgggacctgccgggccagagggtgcgcccggatcaccaggcagtccaggactgcctggcaaacctggccctcatggggatctggggttcaaaggcattaaagggctactcggcccacctgggatcagaggtccccccgggctgccaggttttcccggctcacccggacccatgggaattcggggcgaccagggacgtgatgggataccagggcctgctggagagaagggcgaaaccggcttgcttcgggcacctccgggcccgagaggcaaccccggggcacagggagcaaaaggggataggggcgcccctgggtttccgggcttacccggccggaaaggtgctatgggggatgcaggacctcgtgggcctacaggtatagaggggtttcctgggccgcctggactaccaggagccatcattcccggacagaccggtaataggggtccacccggaagtcgcgggtcccccggcgctcccggccctcctggacctcctgggagccatgttatcggtattaaaggagacaaaggctccatgggccatcctggcccgaaaggccctccgggcactgctggagatatgggaccccccgggcgcctgggcgccccaggaacaccaggcctacccgggcccagaggggatccaggatttcagggatttcctggcgtgaagggggaaaaaggcaatccaggctttctgggttcaatcggccctcctggcccaattggccccaaaggtcctccaggcgtgcggggtgaccccggcaccctgaagatcatcagtctgccaggatctccaggcccccccggaacccccggggaacctgggatgcagggagaacccggccctcccggaccacccggcaacctgggcccttgcggacctcgaggaaaaccggggaaggatggcaagccggggaccccaggccccgccggcgaaaaggggaataagggatcgaagggagaacctgggccggctggatccgacgggctaccagggctcaaggggaagaggggcgatagtggatcgccagcaacttggacaacccgaggcttcgttttcactaggcattctcagacgacagcgatccctagctgccctgaaggcaccgtgcccctgtactcaggcttttcgttcctgttcgtccagggtaaccagagagcccacggccaagacctaggaaccctgggctcctgtctacagaggtttaccacgatgccattcctattttgcaatgtaaacgatgtctgcaattttgctagtagaaatgactacagttattggttgagcacgcccgctctgatgcctatgaatatggcccccattaccggcagggcgctggaaccctatattagtagatgcaccgtgtgtgagggtccggcgatcgcaatcgcggtacacagtcagactacagatattcctccctgcccccacggatggatcagtttgtggaagggcttctccttcatcatgttcacttccgctggctctgagggcacaggacaggcattggctagcccgggttcctgtcttgaggaatttcgcgcctctccatttctcgagtgtcacggacggggaacctgtaattactattcaaacagttattctttttggctggcctctctgaatcccgagaggatgtttcggaaacccattccgtccaccgtgaaggccggcgagctggagaaaatcatatctagatgccaggtttgcatgaagaaacggcattag

SEQ ID NO: 23607 - DNA, 4500 bp, synthetic construct
  misc_feature 1..4500: note = Description of Artificial Sequence: Synthetic coding sequence
  source 1..4500: mol_type = other DNA
atgatggccaactgggccgaggcccggcccctgctgatcctgatcgttcttctgggtcagtttgtgagtatcaaagcgcaggaagaagacgaggacgaagggtacggagaggaaattgcttgtacacagaatggtcagatgtatctgaatcgtgatatatggaagcctgccccttgccaaatttgtgtctgcgacaacggggctatcttatgcgataagatcgagtgccaggatgtgttagattgcgctgaccctgtaaccccaccaggtgaatgttgtcctgtatgttctcagactccaggcggcgggaatacaaacttcgggaggggacgaaaagggcagaaaggtgaacccggcctggtccccgtcgtcacagggattcgaggaagaccgggccctgcgggaccacctggttcgcagggcccacgaggcgaacggggccccaaaggaaggcctggacctaggggcccacagggaattgatggcgagccaggcgtgcctggccagcccggagcccccgggccacctgggcacccttcccatccaggcccagatggcctgtcaagaccattcagcgcgcaaatggccggcctggatgagaaatcaggcttgggaagccaagtggggctgatgcccggcagcgtgggtcctgtgggacctcgaggaccacagggcctgcaaggccagcagggcggcgctgggcctactggaccgcccggtgaacctggggatcccgggcccatggggcctatcggctcccgcggccccgaaggcccccccggaaagcctggtgaggatggtgagccagggcgtaatggaaacccaggggaagtcggattcgccggcagtcccggagctcgcggctttcctggcgctccaggcctgccgggacttaaaggccatcggggacacaaggggctggaggggcctaagggagaagtgggggcacctggtagcaagggcgaggcaggacctacaggacccatgggtgccatgggtcccctcggccccaggggtatgcccggagaaagaggacgcctgggaccccaaggagctcctgggcaacggggtgcacatgggatgccaggaaaacctggccccatgggtccactgggcatacccggcagttcaggctttccgggcaatccaggcatgaagggcgaagccggtccgactggtgcccgcgggccggaaggcccgcaaggacagagaggcgagaccggaccacctggaccggttggctctcccggtctcccgggtgctataggcactgacggaaccccgggtgctaagggccctaccggaagccccggaacatctggacctcctggcagtgccggacctccgggatctccaggtccacaggggagtactggcccgcagggaatcagaggccagcctggcgatcccggcgttcccggctttaagggagaagcgggcccaaagggggagcccggcccacacggcatccagggcccaattggaccacccggagaggagggcaagcgggggccacggggtgaccctggtaccgtaggcccacccggtcccgtgggtgagaggggcgctcctgggaaccgcggcttcccagggagcgacgggcttcccggccccaagggcgctcagggggagagaggccccgtgggatccagcggccctaaaggaagtcagggggatcccgggagacctggcgagcccggactgcccggggcaagaggcctaaccgggaatccgggagtgcagggccctgagggcaagctaggccccttaggtgctccaggtgaggatggccgaccaggccctccgggatctataggtattagaggacagcctggttcaatgggcctgccagggcctaagggttccagtggagatcccggcaagcctggcgaggccgggaacgctggggttccagggcaacggggtgctcccgggaaggacggagaggttggaccttccggacctgttggaccccccggtctggcaggagagcgtggagagcagggccccccggggccaaccgggtttcaaggactcccggggccccccgggccgcctggagaaggcggcaagccaggcgaccagggcgttcctggcgatcccggggcggtcgggccactgggcccccggggcgaacgggggaacccaggcgaaagaggcgaacccggtattacagggttgcccggtgaaaagggcatggccggcggacacggccccgatgggccaaaaggatcgcctgggccttccggaacacctggagataccggcccaccagggttgcagggcatgccaggagagagaggcatcgccggaacgccagggcccaagggcgaccgcggtggaattggagagaaaggcgcagagggcaccgcagggaacgacggggcccgggggctgccaggccccttgggtccacccggccccgcaggtcccacaggcgagaagggagagcccggcccacggggactggtgggacccccagggtcacggggaaacccgggttcacggggagagaacgggccaacaggggctgtgggtttcgcagggcctcaagggccagacgggcagcctggggttaagggagaaccgggggagcccggacaaaagggagatgccggtagccccgggcctcaaggcttggccggctccccagggccccatgggcctaacggcgtgccaggactcaaaggtggaagaggaacccagggcccccctggggctactgggtttcccggaagtgccgggcgcgtgggtccaccaggtcccgcaggagcaccaggtcccgcgggtccattaggagaacccggtaaagaaggaccccccggccttcgcggtgatcctggtagccatggcagagtgggcgacagggggcctgcaggacctcctggcggccccggtgacaagggcgatcctggagaggacggccaaccagggccagatggaccccccggacctgccggcactactgggcagaggggcattgtgggaatgcccgggcagaggggtgaacgcggaatgcctggtctgcccggtcctgcggggactccgggcaaggttgggccaaccggggccaccggcgacaaaggtccgccgggtcctgtgggccccccagggagtaacggtcctgtgggtgaacccgggcccgagggccccgcaggaaacgatggaacaccaggaagggacggtgcagtaggagaaaggggtgatagaggtgatcctgggcctgcaggcctgcctggtagtcagggggcacctggcacccccggcccagtaggcgcacctggagatgccgggcagagaggggaccctggcagtcgggggccgattggtcctcccggcagagctgggaagcgggggctacctggccctcagggacctcgtggagacaaaggagaccacggcgacagaggtgatcgtggtcagaagggccatcgtggctttaccggcctgcaggggcttccgggtcctcctggtcccaacggcgaacaggggagtgctggaattcctgggccatttggcccacgggggccacccggccctgttggcccctcggggaaagagggtaaccctggaccactgggccccattggcccacctggagttcggggtagcgttggcgaggctggcccggagggcccacccggcgaaccgggccctcctggtccaccgggtccacccggacacctgaccgcagcccttggcgatatcatggggcactacgacgagagcatgcctgaccccctgccagaattcacagaagatcaagcagcaccagacgataaaaataagaccgaccctggagtgcacgccaccctcaagtctttgtcgtctcagattgaaacaatgaggtctccagatggttcaaaaaagcatcctgcccggacatgtgacgatcttaagttgtgtcactcagccaagcagagcggtgagtattggattgatcccaaccaaggaagcgttgaggacgctattaaggtatattgtaatatggaaacgggagagacttgcatttccgcgaaccccagttccgtccccaggaagacatggtgggcatccaagagcccagacaacaagcccgtttggtacggcctggatatgaaccgcggaagccaatttgcctatggagatcaccagagccccaacacagcgatcactcagatgaccttcctccggctgcttagtaaggaagcatcccagaacattacctatatctgcaagaacagtgttgggtacatggacgaccaggctaagaatttaaaaaaagccgtggtgcttaaaggagccaatgacctcgacattaaggccgaaggcaacataaggttccggtacattgtgctgcaggatacatgcagcaagaggaatgggaatgtgggcaaaactgtgttcgaatatcgtacgcagaatgtcgcgcgcctgcccatcatagatttagctcctgtagatgtgggtggtacagatcaagagtttggcgttgaaatcgggcccgtctgcttcgtctag

SEQ ID NO: 23608 - DNA, 3420 bp, synthetic construct
  misc_feature 1..3420: note = Description of Artificial Sequence: Synthetic coding sequence
  source 1..3420: mol_type = other DNA
ctgcccggccggcggcaccggctgggcccccccggcagccagggcccccggggcgaacggggcccaaagggccgacccggacccagaggcccgcaaggaatcgacggggaacccggagtgcctgggcaaccaggagccccagggggcgccgggcctactggacctcctggcgaacctggggaccctggacccatgggccccatcggctcacgggggcctgaaggccccccaggcaagcccggtgaggacggcgaaccaggccgcaacgggaaccctggggaggtggggtttgctggcagccctggggcaaggggattcccaggcgctcctggactgcccgggttgaagggccacagaggacataaaggtcttgaaggccctaagggcgaggtgggcgccccaggctccaaaggcgaggcgggtcctactggccccagaggggatcccggcaccgtggggccacccggacccgtgggcgaacgaggggctccgggcaaccgagggttcccgggaagcgatggactgccaggtcccaaaggcgctcagggggaaagaggccctgtcgggagcagcgggcccaagggttcacaaggcgatcccggcaggcccggagagccaggcctccccggagcccgcggcctgacaggaaacccaggggtgcagggcccagaagggaagctgggacctctcggcgcccccggcgaggatggaaggcctggcccacctggcagtatcgggatcagagggcaacctggatcaatggggctaccggggcctaaaggatcttctggcgaccctggcaagcctggcgaggcagggaatgccggggtcccgggccagaggggagcgccagggaaggacggagaagtaggcccatctggccctgtcggccctcctggactggctggtgaacggggagaacaagggccgcccgggcctacaggcttccagggtctgcccgggccacccggtcccccgggcgagggagggaagcccggcgaccagggggtgcccggtgaccctggagccgtgggaccccttgggccacggggcgagcgagggaaccccggggagagaggggagcccggaataactggccttcccggggagaaaggaatggccggggggcatggaccggacggacccaagggaagtccaggcccttccggcactcccggtgacactggtccccccggcctgcaaggaatgccaggggagcggggcatagcgggaaccccagggcccaaaggtgaccgtggtggcatcggtgagaagggagccgaaggaactgctggcaacgatggggcacgtggcctgcctggcccgctcggtccgcccggcccagccggtcccacaggggagaaaggcgagcctggtccacggggcctggtgggaccacctggtagtcgcggtaatcctggctctcggggggaaaacggacccaccggtgccgtgggatttgctggccctcaaggacccgatgggcagccaggggtgaaaggcgaaccaggcgagcccggccagaagggagatgcggggtcccctggcccacagggtctggccggctcaccaggaccccacggaccgaacggagtgcccgggttgaaaggcgggcgcgggacgcaggggcctccaggagcaactgggtttccagggagcgcagggcgcgtcggaccacccggccccgcgggggccccaggccccgccggccctctcggcgaaccaggcaaggagggccctcctgggctccgtggagacccaggctctcacgggcgggtgggggaccgcggacccgcaggaccgccaggcggtcctggcgataagggagaccccggagaggacggccagccgggccccgatggccctcccggtccggctgggacaacggggcaacgaggcattgtaggcatgccaggtcagcggggcgagcggggcatgccgggccttccgggaccagccggaacgcccggtaaggtgggaccgactggggccacaggggataagggaccacctggtccagtgggccccccaggctccaacggaccagtcggggagccaggacctgaaggtcccgccggaaacgatggtacccccggcagggatggcgccgtcggcgagcgcggagatcgcggggatccaggacctgccgggctgcctggttcgcagggtgctcctggtacccctggccccgtgggtgcccccggggacgcggggcagaggggcgatcctgggtcccgaggacccataggaccccctgggcgagcaggaaaacgggggctcccagggccgcagggaccacgaggagacaagggagaccatggggatcgcggcgatcgcggtcaaaaaggtcacagaggcttcacagggctccagggtctgcctgggcctccgggaccaaatggcgagcagggcagtgccgggatccctggccccttcggacccagaggcccaccagggccggtgggtccatcaggaaaggaaggcaatcctggcccactcgggcctattggcccccctggggtccgcggctccgtgggtgaggcgggtccagaggggccgcctggagagccgggcccccccggtcctcctggcccccccggacacctgacggccgccctgggggacatcatgggacactacgacgagagtatgccggaccccctgcccgagttcactgaggaccaggccgcgcctgatgacaaaaataagaccgatcccggtgttcacgcaaccctgaagtcactgtcttcccagatcgagaccatgcgcagtccagacgggtccaagaagcatccagcacgtacctgtgacgatttaaaactgtgccacagcgccaagcagagcggggagtattggatcgaccccaatcaaggtagtgtggaggatgctatcaaggtttattgcaatatggaaacaggtgagacctgcataagcgccaacccctcctctgttcccaggaaaacctggtgggccagcaagagtccagataacaaacctgtgtggtatggattggatatgaatcggggttctcaatttgcctacggcgaccatcagagccccaatacagccataacacagatgacgtttctccgattgttatcaaaggaagcctcccagaacatcacctatatctgtaagaactcagttggatatatggatgatcaggctaagaacttaaagaaggcagtcgtgttaaagggggctaatgatcttgacattaaggcagaagggaacattaggttccggtatatagtccttcaggacacctgcagcaaaaggaatggcaatgtgggaaagacggtgttcgagtacaggacacagaacgtcgctagattacctatcatcgatctagcccctgtggacgtaggtggcaccgatcaggaatttggggttgagattggccctgtctgcttcgtgtag

SEQ ID NO: 23609 - DNA, 5304 bp, synthetic construct
  misc_feature 1..5304: note = Description of Artificial Sequence: Synthetic coding sequence
  source 1..5304: mol_type = other DNA
atggagccctggagcagccggtggaagaccaagcggtggctgtgggatttcacagtgactacactcgctctgacatttctcttccaggcccgagaggtgcgaggcgccgcccctgttgacgtcttgaaagctctggacttccataattccccggaaggcatatcaaaaactacggggttctgcaccaatcgtaaaaatagcaaagggtccgatacggcctaccgtgtgtcaaagcaggcacagctatccgcaccgacaaaacagctgtttccaggaggcaccttccccgaagatttctcaattctgttcacagtgaaacctaaaaaaggaattcaaagcttcctcctgagcatatataacgaacacggcatccagcagatcggcgtagaagtaggtagaagccccgtgttcctttttgaagaccacactggtaagcccgctcctgaagactacccattgtttcgtaccgtaaatattgccgatggcaagtggcaccgtgtggctatttctgttgagaagaagacggtgaccatgatcgttgattgtaagaaaaagaccacaaagccactcgatcggtctgagcgcgctattgttgatacaaatggaattaccgtgtttggcacgcggatccttgacgaggaagtattcgagggcgatatccagcagtttttgattactggggatcctaaagcagcttacgactattgtgagcactactcccccgactgtgacagtagcgctccaaaggctgctcaagctcaggaaccccaaatcgacgaggccaacatcgtcgatgacttccaggagtataattacggcacgatggagtcctaccagacagaagcgccacgccatgttagcggtaccaacgaaccgaacccagtggaggaaatcttcacagaagaatacttaacaggtgaggactatgattcccagaggaaaaattctgaagatacgttatatgaaaacaaggaaatcgacggcagagatagcgatctgctcgtcgacggggatttaggtgagtacgacttctatgaatataaagagtacgaagacaaacccactagcccgcccaatgaagaatttggcccaggggtgccagccgagaccgacatcacagagactagcatcaatggccatggtgcatatggcgaaaaggggcagaagggcgagcctgctgtggtcgagcccgggatgttggtagagggaccacccgggcccgcaggacccgccggcattatgggccctcccgggctgcagggccccacaggccctcctggggaccccggagaccggggtccgcccggtagacccggtctccctggggcagacggcctccctgggcctcctggaactatgttgatgctgccgttccggtacggtggggatggcagcaagggcccgacgatttctgcgcaggaagctcaggcccaggccattttgcagcaggcgaggattgcgctgcgtggcccccccggtcccatgggtctgaccgggaggcctgggcctgtgggagggccaggctcttcaggagcgaagggcgagagtggagacccaggcccccagggccctcgtggcgtgcagggccctcccggaccaacggggaagcccgggaagcgaggacgcccaggagcggacgggggacgtgggatgcccggcgaacccggggctaagggtgataggggcttcgatggcctgccaggcctgcccggcgacaaaggacataggggggagaggggccctcaagggcccccaggccctcctggcgacgacggcatgcgtggagaagatggggagatagggccacgtggccttcccggtgaagcgggtccccgcggcctgctcggcccacgcggcactcccggggccccaggccagccaggaatggccggcgtcgacggcccccccggaccgaagggcaacatgggcccgcagggcgagccagggccacctgggcaacagggtaatcccggcccccaaggtctgccagggcctcaaggccccatcggtccacctggagaaaaagggccacaaggtaagcctggactcgcaggcctgcctggcgctgacggccccccgggtcatccaggaaaggaaggtcaaagtggagagaaaggggccctgggtccccccggtccccagggacctatcgggtaccccggtccaaggggtgttaagggtgccgatggtgtgaggggccttaagggctctaagggggagaagggggaagatggctttcctggttttaagggtgacatggggctcaaaggcgacaggggcgaggtcggacaaattgggccacgaggggaagacgggccggagggccccaaggggcgcgccggaccgactggcgaccctgggccttctggacaggccggcgagaagggtaaactcggcgtcccaggcttgcctgggtatcccggtagacagggcccaaagggctctacaggctttcctggcttccccggcgcgaacggagagaagggggcaagaggggttgccggaaaacctggcccacgtggtcagagaggccccactggaccacgcggctcacgtggggcaaggggtccgacgggcaaacccggcccgaaaggcacaagcggcggagacggccctcccgggcccccaggtgagagggggcctcagggccctcaagggcctgtcggctttcctggccctaaaggccctccgggccctcccgggaaagatggtctcccaggacacccaggacagcgcggagaaactggcttccagggcaaaaccggaccccccggccccgggggcgtcgtgggtccacagggtccaaccggcgaaacaggccctatcggggaaaggggccatccaggccctcctgggccaccaggagaacaagggcttcctggagcagctggcaaagaaggtgccaagggtgaccccggcccccagggtatctctgggaaagacgggcctgcaggattacgcggatttcccggcgagagagggctgcctggcgcacagggcgcaccaggacttaaaggtggcgaggggccacagggacctcctggacctgtcggcagtcccggtgaaaggggctccgctggaacagctggaccaattggactgcccggtcgccctggaccgcaagggcccccaggtcccgcaggtgagaagggtgctccaggtgagaaaggcccgcagggccccgctggacgtgatggggtacagggcccagtggggctcccaggtccagccggccccgccggtagtcccggcgaagacggggacaaaggcgagattggtgagccaggccagaagggatccaaaggtgacaagggcgagaacggtccccccgggccgccgggattgcagggtccggtgggggcacccggaatcgctggtggtgatggggaaccaggacctcggggccaacaaggaatgttcggtcagaagggagacgaaggcgcaaggggcttccctggacccccaggacccattggtctgcagggactccccgggcctccaggagagaaaggagaaaacggagatgtcgggccaatgggcccacccggacccccaggaccccgcgggccacaaggtcctaatggggccgatggacctcaaggaccccctggcagcgtgggcagtgtgggtggagtaggcgagaagggagagcctggagaggcaggcaatcccgggccacccggggaggcgggggtggggggaccaaagggtgagcggggagaaaagggtgaggctggcccccccggggctgcgggacctcctggggctaaaggcccccctggagatgatggcccaaagggtaaccccggacccgtgggttttcctggggaccccgggccccccggagaaccaggaccggccgggcaggacggcgttgggggagataaaggcgaagatggagatcccgggcagcccggcccaccgggaccctccggcgaagccggccctccgggacctcccggtaagaggggcccacccggggctgctggagcggaagggagacaaggcgaaaagggagccaagggagaggccggcgcggagggacctcctgggaaaaccggtcccgtaggcccccagggcccggccggaaaacccggtccggaggggcttcgcgggatccccggcccagtcggcgagcagggactccccggcgccgcaggacaggatggcccacccggccctatgggtccacctggtcttcccggcctgaaaggcgacccaggctccaaaggcgagaaagggcaccccgggttgattggcctaattggacctccaggggaacagggtgagaaaggagacaggggactgcctgggacccagggctctccgggcgctaaaggggatggcggaattccaggccctgctggcccgttgggaccccccggccccccaggccttcccggtccccagggtccgaaagggaataaagggagtacgggacctgccggtcagaaaggtgacagcggcctgccaggtccacctggttccccaggaccaccgggtgaggtcatccagccgctgccaattctgtcgtcaaaaaagacaagacgacacacagaaggtatgcaagccgatgccgatgataacatcctggattattctgatgggatggaggagatctttggatcactgaattcactgaagcaggacatagaacatatgaaatttcctatgggaactcagacaaatcccgctcgaacttgtaaggatctacagttgtctcaccccgactttcctgacggcgaatattggatcgatcctaatcagggctgctctggggattcattcaaggtttactgcaattttactagcggcggcgaaacatgcatctaccctgataagaaatccgaaggagtgcgcatctcctcctggcccaaagagaaaccaggcagctggttttctgagttcaagcggggcaagttgctctcctaccttgatgtcgagggcaactcaatcaatatggtgcaaatgacatttctgaagctgctgacagcttcagccaggcagaacttcacataccactgtcaccaaagcgccgcctggtatgacgtgtcatctggcagctatgacaaggctctgagattcctgggctccaatgatgaggaaatgtcttacgataacaaccctttcattaaaacactttatgatggatgcgcatctcgaaaaggttacgagaagacagtgatcgaaatcaacacccctaagatcgaccaggtaccaatcgtggacgtcatgatcaatgacttcggcgatcaaaatcagaagttcggttttgaggtgggccccgtgtgcttcctggggtag

SEQ ID NO: 23610 - DNA, 5457 bp, synthetic construct
  misc_feature 1..5457: note = Description of Artificial Sequence: Synthetic coding sequence
  source 1..5457: mol_type = other DNA
atggagccctggagcagccggtggaagaccaagcggtggctgtgggacttcaccgtcactacattggcactgaccttcttgtttcaggctagagaggtgagaggagctgctcccgtggacgtgcttaaagctcttgattttcacaacagtcccgaaggcatctctaaaacaactgggttttgtaccaatcgcaagaattcgaaaggatcagataccgcatacagagtcagcaagcaagcccagctctcagccccgacaaaacagttgtttccgggcgggacatttcctgaggatttctccatcttattcactgttaaacccaaaaaggggatacaaagctttctgctgtcaatttacaatgagcacggcatacagcagattggtgtagaagtcggccggagcccagtgtttctcttcgaggaccatactggaaaacccgcccccgaggactatcccttattcagaacagtcaatattgccgacggcaagtggcatagagtcgcaataagcgtggaaaaaaaaaccgtgaccatgattgtggactgcaagaagaaaaccaccaaacctctggacagatctgaacgcgccattgtagacacaaatgggatcacggtgttcggaacacggattctggatgaggaagtgtttgagggggacatccagcaatttctgatcaccggcgaccccaaggcagcctacgattactgtgagcactacagcccagattgtgattcctcagctccaaaagcggcacaagcccaggagccacagatagacgaaaaaaagaaaagtaattttaagaagaagatgcgcaccgtggccacgaagagcaaagaaaagtccaagaaatttacccctcccaagtccgagaaattttcatcaaaaaaaaaaaagagctatcaggcttctgccaaagctaagctaggggtgaaggcgaacatagtggatgatttccaggaatacaactatggtacaatggagtcttatcagaccgaggctccacgccacgtttcggggacgaatgaacctaacccggtcgaggaaattttcacagaagagtacttgacgggcgaagactacgatagccagcggaaaaattctgaagacacactctacgagaataaagaaatcgacggtcgagattctgacctactggttgatggggacttaggagaatacgacttttacgagtacaaggaatacgaggacaaacccacatctcctcctaatgaggagtttgggcctggggttcctgctgagaccgacatcaccgaaacctctatcaacggacacggcgcctacggagagaagggccaaaagggggaacccgctgttgtggaacccggcatgctggtcgaagggccacccgggcctgcagggcccgcaggtattatgggacccccgggacttcagggccccactggcccgcccggggaccccggggatcgcggcccacctggacgcccaggcttacccggtgctgacggtctgcccggtccgccgggcaccatgctgatgctgcccttccgctacgggggcgatggatcaaaaggacctacgatatccgcgcaggaggctcaggctcaggcgatattgcagcaggccaggattgcactgagaggacccccagggcctatgggactcacaggtagacccggtccagtcgggggcccgggatcttctggtgctaagggtgagtcaggcgacccaggcccccagggccccaggggcgtgcagggcccacccgggcccacaggaaagcctggcaagagggggaggcctggagccgacggaggacgcggcatgcccggcgaacctggcgctaagggagataggggctttgatggcctgcccgggctgccgggggataaaggtcataggggtgagaggggaccccaggggcctccgggacccccaggcgacgatggcatgaggggcgaggatggcgaaatcgggcctcgcggcctccccggtgaagcgggcccccgaggcctattgggccctagaggaactcctggagccccaggacaacctggaatggccggggttgacgggccccccggccccaaagggaatatggggccccagggtgagcccgggcctcctggccagcaaggcaatcctggcccacagggactaccgggcccccagggccccatcggcccaccaggggagaaggggccccagggaaaacctggtcttgccggactgcccggggccgatgggccacccggccatccgggcaaagaaggacaaagtggagagaaaggcgctttaggtccccctggacctcaaggccctattggataccctggtcccagaggggttaagggcgctgacggggtgcggggcctgaaaggcagtaagggtgaaaagggagaagacgggtttcccggtttcaagggagatatgggcctcaagggcgatcgtggggaggtcggacagattgggccccggggtgaggacggtccagaaggtccaaaaggtcgcgcggggcctaccggagacccaggccctagcggccaggctggtgaaaagggtaaactgggagtgccgggtctgccgggctatcccggtaggcaggggcccaagggtagtactggttttcccggttttcccggcgctaatggagaaaagggagctcgcggggtcgctggaaagccaggtcctaggggtcagcggggcccgaccggtccaagggggagtcggggtgccagaggcccaacaggaaaaccaggaccaaaaggtactagcggcggcgacggcccccccggtccacctggagagagagggccccaaggaccccaggggcccgtcggcttcccaggccctaaaggtcccccaggacctccagggaaggatggactccctggacacccgggacagcggggggagacaggtttccagggtaagacggggccccccggtcctgggggggtcgtcggcccgcagggacctactggcgaaactggtcccatcggcgagaggggacacccaggcccaccgggacccccaggcgagcagggcctccccggggctgctggcaaagaaggggctaagggtgaccctggaccccaagggatctcaggaaaggatggacccgccgggctcagagggttccccggcgaaaggggccttcccggagctcagggcgcacccggcttgaaaggaggtgaggggcctcagggccctccgggccccgtgggatctcctggggagcgcgggagtgctggtacagcggggcccatcggcctcccgggccgccccgggccccaggggccaccagggccagcaggcgagaagggagcacctggggagaaaggaccccaaggtcctgccggtagagacggggtgcagggacctgttggcctgcccgggcctgccggtcccgcagggtccccaggcgaggatggggataagggggaaatcggcgagccaggacagaaagggtccaagggagataagggagaaaatggcccccccgggcctcctgggctccaaggacctgtcggagcaccagggattgctggaggggacggcgagcccggcccccgcgggcagcagggcatgttcggccaaaaaggcgatgagggggcccggggctttcctggtcctccagggcctattggcttgcaaggtcttcccggccccccaggcgagaaaggggaaaatggcgatgtgggccccatgggcccccctggaccgcccggcccaagaggaccgcaaggtcccaacggagccgatgggccccaagggccccctggtagcgtcggatccgttgggggagtgggggagaaaggcgagcccggggaggcgggcaatccaggccctccgggcgaggcaggcgtcgggggccctaagggggaacgtggggagaaaggggaggcaggcccacccggagcagcagggccaccaggcgctaagggtccccctggtgatgacggccccaagggcaacccgggtccagtcggcttccccggcgacccaggaccgccaggcgaacccggaccggcaggacaggacggagtcggcggagataagggagaagacggggatccgggacagccaggccctccaggccccagtggtgaggcaggtcctcccgggcctccagggaagagaggcccccccggcgccgctggagcagagggcagacagggggaaaagggtgccaagggtgaggccggggcagaggggccaccaggaaagacgggacccgtggggccacaaggacctgccggaaagccaggcccagagggactccgtggaatcccaggtcctgtcggcgaacagggcctgcctggcgctgctggacaggatggccctccgggccccatggggccgcccggattgcccggcctcaagggcgatccgggctctaagggtgagaaggggcacccaggactgattggtctgattgggcctcccggcgagcagggagagaagggggaccgaggtctgccagggactcaggggtcacccggagctaagggagatggaggtattccaggcccggctgggccattggggccccctggcccacccgggctgcccggcccccaaggaccgaaaggaaataagggctcaacaggtcccgcaggacagaaaggcgacagcggactcccggggcctcctggatccccaggcccacctggcgaggtaattcaacctctcccaatcttgtcatccaaaaagacccgcagacacaccgagggcatgcaagccgatgcggatgacaacatcctggactactccgacggcatggaggaaatattcggctctctgaacagtctgaagcaggacatcgagcatatgaaattccctatggggacccaaactaatcccgcgaggacatgcaaagatcttcaactgtcgcatcctgatttcccagatggcgaatattggatcgatcctaaccaggggtgctccggggacagcttcaaagtatattgtaacttcaccagcggaggggagacatgtatctatcctgataagaaatccgaaggcgtccgcatttcgagttggcctaaggagaagcctggctcctggtttagtgagttcaaacgcgggaaacttttgtcatacctggatgtggagggcaatagcatcaacatggtccagatgacctttttgaaactgctcactgcttctgcaaggcagaattttacctaccattgccatcagagtgctgcatggtacgacgtttcttccgggagctacgacaaggcattacgctttctggggagcaatgacgaagagatgagctacgataataatcccttcattaaaaccctttacgatggctgtgcatcacgcaagggctatgagaagacagtgatagaaatcaacactcctaagatcgaccaagtacccatcgtggacgtaatgataaatgacttcggagatcagaaccaaaagttcggattcgaggttggacctgtttgcttcctgggctag

SEQ ID NO: 23611 - DNA, 3081 bp, synthetic construct
  misc_feature 1..3081: note = Description of Artificial Sequence: Synthetic coding sequence
  source 1..3081: mol_type = other DNA
atggtgagcgaggtgagccgggacctgaaggtgaagcgggagaagctggttaaactagcccaggagggcaagatggccctcaaagaccccaaggtggagcaggcccagcttgagacacaggtcctgcaggttaaacaggagaagcgcgaaaatttggagttccaggactatcaggatattcaggaggacaaagtccagcgaatttccgatgtaatcgggtctaccggttttccggggtttcccggcgcaaacggagaaaagggggcgcggggagtggctggcaagcctgggccccgggggcagagaggaccaacaggtccccgcggctccaggggtgccagagggccaaccggcaaacctggccccaagggcacgagtggcggcgacggacctcctggacctcctggagaacgaggacctcagggtccgcagggcccagtggggttccccgggccgaaagggccccccgggccccccggaaaagatgggctgcctggacatcctggacagaggggggaaaccggtttccaaggtaaaaccggccctcctggacctgggggcgtcgtggggccacagggacccacaggcgaaacaggacccatcggcgagcggggtcatcccgggcctcccggacctccaggtgagcagggactgccaggcgcagcaggaaaggaaggcgcaaaaggagacccaggcccccagggcatatcaggtaaggacggccctgcgggccttcgagggttccccggagagcgcggcctccctggggcacaaggtgcacctggcttgaagggcggggaggggccgcagggacctccaggccccgtcgggtcacccggagaaagagggagtgcagggaccgctggtcctatcggattaccaggcagacccgggcctcaaggccctccaggcccagccggagaaaaaggggccccaggcgaaaaaggccctcagggtcccgctggacgcgacggcgtgcagggccctgtgggccttcctggtccagccgggcctgctggatccccaggagaggacggagacaagggcgagataggcgagccaggtcagaagggtagtaagggtgataagggagagaacggcccccccggacctcccggccttcagggaccagtgggggctccggggatcgccgggggagatggggagcccggccctcgcggtcagcagggaatgtttggacaaaagggggacgaaggcgcacgaggttttcctggtccacccggacctatcggcctgcagggcctgcccggtccccccggggaaaaaggcgagaatggcgacgtggggcccatgggtcctccaggaccgcctgggccccgcggtccgcagggcccgaatggtgccgacggccctcaggggccgccaggatctgtaggatcagtaggaggggtgggagagaagggggagcccggggaagcggggaatccagggccgccaggagaggccggggttggcggtccgaaaggagaaagaggagagaagggggaagccgggccccctggtgcagctggaccgcctggcgccaaggggccgccgggcgacgacgggccaaaaggcaatccaggccctgtggggtttcctggggatcccggccctcccggcgagcccgggccagctggtcaggacggagtgggaggggataagggcgaagatggcgatccggggcagcccggcccccctgggccaagcggggaggccgggcccccgggcccgcctggaaagcgtggccctcccggagctgcaggtgccgaaggcagacagggggaaaaaggagcgaaaggcgaagcgggggctgaggggcctccagggaaaacaggccccgtcggaccacaggggcccgctggcaagcctggccctgaaggccttcggggaattccaggcccagttggcgaacagggactgccaggcgcggccgggcaagatggaccacctggacccatgggcccacctggacttccaggactcaaaggcgatccagggagcaagggcgaaaaagggcaccccgggcttataggtctgattggcccacccggggagcaaggcgaaaagggagatagaggcctgcctggtactcagggatcccccggagccaaaggcgacggcggtatccccggcccagccggtccactggggcctcccggaccacccggtctccctggcccacagggcccaaaagggaataaaggaagcacagggcccgccggacagaagggagacagcggattacctggcccgcctggaagtccaggcccacctggagaagttatccagcctttacctattttgagctccaagaagaccagaaggcatacagaagggatgcaggccgacgctgacgataacatcctcgattattcagacggcatggaggagatctttggcagtctgaattctctgaagcaggacattgagcacatgaagtttcccatgggcacccaaactaatccagcccggacatgtaaggaccttcagctaagccatcctgacttccctgacggtgagtattggatcgacccgaaccagggatgctccggcgacagcttcaaggtctactgcaattttacttctggaggtgagacttgcatctaccctgataagaaatccgagggcgtgagaataagctcatggcccaaagagaaacccggctcttggttctccgagttcaagcgtggaaagttgcttagttacctggacgtggaaggcaactccattaatatggttcagatgacatttttgaagctccttaccgcctccgcccggcagaattttacataccactgtcaccagtctgccgcttggtacgacgtttcctccggcagttacgacaaagcattacggtttctcggaagcaatgatgaggaaatgtcttatgataacaatccgtttattaaaacgctgtatgacggctgcgctagtaggaaaggttatgaaaagaccgtgatcgaaatcaatacacctaaaattgatcaagttccaattgtagatgtgatgatcaacgactttggggatcagaaccaaaaattcgggtttgaagtagggccagtgtgcttcttgggatag

SEQ ID NO: 23612 - DNA, 5421 bp, synthetic construct
  misc_feature 1..5421: note = Description of Artificial Sequence: Synthetic coding sequence
  source 1..5421: mol_type = other DNA
atggagccctggagcagccggtggaagaccaagcggtggctgtgggacttcaccgtgaccactctcgctctaacattcctttttcaagcacgggaggtgcgcggagcagcccctgtggatgttctcaaggctttggactttcataacagtcctgaagggataagcaagaccacaggattttgtaccaaccggaagaattccaaggggtcagatactgcctaccgtgtgtccaaacaggcacagctcagcgctccgaccaagcagctgttccctggcggcaccttcccggaagacttctcaatcctgtttaccgtgaagcccaaaaagggtatccagtcttttctcctgagcatctacaacgagcatggaattcagcagattggcgttgaggtgggccgtagcccggtctttctgttcgaagaccacacaggcaaacctgccccggaagattatcctttgttcagaactgttaatatagcagatggcaaatggcacagagtagcaatttcagtggagaagaaaaccgtcactatgatcgttgattgcaaaaagaagacgacaaaacctctggaccgcagcgagcgcgcaattgtggataccaatgggattacagtctttggcacccgcatcctggacgaggaagtgtttgagggagacatacagcaattcctcatcactggagatcctaaggctgcctacgattactgtgaacactattcccccgattgcgacagttctgcccctaaagccgctcaagcacaggaacctcagatcgacgaatacgcccccgaagatattattgagtatgactatgaatacggggaggctgagtacaaagaggcggaaagcgtgacagaaggccctacggtgaccgaagaaaccatcgcccagaccgaggccaacatagtcgatgactttcaggagtacaattatggaactatggaatcctatcagactgaggccccgaggcacgtttccgggaccaatgagcctaacccggtggaagagatcttcaccgaggagtacctgacaggagaggactatgactctcagcggaaaaacagcgaggataccctgtacgaaaacaaggaaattgatgggagagattcagatctgctggtcgacggggacctaggagagtacgatttctatgaatataaagagtacgaggacaagccgaccagccccccgaacgaagagtttggccccggtgtccctgccgagactgacataactgagacctcaataaacgggcatggagcctacggggagaaaggacagaaaggagagccagccgttgtggaacccggcatgttggtggaaggcccccccgggcccgccgggcccgcagggattatggggccacctggcctgcagggaccaactggacctcccggagatccaggcgaccggggcccacccggaaggcctggactgcctggagccgatggactgcctggtccacctggtaccatgctcatgctccccttccggtacggaggtgacggttcaaagggtcccacaatctcagcccaggaggcccaagcccaggctattctgcaacaggcaaggatcgctctaagaggacctcccggaccaatggggctcaccggccggcccggcccagtgggcggaccaggaagctctggagctaaaggtgagtccggagaccctggccctcagggcccccgtggggtgcagggacccccaggccctaccggtaaacctgggaagaggggacgcccaggcgcagacggcggccgcggcatgcctggcgaaccaggtgcgaaaggcgatagggggtttgacggacttcccggattgccaggcgataaaggtcacaggggggagagaggccctcagggcccaccagggccacctggggacgatgggatgcgtggggaggatggagagatcggtcccagaggcttacctggcgaagctggtcctcgagggctgctggggccacgaggcacacccggtgctccagggcagccgggcatggccggcgtggacggaccacccggccctaaggggaacatgggcccgcagggggaacctggtccgccaggccagcagggcaatcctggtcctcagggactgcccggcccacagggccccatcgggccaccaggagagaagggaccacaggggaagccaggccttgccggtttgcctggagccgatgggccgccaggccaccccggcaaggagggacagagcggcgaaaagggcgcactggggccccccggtccccaaggacctattggttacccggggccacggggcgttaagggggccgatggggtgaggggattgaaggggtctaagggcgagaagggggaggacggcttccccggcttcaagggagatatgggacttaagggcgataggggcgaggtaggccagatcggacccagaggagaggacgggccagaaggacccaagggcagagcaggacccaccggggaccctggacctagcggacaggcgggtgaaaagggaaagctgggagtccccggactaccggggtacccagggcggcaggggcccaaagggtccacaggtttccccggcttccccggggcaaacggcgaaaagggcgcccggggcgtcgccggcaaaccgggaccccggggccagcgtggacctacaggcccccgcgggtctagaggggctcgcggaccgaccggcaagcccggacctaagggcacaagcggaggcgatggccccccagggccaccaggtgaacgtggaccccaagggcctcagggtcctgtgggcttccccggccctaaaggtcctcctggcccgccgggaaaggatgggctgccaggccaccccggacagaggggggagacggggttccagggtaagactggcccacccggtcccggaggagtggtcggcccacaagggcctacaggcgaaaccggacctataggggaaaggggccacccaggcccaccaggccctcccggggagcaggggctgcccggagctgctggcaaggaaggagcaaagggggatccagggccccaaggaataagcgggaaagacgggccagccggactgagaggatttccgggtgagcgtggcctgccaggggcacagggcgccccagggcttaaggggggcgagggcccccaggggcctcccggccccgtgggcagccccggcgagagagggtctgcaggcacagccggcccgatcggcttaccggggcgcccaggccctcagggccctcccggcccggccggagagaagggcgcccctggcgagaagggcccacaaggacctgctgggcgggatggggtgcaagggcctgtgggactgccaggaccagctggaccggccggatctcctggagaagatggagacaagggagaaattggcgaacctggtcagaagggctctaaaggtgacaaaggggagaacggcccgcctggcccacccggtcttcaagggcctgtgggcgcacctggaattgccggaggcgacggggagccaggccctagggggcaacagggaatgttcggccagaaaggggacgaaggggcaagaggcttcccggggccaccaggtccaataggcttgcaaggcctgcctggaccccccggcgagaaaggtgagaatggcgatgtgggacccatggggccacctggcccgcctggtccccgagggcctcagggtcccaatggggccgacgggccgcaggggcctccgggaagcgtgggcagtgtcggcggggtaggagaaaaaggcgaacctggtgaagctggaaacccaggcccaccaggtgaggccggagtgggcggccctaaaggagagagaggagaaaagggagaagcggggccaccaggggctgccggaccgccgggggctaaggggccccctggagacgacggcccgaaaggcaacccggggcccgttggatttccaggcgatccaggcccacccggtgaaccaggccccgccggtcaagacggagtggggggggataagggggaagacggtgatcccgggcagcccggccctcccggcccttccggcgaggcaggtcctcctggaccacccggcaaaagaggccctcccggggccgccggcgccgagggtaggcagggggagaaaggcgccaagggcgaggccggtgccgagggccccccaggcaagaccgggccagtgggaccccaaggccccgcaggtaaacccggcccagaaggactgagaggcattcctggaccagtcggggagcaaggattgcctggggccgctggccaggacggccctcctgggcctatgggccctcccgggttacccggcctgaagggtgacccggggtcaaaaggagaaaaaggacacccaggactcattgggcttatcggaccaccaggcgagcagggggaaaagggcgacagggggttgccaggcactcaggggagccccggcgctaagggtgacgggggaatacctggaccggctggccccttaggtcctcccggtcctccaggactccccggaccgcagggccctaaggggaataaaggttcaacagggcctgcagggcaaaagggagactcgggccttcccggacccccaggctcaccaggtccacctggagaggtgatccagcccctgcctatcctttcttccaagaagacacggaggcatactgagggcatgcaagccgatgccgacgacaacatcctggactacagcgacggtatggaggaaatatttggttccttgaacagccttaagcaggatatcgagcatatgaaatttccaatgggtacccagacaaacccagcgcggacgtgcaaggacctgcaactgtcacaccctgatttcccggacggtgagtattggatcgatcctaaccagggttgcagtggagactcctttaaagtctattgcaacttcacaagtggaggtgagacctgtatttatcctgacaagaagagcgagggtgtgcgcatttcttcatggcctaaggaaaaacctggctcctggttttcagaatttaaacgaggtaagctgttgtcttatctcgatgttgaagggaactcaattaatatggtgcagatgacatttcttaagctgctgaccgctagtgcccgtcaaaatttcacgtaccactgtcaccaaagcgctgcgtggtatgatgtgtcttcaggcagctacgacaaagcgttgagatttctgggaagcaacgacgaggagatgtcatacgacaacaatccattcatcaagacactgtatgacgggtgcgcaagtagaaaagggtacgagaagaccgtgatcgaaattaacactcctaaaatagatcaggtgcccattgtagacgtcatgatcaacgacttcggggaccagaaccaaaaattcggattcgaagtagggccagtctgttttcttggttag

SEQ ID NO: 23613 - DNA, 5073 bp, synthetic construct
  misc_feature 1..5073: note = Description of Artificial Sequence: Synthetic coding sequence
  source 1..5073: mol_type = other DNA
atggagccctggagcagccggtggaagaccaagcggtggctgtgggactttacagtaacaacgttggctctaacgtttttattccaagctcgggaggtgagaggagccgcaccagtagacgttctcaaggcacttgatttccacaactcacctgaaggaatcagtaagaccacgggcttttgcacgaaccgaaaaaacagcaagggaagcgacaccgcttatcgggtgtcgaagcaggctcagttaagtgccccaacgaagcagttgtttccagggggtacctttcctgaggacttctctattctgttcaccgtgaagcctaagaaggggatccagagcttcctgctgagcatctacaacgaacatgggatccagcagattggcgtggaagtcggcaggtcacctgtgtttttatttgaggaccacacaggcaaaccagctccagaggattaccccttgttcagaactgtcaacatcgccgacggaaagtggcacagggtggcaatctctgtcgaaaagaaaaccgtaacgatgatcgtggattgtaaaaaaaaaacgaccaaacctcttgaccggtcagagcgcgccatcgtcgacacaaacggtattacagtgttcggtacacgcatattggacgaggaagtgtttgaaggagatatccagcagttcttgatcacaggcgatccgaaggcagcctacgactactgtgagcactattctccggactgtgactctagtgctcctaaggctgctcaggcccaagagccgcagattgatgagtacgcccctgaagacatcatcgagtacgattacgagtacggcgaagctgagtataaagaagcagagtccgtgactgaaggtcccactgttaccgaagagacaattgcccagacagaaatcaatggccacggggcttatggagagaaaggacaaaagggggaaccagcggtcgtggagcctggcatgctggtggaaggcccccccggcccggcgggccccgccgggatcatgggcccgccgggattgcaaggacccacaggtcctccaggagatcccggcgacagggggccccctggcagaccggggctacccggggctgatggcttacccggcccacccggcaccatgcttatgcttccctttagatatggaggagatgggagcaagggaccaaccatctccgcacaggaagctcaagcccaggctatcctgcaacaggctaggatcgccctccgcggaccccccgggccgatggggctcacggggagacctgggccagtaggaggtccagggagttctggagccaagggcgaatccggcgatccgggtcctcaagggccacgcggggtgcagggcccacctggacccaccgggaagcccgggaagcgcggccgaccaggcgcagacggggggcgcgggatgccaggcgaaccaggagctaaaggcgataggggtttcgatggactaccgggtctgccaggggataaaggacatcgcggagaaagagggcctcagggcccgccaggaccaccaggagacgatggcatgagaggagaggacggcgagattggcccaagaggccttcccggcgaagctggtccgcgcggactgctgggtcccaggggcacaccaggagcaccaggtcagccgggcatggccggagtcgacggacctcctggtcccaagggaaacatgggtccgcagggtgaaccaggaccccccggtcagcagggtaaccccggcccccagggactaccaggtccacaggggcctatcggtccacctggcgagaaaggccctcaagggaagcctggacttgcgggtctgcctggcgccgacggacctccaggccacccggggaaggagggccaaagcggagagaagggagccctgggccctccaggtccacaggggccgattgggtaccccggccccagaggggtgaaaggagccgatggagtgcggggactgaagggctccaaaggagagaagggcgaggacggctttcctgggttcaagggggacatgggtctcaagggggatcggggggaggtgggccaaatcggtcccaggggcgaggacggtccggaggggcccaaggggagggccggccctactggggatccagggccttcagggcaagccggcgagaagggtaaactaggagtgcccggactgcccggatatccagggcgacaagggccaaagggctctaccggcttccccgggtttcccggagctaacggcgagaaaggagccaggggcgtagcaggtaagcctggaccccgaggtcaacggggccctactggtccccgtggaagccgcggggcccgagggcctactggtaaaccaggccccaagggaacttcaggtggtgacggaccaccaggtcctcccggcgaacgtggtccacaggggccacagggtcccgtagggtttcctgggcctaaggggccccccgggcccccaggaaaagacggtctaccaggacatcccggacagagaggcgagaccggctttcaagggaagactgggcctcctggacctggcggggtcgtgggacctcagggaccaacaggggaaacaggaccaataggagagagaggccatcccggtccgcccggcccgcccggggagcagggtctccctggcgccgccgggaaagaaggcgcaaagggcgaccccggcccacaaggtatcagcggaaaagacggccctgcgggtctgaggggctttccaggagaacgtgggttgccgggagcccaaggcgcccctggattgaaaggcggtgaagggccccaaggccctcctgggccagtgggcagcccaggcgaacgcggatcggcgggcacggctgggcccatcggcctgcctggtagacccggtcctcaggggcctcccggaccagctggtgagaaaggagcccccggcgagaaggggcctcaaggccccgccggacgagatggagtccagggccccgttggccttccaggacccgccggcccagcgggctcgccaggcgaagatggagataagggtgagattggagagcctggtcagaaaggatcaaagggtgataagggtgagaatggcccccctggcccccccgggcttcaggggcccgtgggagcccctggcattgctggcggtgatggagaacccgggcctagggggcagcagggaatgttcgggcagaaaggagatgaaggcgccagagggtttcctggccctcctggtccgatcggccttcagggattgcccgggccccccggcgagaagggcgaaaatggcgacgttggaccaatgggtcctccaggaccacctgggcctcggggaccacagggacccaacggagccgatggtccacaaggaccgcctggttctgtagggtctgtgggcggcgtgggggaaaaaggcgaacccggtgaggctggaaatccaggccccccaggtgaggccggggttggcggcccaaaaggggaacggggcgaaaagggggaggccggccctcccggagctgccgggccaccaggcgcaaaaggaccccccggagatgacggaccaaaggggaatcctgggccagtcggattccccggcgaccccggaccccctggtgagcccggtcccgccggacaggacggcgtaggaggtgacaaaggggaggacggcgacccaggccagcccggcccgccagggccctctggagaagctggccccccaggtccacccggtaagcggggaccccccggggcggccggagccgaaggcaggcaaggagagaagggggcaaagggggaggctggggcagaaggaccccccggaaaaacaggtccagtcggacctcaggggcctgccggcaagcctgggccagaagggctcagggggattccaggtccagtgggtgagcagggccttccaggggcagcaggacaggacggacctcccggcccaatgggtcctcctggcctgcccggactgaaaggcgaccccgggtccaaaggggaaaaaggtcaccccggactgattggcttgataggccctccgggagagcaaggcgaaaagggagataggggactcccaggtacacaaggaagccccggcgcaaagggtgatggaggcataccaggaccagccggccctctgggtccccctggcccaccgggcctgcctggtcctcaaggaccaaagggcaataagggaagcacaggaccagcagggcaaaaaggggattccgggctgccgggtccacccggtagcccagggcccccaggagaggtgattcagcccctcccaatcctgtcctctaagaagacccgccgtcacacagaagggatgcaggccgacgcggacgacaacatcctggattactctgatggtatggaggaaatctttggatccctcaactccctcaaacaggatatcgagcatatgaagtttcccatgggcacacagaccaatcctgccaggacttgtaaggatctccaactgtcacatcctgattttcccgacggcgagtactggatcgacccgaaccaagggtgcagcggggattccttcaaggtctattgtaacttcacaagtggcggtgagacctgcatttaccccgacaaaaaatctgaaggcgttaggattagcagctggcctaaagagaaaccaggttcctggttctcagagttcaagcgcggaaaattactttcctacctcgacgtggagggtaactccattaacatggtgcagatgaccttcctgaaactgctgaccgcttcagctcgacaaaattttacttatcactgccaccagagcgcagcctggtacgacgtgagctcagggtcttacgataaggcactaagatttctgggcagtaacgatgaagagatgagctacgacaataacccatttattaaaaccttatacgatgggtgtgcctcccggaagggatacgaaaaaaccgtcattgaaattaacacgccgaagattgatcaggttcctatcgtagacgtgatgattaacgacttcggcgatcagaaccagaagttcggctttgaggtcgggccagtttgcttcctgggctag

SEQ ID NO: 23614 - DNA, 4560 bp, synthetic construct
  misc_feature 1..4560: note = Description of Artificial Sequence: Synthetic coding sequence
  source 1..4560: mol_type = other DNA
atggccccctacccctgcggctgccacatcctgctgctgctgttctgctgcttggccgccgcacgggcaaatctactgaatctgaactggctctggttcaacaatgaagacactagccacgcggcaacaaccatcccagagcctcagggtcctttaccagtgcagcctaccgctgacaccaccacccatgttactcccaggaacgggtcaacggaaccagccaccgctcctggctctccggaaccgccatctgagcttctcgaagacggacaagatacccccacgtctgctgagtctccagacgctcctgaggagaatattgccggagtgggagctgaaatccttaatgtggcaaaagggatccgttcgtttgttcagctctggaatgacaccgtgcctaccgagtcactagcgcgggcagaaacacttgtgctagagaccccagttggccctctggcgctggcgggtccctcaagcacacctcaggagaacggaaccactctttggcccagtcggggcatcccctctagccccggcgcacacactacagaagctggcacactgcccgcccccacaccatccccgcctagcctgggccggccttgggcacctctgactggaccctccgtgccgcccccttcctccgaacgaatcagcgaggaggtcggattgcttcagcttctgggagatcccccgccccaacaagttacccagactgatgaccccgacgtgggactagcttatgttttcggtcccgatgccaactccgggcaggtggcaaggtatcacttccctagcctatttttccgcgacttcagcctcctgtttcatataaggccggccactgagggacctggggtgctgttcgccatcaccgatagcgctcaagctatggtgctgttgggcgtcaaactgtcaggagtgcaggacggccaccaggacatttcccttctttatactgagcctggcgccggacagacacacacagccgctagcttccggctgcccgcatttgtggggcagtggactcacctggctctgtcagtggccgggggcttcgtcgcactctatgtggactgcgaggaatttcagcgtatgcctctggcacggagttctagaggtctggagttggagcctggagccggtctcttcgtcgcacaggccggcggagctgatcctgacaaatttcagggggtgatagccgaattgaaagtccggagggacccccaggtgtcccccatgcactgcctggatgaagagggagatgactcggacggagcctccggcgattctggctccggactcggggacgctagagagctcctgcgcgaagaaacgggcgccgctctcaagcctagattaccagcaccccctccagtcaccactcccccgcttgcaggcggatcgagcaccgaggactcccggagcgaggaggtagaggagcaaaccacagttgcatcgcttggggcccagaccctgcctgggtctgatagcgtcagtacttgggacggcagtgttcgtactccaggcggcagagtcaaagaggggggtctgaagggccagaagggtgaaccaggagtgcctggaccgccaggcagagccggcccccctggaagtccctgtttgccgggcccccctgggctgccttgcccagtttcaccactaggaccggccggacccgccctacagaccgtcccaggccctcagggacctcccgggcctccaggccgggacggaacacccgggagagacggagagcccggcgaccccggcgaagatggcaagcccggggatacgggcccacagggattcccaggaacaccaggcgacgtaggtcccaagggcgataagggcgaccccggcgtgggcgagcgtggcccacctgggccacagggaccccctggccccccgggcccatctttccggcacgacaagcttaccttcattgacatggaggggtctgggtttggcggtgacctcgaagccctcaggggcccccggggattccctggacctcctggcccgccaggagttccggggttgcctggcgaaccaggcagatttggcgtgaatagtagcgacgtgcccggaccagccggcctccccggcgtcccggggcgcgaggggccgcccggttttcctggtctcccaggcccccccggccccccaggccgggaagggccacccggcaggactggccaaaaaggaagcctgggagaggctggcgcaccggggcacaaggggtctaagggagcaccaggccctgctggagctagaggtgaatcaggtctcgcaggcgcccctggtccagcgggccccccgggacccccagggcctccagggccgccagggcctgggctgccagcaggcttcgacgatatggagggctccgggggcccgttctggtcgacagcaagatccgccgacggtccccagggtccccccggactgccggggttgaagggagacccaggcgttcctggattgcctggcgccaagggcgaggtcggcgcggatggcgtgccaggatttccagggttgcctggacgagagggtattgcaggcccacaggggcctaagggggacaggggatcacgaggggagaagggagatccggggaaggatggggtggggcaacctggtctgccggggccaccgggaccaccgggcccagtcgtgtatgtcagcgagcaggatggatcagtcctgtcagtgcccggcccggagggtaggccagggttcgcaggattcccagggccagcgggcccaaagggtaacctcgggtctaagggagagagaggttcccctggccccaagggagaaaagggagagccaggcagtattttttctccggacggtggcgccctgggacccgcccagaagggcgctaagggggaacctggttttcgcggaccccctgggccctacggacggccagggtacaagggagagatcggatttcccggaaggcctggtcggcccggcatgaacggattaaagggggagaaaggggagccaggcgatgccagtttaggattcggtatgaggggcatgccaggcccgcccggtcccccagggccaccaggccctcccggaacccctgtttacgattcgaacgtgtttgccgagagttccaggcctggacccccaggactccccggcaatcagggacctccgggacccaaaggggctaaaggtgaagtgggaccacccgggcccccaggccaattccctttcgattttctgcagttagaagccgagatgaagggtgagaagggcgaccgaggcgatgcaggccagaaaggtgaacgcggcgaacccgggggggggggattttttggaagcagcctgcctggcccccctggacctcctggacctccaggccctaggggctaccctggcatacctgggccaaaaggcgagtctatccgtggccagccagggccccccggaccacagggcccccccggaattggttatgaaggaagacagggacccccagggcccccaggcccacctggcccaccttctttccctggccctcaccgacagacgataagcgtgcccggtcctccagggccccctgggcctcccgggcccccagggacaatgggagcttcctcaggcgtgaggctgtgggccacaaggcaggccatgttgggtcaggtgcacgaggtgcctgaagggtggctcatcttcgtggccgaacaggaagagctctacgtcagagtccaaaatggctttagaaaggtccagctggaggcccgaactccactcccccgtggtaccgacaatgaggtggctgcactccagcctcctgttgtgcagctccatgattccaacccctaccctcgtagagaacatccacatcccacagcgaggccctggcgtgcggacgacatcctggcatcaccacccagattgcctgaacctcagccgtaccctggagcgcctcaccactcctcatatgtgcacttgaggcctgcccggcctacaagtcctcccgcacattctcaccgcgatttccagcctgtgcttcacctggtagccctgaatagcccactctcgggtggaatgaggggtattagaggcgccgatttccagtgtttccagcaggcccgggccgtgggcctagccggtactttccgagcctttctgtccagtcgactgcaggatttgtatagtattgtccggcgcgcggacagagccgctgtgcccatcgtcaatttgaaagatgaattactgtttccttcttgggaagccctgtttagcggttccgagggccccctgaagcccggcgcacggattttcagctttgatgggaaggacgttttgcgccacccgacctggcctcagaagtccgtttggcatggtagtgatcctaatggccgtagactgaccgagtcttattgtgagacgtggaggactgaagcaccaagcgccaccggacaggcatcttccctgctaggaggaagacttctgggacagtctgccgcctcatgccatcatgcctacatcgtgctttgtatcgagaattcatttatgacagcgagcaaatag

SEQ ID NO: 23615 - DNA, 5265 bp, synthetic construct
  misc_feature 1..5265: note = Description of Artificial Sequence: Synthetic coding sequence
  source 1..5265: mol_type = other DNA
atggccccctacccctgcggctgccacatcctgctgctgctgttctgttgcctggccgctgccagagccaacctgttaaacctcaactggctttggttcaataacgaagacaccagtcacgccgcaactaccattccagaaccacaaggaccccttcctgtccaacctactgctgacactacaacccacgttacgccgagaaacggaagcacagaacccgccacagcaccaggttcccctgagccgcctagcgagctactggaggatggacaggacacgcccacgtccgccgagtctcccgacgctcccgaggaaaacattgctggcgtaggtgcagaaattctgaacgtcgccaagggcatcaggagtttcgtgcagctgtggaacgacacagtcccgacagagagcttggccagagccgagacactggttttggaaacccctgttgggccactggctcttgctggtccgtcgagcacacctcaggaaaacggcaccacattgtggccgtcacgcgggatcccgtcctccccgggcgcccatacaacagaggctggcacactgccagcccccactccatctcctcccagtctcgggagaccttgggctccgctcaccggcccttccgtgcccccgccgtctagtgggcgggcgtcattaagcagtctgctgggcggcgcaccaccttggggaagtctgcaggacccagattcgcagggtctcagccccgctgccgcagcaccttcccagcaattacagagaccagacgtaaggctgcggacacctctcctccatcccctcgtcatgggcagcttgggaaagcatgccgccccttcagccttctcatcgggtctgccgggagccctatctcaagtggccgtgacaaccttgacccgagattccggcgcctgggtgtcacacgtcgccaactctgttggccccgggctcgcaaacaacagcgcgcttctgggagccgatcctgaggcgcctgcaggacggtgcctccctctaccacccagtctgcctgtctgtggccacctcggtatatctagattctggctgccaaatcatctgcatcatgaatccggggagcaagtgcgcgctggtgcacgcgcgtggggggggctgcttcagacacattgtcacccttttctcgcctggtttttctgtctccttcttgtcccaccgtgcggaagtgtccccccgccagccccacccccgtgctgccagttttgtgaagccctgcaggatgcctgttggtccagactcggcggtgggagacttcctgtcgcctgtgcttcattgccgactcaggaggacggatactgtgtgcttatcggccccgccgcggaaaggataagtgaggaggttggcctgttgcagttgttgggagatccaccacctcagcaggtcacccagaccgacgaccccgatgttggtttggcctatgtctttggaccagatgccaactccggtcaggtcgctcgctatcactttccatcattatttttcagagactttagcctattattccatattcgtcccgctacagaaggccctggcgtgctgttcgctatcaccgacagtgcccaagctatggtactgctgggagtgaaactgagcggagtccaagacggtcatcaggacatttcactcttatataccgagcccggcgcaggccagacgcatacagctgcatctttccgcctcccggccttcgttggtcagtggactcaccttgccttgtcagtggctgggggatttgtcgctttatacgtggattgtgaggagtttcagcgaatgcctttggctcgcagctctcgcggattggaacttgaacccggggctggcctgttcgttgctcaggccggcggcgccgaccccgacaaattccaaggtgtgattgctgagctgaaggtgcggagggacccacaggtaagccccatgcactgtctggatgaagagggcgacgactcggacggtgcctcaggagatagcgggtcggggctcggcgatgcccgagaattgttgcgagaggagacaggcgctgccctcaagcccaggctccccgcgcctccacctgttacgacaccccctcttgctggcgggtcctcaacggaggactcccggtccgaagaagtagaagaacaaacgaccgtggcttctctcggggctcaaactctccctggcagcgactcagtgagcacttgggacggctcggttcggactccaggcggccgcgtgaaagagggcggtctaaaggggcaaaagggcgaacctggagttccgggaccccccggccgggcagggcccccagggtccccttgcctgcccggacccccgggcttaccttgtcccgtctcccctctgggccccgcaggacccgccctgcagaccgtcccaggtccgcaggggccccccggccccccagggagagacggcacccccggtcgcgatggcgagcccggagacccgggcgaggacgggaaaccgggtgatacaggaccccagggctttcccggcacaccaggcgacgtggggccaaaaggtgataagggcgacccaggtgttggagaacgcggccccccagggccacagggtcccccaggaccgccaggtccttccttccggcatgacaagttaacatttattgacatggaaggaagcgggtttggcggtgaccttgaagcactcagaggaccccgcggcttcccagggccacctggccctccgggagtacctggactgcccggcgaacctggccgatttggcgtgaattcgtccgatgtgcccggacctgccgggctgcccggggtaccaggaagagaaggtccaccagggttccccggactgccagggccccccggacctcctgggcgggagggcccccccggacgcaccggccaaaaaggatcccttggggaggccggtgctcctgggcacaaaggctccaaaggggcacccggtcccgcaggcgcaaggggagaaagtggtcttgctggtgctcccggcccagccggtccccctgggccaccaggacccccgggaccacccgggccaggattacctgcaggcttcgacgacatggaaggctccggtggcccattctggtccacagcccgtagcgctgatggcccgcagggcccccccggactacccggcctaaagggcgaccccggagtgcccggcctcccaggggcaaagggtgaagtcggggccgatggagtgccaggtttcccgggactgcccggcagagagggtattgccggcccccagggaccaaaaggcgatagaggttctcgcggggaaaaaggtgaccctgggaaggatggagttgggcaacctgggctgcccggccctccagggccaccaggccccgtggtatatgtatctgagcaggatgggtctgtgctaagcgttcccgggccggagggacgcccagggtttgccggttttcctggcccggcgggccctaaaggcaacctgggatccaagggtgagagaggaagcccaggcccgaaaggtgagaaaggtgagcctggctctatatttagtcccgacggtggggcactaggacccgcacagaagggcgccaagggggagcccggtttccgcgggcctcctggaccctacgggagacctggatataagggtgagattggattccctggccgacctgggcggccggggatgaatgggcttaagggcgagaaaggcgaaccaggtgacgcatccctgggatttggcatgcgcgggatgcctggcccgcccggcccaccaggtccccccggtcctccaggaacccctgtgtacgactcaaatgtcttcgcagaaagcagcaggccaggacctcctggactgccagggaaccagggtcccccaggccccaagggtgccaaaggcgaagtcggtccacctggtcctcccggacagtttccttttgacttcctccagctggaagccgaaatgaagggcgagaagggcgataggggagacgctggccagaagggagagcgcggtgagccaggaggcgggggcttcttcgggtcgtctcttccaggcccccctggaccacccggcccccctgggccacgtggatacccaggcattccgggaccaaaaggtgagagcattaggggccagcctggaccacccggaccccagggacccccgggaatcggctatgagggtcgacaggggccgcccggaccgcccggccccccggggccacccagtttcccgggaccacatcgccagactatcagcgtgcctggacccccgggacctccgggaccgcccggcccccccggaactatgggcgctagcagcggagtccggctttgggctacccggcaggcaatgctgggacaggttcacgaggtgcctgaaggctggctaatctttgtcgccgagcaagaggagctctacgtacgcgtccagaatgggtttagaaaagtgcagctggaagcgaggacccccctgcctaggggaactgataacgaggtggccgcactgcaaccgcctgtggtgcagttgcacgattccaacccgtacccacgccgcgaacacccacaccccactgcccgcccctggcgtgccgacgatatcctggccagcccaccgcggcttcctgagccacagccgtatccaggagcaccccaccactcctcatatgtgcatctgaggcccgcaagacccacatctccgccggcacacagtcatagggatttccaaccggtgctccatctggttgccttgaactctcccctgagcggcggcatgcgaggcattaggggggcggacttccagtgctttcagcaggcccgggccgttggtctggctggtacatttcgtgcattcctgagcagtcgcctccaggatctctactccatcgtgaggcgggcagatagggcagcggtgccaattgtgaatctcaaagacgagttactgtttccttcttgggaggccctgttctccggcagtgaaggaccactgaagcccggcgcgcgcatcttttcgttcgacggtaaggacgttttgcggcatccgacatggccacaaaagagcgtgtggcacggttctgaccctaacggaaggcgattaacggaatcctattgcgaaacatggaggaccgaagctcctagcgcaactggtcaggcctcatctctgctaggcgggagattgctcggacaatctgccgccagttgtcaccacgcatatattgttctatgtattgaaaacagctttatgactgcaagcaagtag

SEQ ID NO: 23616 - DNA, 4020 bp, synthetic construct
  misc_feature 1..4020: note = Description of Artificial Sequence: Synthetic coding sequence
  source 1..4020: mol_type = other DNA
atggccccccggtgcccctggccctggccccggcggcggcggctgttggacgtactggctccactcgtgctcctgctgggggtccgggcagcctctgccgagcctgaacgcatatccgaggaagtaggtctactccagctgctcggagacccacccccccagcaggtgacccagactgacgatccagatgtgggtctggcatatgtattcggaccagacgccaactctggccaggtggccaggtatcactttccctctttattctttagagacttctctttgctgttccacattagacctgcaactgagggtccaggcgtcctctttgctataaccgacagcgcccaagccatggtgctgttgggggtgaagctttccggtgtacaggacggtcaccaggacatatctttgctttataccgagcccggtgcgggccaaactcataccgcagcgtcctttagacttcccgcattcgtaggtcagtggacccatctggcacttagcgtcgccggaggattcgtagctctatacgtggattgcgaggaatttcagcgaatgcctctggcgcgtagttccagagggctggaactggaacccggagctggtctgtttgtcgcccaggccggtggtgcggatccggataaattccagggagtgattgccgagttgaaggtgagacgagaccctcaggtgtccccaatgcactgcctcgatgaagagggcgacgactccgatggcgcctcgggcgatagcggctctggattaggcgatgctagagagctgttgagagaggaaactggggccgcgctgaaaccaagactgcccgcaccaccacccgttaccacacccccactggccggcgggtcctctactgaggattcaagatcagaggaggttgaagagcaaactaccgtggcttctttgggcgcgcagacactcccaggtagcgactcggtgtccacctgggatggtagcgtccgcacccccggcggacgcgtaaaagagggaggcctgaagggccaaaagggtgagcctggagtaccggggccccctggccgagccggcccacctggtagcccgtgtctgcctggacctcccgggctgccctgtcccgtttccccgctcggaccagcagggcccgctctacagaccgtcccaggcccccagggcccgcctgggcccccaggccgggatggcacacccggacgggacggcgagccaggcgacccgggcgaagacggcaagcctggcgataccggcccacagggctttccaggaaccccaggggatgtcggccctaagggggataagggcgaccccggcgtaggagagcggggccccccaggcccacaaggtcctccaggtccacccgggccctcattccgccacgataagttgacttttatcgacatggaggggagtggcttcggcggcgacttggaggctctccgtgggcctcgcgggttccctggcccaccagggcccccaggggttccaggcctgcctggggagccgggacgttttggtgtcaactcatccgatgtgccagggccggcaggactccctggagtgcccggcagggaaggaccaccaggatttcccggcctgccaggtccacctgggccgcccggaagagaaggtcctcctgggcgcaccggacagaagggctccctgggcgaggctggtgcgccaggtcacaaggggagcaagggtgctcctggtcctgctggcgccagaggcgaatctggcttggcgggcgcccctggtccggcggggccaccaggtccccctggaccccctggaccgccagggccggggctgccggctggctttgatgacatggaagggtctgggggaccattctggagtacggcgaggagcgctgatggcccccaaggtccccctggcttgccgggtctgaaaggggatcctggagtaccaggtctaccaggcgcaaagggcgaggtgggggctgacggggttcctgggtttcccggacttccaggcagggagggcatcgccggaccccaaggcccaaaaggggaccgaggtagcagaggagagaagggagaccccggtaaggacggggtcgggcaacccgggcttccaggtccaccgggcccacctggccctgtcgtgtacgtcagtgaacaagatggatctgtcctgtctgtgcccggccccgaagggcgccccggctttgccggattcccaggacccgccggtcctaaaggcaatctgggcagcaagggagagagaggctcaccaggacctaaaggagagaaaggagagcccggatcaatcttctcccctgacggcggagccctcgggccagcacagaagggggcaaagggggaaccgggattccgtggccctcctggcccctatggcaggcccgggtataaaggggagataggctttcctggcagacccggacgccctggcatgaatggcctcaaaggcgagaaaggagagcctggcgatgcttctcttggcttcggcatgagaggaatgcccggtccaccaggccctccagggcctccaggcccaccgggtacccctgtgtacgatagcaacgtcttcgctgagtcctcccggccagggccccccggcctgcccggcaatcagggaccacccgggcccaagggggctaagggtgaagttggtccccctggaccccccggacagtttcccttcgatttcctccagctagaggccgaaatgaagggggaaaaaggcgatcgcggcgatgctgggcagaaaggggagaggggcgagcctggcggcggcggcttcttcggcagcagtctgcctgggccacccggtcccccaggaccccccggacccagagggtaccccggaatccccggccccaagggtgaaagtattcgaggccagcctggacctcctggaccccagggtcccccggggatcggttatgaaggacggcagggcccccccggcccaccaggcccgcccggacctccttcctttcctggacctcaccggcagaccatttctgtgcctggcccccctggccctcccggaccacccggcccccctggaaccatgggagccagctccggagtccggctttgggccacccggcaggctatgctgggtcaggttcacgaggtgccagagggctggctaattttcgtggcagagcaagaagaactatatgttcgagtgcagaatggatttcggaaagtccagcttgaggcacgcactcctctgcctcgaggaacagataacgaggtggcagccctgcagccacctgtagtccagcttcatgactccaatccttatcctcgcagagaacacccacaccctaccgcgcgaccatggcgagctgatgacattctagcttcccccccacggttaccagaacctcagccctaccctggggctccacaccattcctcttacgtacacctcagaccggcccggcctacatctcccccagcacattctcatagggacttccaacctgtgctgcaccttgtggcactgaatagtccactgagtgggggtatgagaggtatacgcggtgcagacttccagtgttttcagcaggcccgggccgtgggcttagccggtacctttcgcgcctttctgagtagtcgattacaggatctgtattcgatagtacgcagggcggatagggcagcagtacctatcgtgaatcttaaggatgaactcctgttcccttcttgggaggctctgttctctgggtcagagggccctctgaaacccggagcaaggatttttagtttcgatggcaaggacgttctgcgtcaccccacttggcctcagaagagtgtgtggcatgggagtgaccctaacgggaggagactcacagagtcttactgtgaaacctggcgaacagaggcaccatccgcaactggccaggcgtcctctttactcggaggccgactgcttgggcaaagtgctgcctcatgccaccatgcgtatattgtgctctgcattgagaactcctttatgaccgctagcaaatag

SEQ ID NO: 23617 - DNA, 4020 bp, synthetic construct
  misc_feature 1..4020: note = Description of Artificial Sequence: Synthetic coding sequence
  source 1..4020: mol_type = other DNA
atggccccccggtgcccctggccctggccccggcggcggcggctgctcgacgtgcttgctcccctggtgctgctgttgggagtcagagctgcttctgccgagcccgaaagaatttctgaagaagtgggcctgcttcagctgttaggggacccgccaccacagcaggtcacacaaactgatgaccccgatgtaggtctggcatacgtcttcggtcccgacgccaactctgggcaggtggcccgatatcacttcccatctctcttttttcgggatttctccttgcttttccacatccgtccagccacagaagggcctggtgtcctgtttgctatcaccgactctgcacaggcaatggtgctgctcggcgtcaaattgagcggagtccaggatggacaccaggacatctccctactctacaccgagcctggagcagggcagacacacactgctgcgagctttaggctacccgccttcgtggggcagtggacacatctggctctcagcgttgccggaggcttcgtggcgctgtacgtggattgcgaggagttccagcgcatgcccctggcacgatcgagtagaggactggaactagaacctggagctggcttgttcgtggcccaggccggcggggccgatcctgataagttccagggggtcattgccgagttgaaggtgagacgagaccctcaggtgagcccaatgcactgtctggacgaagagggcgatgactctgatggagccagcggagattcaggatcagggctgggcgacgcacgggagctcttgagggaggagacaggcgccgcccttaagcctcggctgccagcgcccccgcctgtgacgacccccccgctggctgggggctcatcaacagaggactccaggtccgaagaagtggaggaacagacaacagtagcgtctctcggagcccaaacactccccgggagcgatagtgtatcgacctgggatggaagtgtgaggacaccagggggcagagtgaaggaagggggactcaagggacagaagggtgagcctggagtgccggggcctccaggtcgcgctggcccccccgggtcaccctgcctccctggcccccctggcttaccatgtccggtgtccccgctgggaccagctggacccgccctccaaaccgtcccgggcccccagggcccccctggtccgccaggccgcgacgggacccctggtagagatggggaacctgtgagtccccacgtaccaccttctccaggcgacacgggccctcaaggatttcccgggacccccggcgatgtgggccctaagggcgataagggcgaccctggtgtgggagaaaggggccccccagggccccagggacctccaggacctcccggaccgagttttcggcacgacaagctgacattcattgacatggagggtagtggttttggtggagacctggaagccctgagaggaccgcgcggattcccgggacccccaggtcctccgggggtgcccggccttcctggcgaaccgggtaggttcggcgtcaattcttctgatgtccccggacctgcaggactgcccggggtccccggtcgagaaggtccacccgggttccccggcctaccagggccccccggaccacccgggcgcgaaggacctcccggaagaacaggccaaaaggggtcgctgcagggcgcaggcgctccaggagtccaggggagcaaaggcgcccctggaccggcgggagctcgcggagagagcggactggcgggggctccggggcctgccggcccgcccggaccgccaggcccaccgggcccccctggaccgggtcttcccgcaggcttcgacgatatggagggcagtggcgggcctttctggtcgacagcccggtcagctgacgggccccaagagccacccgcactgcacggaattggcggcgatcctggtgtaccaggactcccaggagctaagggcgaggtgggagctgacggcgtgcctggattccccggacttccaggtcgcgaagggatcgccggcccgcaaggccccaagggggaccggggcagcagaggggagaagggggacccagggaaggacggtgtcggccagccgggtctgcccggcccgccaggaccccctggccctgtagtgtacgtaagtgaacaggacggctctgtgctgtctgtgccagggcccgaggggcggccaggctttgccggattcccgggacccgcaggccctaaaggcaacctcggatccaagggggagagaggaagtcctggtccaaagggtgagaagggtgaacccggttcaatctttagtccagacgggggggcgctcggccctgcccaaaagggcgctaagggcgagcccgggtttcgaggcccccccggcccctacgggaggcctgggtacaagggggagatcggattcccaggtcggccgggccgccccggcatgaacggcttgaagggtgagaagggtgagcctggtgatgcctcactcggatttggaatgaggggaatgcccggacctccaggccctcctggtccaccaggcccacccggcacgccagtatatgatagcaacgtattcgcggaatctagccggcctggccctcccggccttcccggaaatcagggaccacctggtccaaaaggagctaagggcgaggtcggtcccccgggtcccccgggacagttcccatttgacttcctgcagctagaggcagaaatgaaaggggagaagggcgaccggggagatgccgggcagaagggcgagaggggggaacctggcggtgggggattcttcggatcctcactccctggaccccctggtcctcctggcccccccggacctcgcggatacccgggcatccccggtcccaagggcgagtctattagggggcagcctggaccccccggtcctcaggggccacccggaatcgggtacgagggcaggcaggggcctcctggtcctcctggaccgccgggcccgccatcctttcccgggccacatcgacagaccatttctgtgcccggacctcctggaccccccggacccccagggcctccgggcacaatgggggcctcatctggggtccggctgtgggctactaggcaggctatgctcggccaagtgcatgaagtgcctgaaggctggctaatcttcgtggctgagcaagaggaactgtatgtccgcgttcagaacggatttagaaaagtccagctagaggccaggacccctctgccacggggaaccgataatgaagtggcagccctccagcccccagtggtgcagctgcacgacagcaatccataccccaggcgggagcatccacacccaactgcaagaccttggcgagctgacgatattctcgcaagtcctccacggctcccagagccacaaccatatcccggcgcaccccatcattcctcatacgtccacctccgccctgcccgacccacatcccccccagcccacagtcacagggatttccagcctgtgttacacctggtcgcactcaacagccccctgagtggcggcatgagggggatcaggggtgccgatttccagtgtttccaacaagcccgagcggtgggccttgcaggaacctttcgggcatttttgagttcacgcctgcaggacctctactctattgttcgccgcgccgaccgggcagcagtgcccatcgtgaacctgaaggatgagctcctgtttccctcatgggaggccctcttcagcgggtccgagggtcctctcaaaccaggggcaaggatatttagtttcgacggcaaagatgtgcttagacaccctacatggccgcagaaaagcgtctggcatggatctgaccctaacggacggcggctcacagagagttactgtgagacctggcgtactgaggcaccaagtgcaacgggtcaggcaagttcactgcttggaggcaggctcctgggacagagcgccgcaagctgccatcacgcatatatcgtactctgtatcgagaatagttttatgaccgccagcaaatag

SEQ ID NO: 23618 - DNA, 5265 bp, synthetic construct
  misc_feature 1..5265: note = Description of Artificial Sequence: Synthetic coding sequence
  source 1..5265: mol_type = other DNA
atggccccctacccctgcggctgccacatcctgctgctgctgttctgttgtctcgcagcagctcgagcaaatctgctaaatctgaactggttatggtttaataacgaagatacctcacacgcagcaacaaccatccccgagccacagggccccttgcctgtacaacctacagcagacactacgacacacgtgacaccccgcaacgggagtacggaacctgccacagccccaggctctcctgagccccccagcgagctgctggaagatgggcaagacacacctaccagtgctgaatcaccagacgctccagaggaaaacattgcgggagtgggtgcggagattctgaacgtggctaaaggcataagatcatttgtgcagctgtggaacgacaccgtacccaccgagtcgctggcaagggcagaaacgctcgtgcttgagacccccgtgggtcctttggcactcgccggcccaagctcaactccacaagagaatggcactactctgtggccgtctaggggaatacctagcagccctggagcccacaccaccgaggccggcaccctgccagcgccaaccccatctcctccgtccctggggcgtccctgggccccgctgacaggcccatctgtcccgccaccatcctccggcagggcaagcctatcctcactgctcggaggggcccctccttgggggagccttcaggacccagacagccaaggactgagccccgcagctgcggcgccgtcgcagcaattgcagcgacctgacgtaaggctccgcacgcctctgctccatccacttgttatgggatctctcggtaaacatgcggcacctagtgccttctccagtgggttgcccggagcactgagtcaagtggctgtgactacactgacaagggattctggtgcatgggtgtcgcatgtggcgaattccgtggggcccggactggctaataattccgccctgcttggagcggatcctgaagcaccggccggccgctgcttgccattaccacccagcctgccagtgtgcggccacctaggaatcagccggttctggctgccgaatcacctccatcacgaaagcggcgagcaggtgcgtgcaggtgcccgcgcttggggcggacttctccagacacattgtcaccccttcttggcatggttcttctgtctgctcctcgtgcctccttgtggcagtgtgccaccaccagcacctcccccgtgctgtcagttttgtgaagccctgcaggacgcctgttggagtcggttaggcggcggtcgtctcccggtggcctgtgcctctctccctacccaggaggacggctactgcgtgttaattggccctgcggcggagcgaatatcagaggaagtgggcctgttacagctgcttggcgaccccccacctcaacaggtgactcagaccgatgatccagacgtgggattggcctacgtgtttggccctgatgccaacagcggacaagtggcacggtatcactttccatccctcttcttccgcgattttagcctactctttcatatccgccctgctactgaagggcctggagtcctgttcgcgataactgattctgcgcaggcaatggttctgctcggcgttaagctttccggggtccaggacggccaccaggacatttctttactttatactgagcctggagctggacagacacacaccgcagcctctttccgcttgcccgcttttgtcggccagtggacacatcttgctctcagcgtagctgggggttttgtggctctctacgtggattgtgaggaatttcagcggatgccattggctagaagcagcagggggctggagttggaaccaggcgcagggctgttcgttgcccaggctggcggcgcagaccctgataagtttcaaggagtgatcgctgaactcaaagtcaggcgcgacccacaggtgagccccatgcactgtctggatgaagagggcgatgacagtgatggagctagcggcgattccgggtccggtcttggtgacgccagagagctcctgcgcgaagagactggcgctgcgttgaagccccggcttccagcacctccacctgtgactacacccccactagctgggggctcctctaccgaggattcaagaagcgaagaggtcgaggaacaaaccacagttgctagtctgggcgcccagactctcccaggttccgactcggtatctacttgggacggctcagtcaggacccctggaggacgagtcaaagaaggagggttgaaaggccagaaaggtgaacccggggtgccaggaccgcccggacgagcaggacctcccggaagtccctgcctgccagggccccctggattaccctgtccagtgagtcccctaggacctgcaggcccggccttacaaacagtgcctggccctcaaggccccccaggccctcccggtcgagacggtacccctggacgcgatggagaacctgtgtcacctcacgtgcccccgtcgcccggggacacaggaccacaaggttttcctggcacgccaggagacgttggtcccaagggggacaaaggcgatccgggcgttggcgagcgtggcccccctggccctcagggcccccccgggcctcccggcccaagctttagacacgacaagcttacctttattgatatggagggatcgggtttcgggggagatctagaagcccttcgtggcccacgtggattccctggcccgccgggccccccaggggtgccgggactcccaggtgaacccgggcgctttggcgtcaattcttctgatgtgcctggaccagccggtctgcctggcgtgcccggccgcgaaggcccaccgggattccccggactgcctggaccccccgggcccccgggccgggaaggaccccctggccggactggccagaaaggctcactccagggagccggtgcacctggcgtgcagggttctaaaggtgcccctggccctgcgggcgcaagaggggagagcgggctcgccggagctcccggtcctgccgggccaccaggcccacctggtcctccaggcccgccaggaccaggcctgccagcaggctttgacgacatggagggatccggaggcccattttggtcaacagcccgatccgctgacggtccacaaggaccccccggacttccaggtctgaagggcgaccccggcgtgcccgggcttcctggcgccaagggcgaggttggagctgatggcgttcccggctttcccggcctcccaggccgggagggcatcgcaggacctcagggacctaagggagatcggggctcaaggggcgagaagggagatcctggaaaggatggggttggacagccgggactgcctggtcctcccggaccccctggccctgttgtgtatgtgagtgagcaagatggcagcgtgctgtctgtgccaggccccgagggcagaccaggtttcgccggcttcccaggaccagctggcccaaagggcaatctcgggtccaagggggagcgcggcagtccggggcctaagggcgagaaaggtgaaccggggtcaatttttagcccggatggtggagcccttggaccagcccagaaaggagccaagggcgagcccggcttccggggcccaccaggcccctacggccggcccggatataagggagaaattggttttcccggacgccctgggcgtcctggaatgaacggattgaaaggtgagaaaggggagcccggagatgcctctctcggatttggcatgcggggaatgcccggaccacccggcccccccggacctcccgggcctcctgggactcccgtatacgattctaacgtttttgcagaaagcagtcggcccggacccccgggtctgcctggcaatcaaggcccacctggcccaaaaggggccaagggcgaggtggggcccccagggccccccgggcagttcccctttgacttcttgcaactggaagctgaaatgaaaggagaaaaaggcgatcgcggcgacgcaggccaaaagggcgagaggggagagccgggaggtgggggattctttggatcttccctgcctgggccccctggcccacccgggccaccgggaccccgcggctacccggggatcccgggacccaagggcgagagtattcgggggcagccaggaccaccaggtccacaaggcccccctgggataggctatgagggcagacagggcccgcctgggccaccaggacctcccggccccccatcttttcctggcccacacaggcagactatctcagtgccaggcccaccggggcctccaggtccacctggtcctccaggtactatgggcgcttcctctggggttcgtctgtgggcaaccaggcaggcaatgctgggccaagtgcacgaggtgccggagggatggctgatatttgtagcagaacaggaggagctctatgtgagagtccagaacgggttccgaaaggttcagctggaagctcgcaccccactcccacggggaacggacaacgaagtagctgctctgcagccacctgtggtgcagctccacgattccaatccctatccacgcagagaacaccctcatccaactgccagaccctggcgggctgatgatattctcgcgtcaccaccaagactgcctgaaccgcaaccttatcctggggcaccccatcactcgagctacgttcatttacggccagcgcggcccacctctcccccagcacactcccatagagatttccagcctgtcctacacctagtcgctcttaacagtccactgagcggcggcatgaggggcattagaggggccgacttccagtgcttccagcaggcgagagcagtgggactcgctggaacattccgcgcgttccttagctctcggctgcaggatctgtatagtatcgtgcgtcgcgccgaccgcgcagcagtgcctatcgtcaatctgaaagacgagctactcttcccctcatgggaggccctgtttagtggtagtgagggaccactaaagccaggagcgcgcatcttttcgttcgatgggaaagacgtgctaagacatcccacatggccccaaaagtctgtgtggcacggaagcgacccgaacgggagaaggttgactgagagctactgtgagacctggcgcactgaggccccttcggctacggggcaggcatcctcccttctgggtggacggctgcttgggcagagtgcagcctcttgccaccacgcctacatcgtcctttgcatcgaaaactcctttatgacagcttccaaatag

SEQ ID NO: 23619 - DNA, 1623 bp, synthetic construct
  misc_feature 1..1623: note = Description of Artificial Sequence: Synthetic coding sequence
  source 1..1623: mol_type = other DNA
atgggccccggcgagcgggccggcggcggcggcgacgccggcaagggcaacgcagccggcggcggcggcgggggcagatctgcgacaacagccgggtctagagcggtgtctgccctgtgcctcctcttaagtgtgggatccgcagccgcttgtctgctcctaggagtgcaggccgctgccctccagggcagagttgcggcgttagaggaggagcgggagctgttgagacgcgcagggccgcctggggctctggatgcctgggccgaaccacacctcgagagactgctgagagagaaactcgatggcctggctaaaattaggacagctcgggaagctccttccgagtgtgtgtgtccccctgggcctcccggcaggcggggtaagccagggcgcaggggcgacccgggaccacctggtcagtcaggcagggatggttacccaggacccctggggctggatggcaaaccaggactgccaggcccgaaaggagaaaaaggggcgcccggcgatttcgggccacggggtgatcagggtcaagatggtgcggccggaccgcccggccctccaggacccccaggtgcccgtggtccccctggcgacactggcaaagacgggccccgcggcgcccaaggacctgcaggacccaaaggagagcccggacaggatggggaaatggggcccaaaggccccccaggtccgaaaggcgagcccggagtgccgggcaagaaaggagatgacggaacaccaagccagcctggtccacccggtcctaaaggcgagccgggatcgatggggcctcgaggcgagaacggcgtggatggtgctccgggccccaagggcgagcccggccaccgaggcactgacggtgcagcaggcccacgaggggcccctggacttaaaggagaacaaggagacaccgtcgtgatagactacgacggacgtatccttgacgctcttaaaggcccccccggaccccaaggcccccccggtccccctgggattcccggtgcaaagggggaactgggactccctggagcccccggcattgatggcgagaaaggtcctaaagggcaaaaaggggatcccggagagcctggccctgctggcttgaaaggcgaagcgggagagatgggtctcagcggcctccccggagcagatggccttaagggggagaaaggcgaatctgcatccgatagcttacaggaatcattggctcaactgatcgtggaacctggcccccctggcccacctggacctcctggtcccatgggactccagggtattcagggaccgaaggggttggatggggccaaaggggagaagggagctagtggagaaagaggcccttctgggctgccaggcccagtagggccccctggtctgatcggcctccccggaacaaagggcgagaaaggaagaccaggtgaacccggactggacggcttcccaggcccccgcggcgaaaagggcgaccggtcagagcggggagagaagggagaaagaggcgtgccgggcaggaagggcgtgaaagggcagaagggcgagcctgggccaccaggcctcgatcagccttgcccagtggggccagatggattgcctgtccctggctgctggcataagtag

SEQ ID NO: 23620 - DNA, 930 bp, synthetic construct
  misc_feature 1..930: note = Description of Artificial Sequence: Synthetic coding sequence
  source 1..930: mol_type = other DNA
atggagagccggagcggcatccaggccggcgtgcggtgccgggacctcggttcactgcagcctcctccactggctttaaagcaattctcaagtctgagtttgccgtcgtcttgggactaccgccggctgccaccaaggtgtggatttcttttcgaggtttccgaaaccacaaaccctccagccggtacaaactccaggcacacactgaccgtaaaattggatgggctcgcaaagatcaggacagcaagggaggcccctagcgagtgtgtctgcccccccggaccccccgggcgtcggggaaaaccaggacgccgaggtgatcccggaccacctggcccccttgggttggatggcaaacccgggctccctgggccaaagggggaaaagggagcacctggagacttcgggccacgtggggaccaaggacaggatggtgccgccgggcccccgggtccacctggaccgccaggcgccaggggaccacctggggacaccggcaaggatggtcctcggggcgcacaggggccagctggtccaaaaggggagcctggtcaggatggagagatgggaccaaaagggcctcctgggcccaaaggagaaccaggggtcccaggtaaaaagggggatgatggcactccctcccaaccaggaccaccaggcccaaagggcgagcccggatctatgggaccccggggggaaaatggagtggatggcgcccccgggccgaagggtgagccaggccaccgtggtacagacggcgccgcaggcccgcggggcgatgtccgagaccccggcctgggatctgtctcttcctgttcccagcgacttgccagctcaagcaaaaaaaatggatccgagccgccacctggttgcgcaggttgtccacgcccccagggacgagccggacggcactcaggggataggctctag

SEQ ID NO: 23621 - DNA, 1665 bp, synthetic construct
  misc_feature 1..1665: note = Description of Artificial Sequence: Synthetic coding sequence
  source 1..1665: mol_type = other DNA
atgaccgcccccggcgccgccggccggtgcccccccaccacctggttaggtagcttgttgctgctggtctgtctgctcgcttcacgctctattacagaggaagtaagtgaatattgttcccacatgataggatcaggccatcttcagagcctgcagcgcttgatagacagccagatggagacttcatgccagataacgttcgagtttgtggaccaggaacaattgaaagaccccgtgtgctacttgaaaaaggcctttctccttgtccaggacatcatggaagacacgatgcgctttcgtgataatactccaaacgctatcgccatcgtccagctgcaggaattgtcactccggttgaagtcctgctttactaaagactacgaggagcacgacaaggcctgcgtgagaaccttctacgagaccccattacaactgctggagaaggttaaaaacgttttcaacgagacaaaaaacctgttggataaggattggaatatcttttccaagaactgcaacaactctttcgcagagtgcagttcccaggacgtagtcactaaaccagactgtaattgcctctaccccaaagccatcccttcttcagaccccgccagcgtctccccacaccagcctctcgcaccatccatggcgcctgtcgcaggactgacttgggaagattcagagggaaccgaaggatcttcactgctgcccggcgagcagccactccataccgtagaccccggatcagccaagcagagaccacccaggtctacttgtcaaagctttgaaccccctgagaccccagtcgtcaaagattctacaattgggggtagtccacagccacgtccttcagtaggcgctttcaacccaggcatggaggatattctagattcagcaatgggaactaactgggtaccagaggaggcttcaggtgaggcctccgagatccctgttccccagggtaccgagttgtccccatcacgacccggcggcggcagcatgcaaacagagcccgcgaggcctagcaactttctgtccgcgtcttcgcccctccccgcctcggctaagggtcagcaacctgcggacgtgactggaacagctctgccgcgagttggcccagttagacccactggtcaggactggaatcataccccccagaaaacagaccacccgtccgcattgctgcgggatccgcccgagcccgggagccccagaatatcttctttgagaccgcagggcctgagcaacccttcaacgttatccgcacagccacagctgagccgttcacactctagtgggagcgtgctgccgctaggcgaactagagggccgacgtagtacgcgcgatcgacgatcccctgctgagccggaaggcgggcctgcctccgaaggggccgcgcgccctttaccccgttttaatagcgtccctcttaccgacacagggcacgagcgccagtccgagggctctttcagccctcaactccaagagagcgtgttccacctgctggtgccatccgtcatcctagttctgctggcagttggcggccttctgttctaccgttggcgtcgtagatcacatcaggaaccccagcgcgccgactcacctttggagcaacctgaaggtagtccactaactcaagatgacagacaggtcgaactacccgtgtag

SEQ ID NO: 23622 - DNA, 1317 bp, synthetic construct
  misc_feature 1..1317: note = Description of Artificial Sequence: Synthetic coding sequence
  source 1..1317: mol_type = other DNA
atgaccgcccccggcgccgccggccggtgcccccccaccacctggctgggttccttacttttattggtgtgcttgttggcctctcgctccatcacagaggaggtgagtgaatactgctctcacatgataggttcagggcatttgcagagtttgcaacgactgattgactcacagatggagacttcttgccagatcactttcgagtttgtggaccaggagcagctcaaagaccccgtttgctatctcaagaaggcttttctcctggttcaagatattatggaggatacaatgcgattccgcgacaacacacccaacgcaattgccatcgtgcagcttcaggagctctctctacgtttgaagtcttgcttcactaaggattacgaggaacatgacaaagcctgtgtgcggaccttctacgagacccctctacaactcttggagaaggtaaagaatgtgttcaacgaaacgaagaaccttctggacaaagactggaacattttttccaagaattgtaacaactcgtttgccgagtgctcatcccaggacgtcgttactaagcccgattgcaattgcctgtatccgaaagccataccttccagtgaccccgcgtccgtgtctcctcaccagcccctggccccctctatggcgccagttgccggtctcacttgggaggactccgagggaacggagggcagtagcctgttacctggtgaacaacctcttcatactgtggaccctgggtccgccaagcagagaccgcctaggtcaacatgccagtcttttgagcctcctgagactcccgtcgtgaaagatagcactatcggaggatccccgcaacccaggccttctgttggcgcatttaatccgggaatggaggatatcctggatagcgccatgggtactaactgggtcccggaagaggcttcgggagaggcctctgagatcccagtccctcagggaacggagttgtctcctagccgcccaggagggggatcaatgcagacagagccagcccgaccgtccaatttcctgtcagcctcgtctcccctcccagcaagcgccaaaggtcaacagccggcggatgttacaggccacgagcgacagtccgaaggttccttttcaccccagttgcaagaaagcgtctttcatttgcttgtgccttccgtgatcctcgtcctgctggctgtcggaggtttgctgttttatcggtggcggaggcgctcacaccaggagccgcagcgagcggattcccctctagagcagccagaaggcagcccgttaacacaggacgaccgacaggtggagttacccgtttag

SEQ ID NO: 23623 - DNA, 360 bp, synthetic construct
  misc_feature 1..360: note = Description of Artificial Sequence: Synthetic coding sequence
  source 1..360: mol_type = other DNA
atgaccgcccccggcgccgccggccggtgcccccccaccacctggctcggctcattactgttgttagtgtgtctccttgcttcccgctcaataacggaggaggtgagcgagtactgctctcatatgatcggctccgggcatctccagtccctacagcgactcatcgattctcagatggaaacatcctgtcagattacctttgaattcgtggaccaggagcagctgaaagaccctgtttgctatctgaagaaggcattcctgctggtacaggacataatggaggataccatgcgctttcgagacaataccccaaacgctatagccatcgtccagctgcaggagttgagtcttcgactatag

SEQ ID NO: 23624 - DNA, 1317 bp, synthetic construct
  misc_feature 1..1317: note = Description of Artificial Sequence: Synthetic coding sequence
  source 1..1317: mol_type = other DNA
atgaccgcccccggcgccgccggccggtgcccccccaccacctggctaggaagcctgctccttctcgtgtgccttctggcatctaggtccattaccgaggaggtgtcggagtactgctctcacatgattggatccggccatttacagagcctgcagcgtctaatcgattcacaaatggagacttcatgtcagattactttcgaatttgtggatcaggagcagctgaaggacccggtgtgctatttgaaaaaggctttcctgttggtgcaggacataatggaggatacaatgagatttcgtgacaatacccctaatgcaattgctatagtgcagctgcaggagctgtcacttcgactcaagagctgcttcaccaaggattatgaggaacatgataaggcttgtgttagaaccttttatgaaactcccttgcagcttctcgaaaaggttaaaaacgtgttcaatgagacaaaaaaccttcttgataaggattggaacatctttagtaagaactgtaataattcgtttgccgagtgttcatcccaggacgttgtgacgaagccagactgcaattgtctctaccccaaagccatcccctctagcgacccagctagcgtgtctccgcaccagcctttggctcccagtatggctcctgttgcgggcttgacgtgggaagatagcgagggaaccgagggctcctctctcctgccaggcgagcagccactacacaccgtcgacccagggtccgctaagcagcgcccgcccaggagtacatgtcagagctttgaaccacccgaaacccctgtggtcaaagacagcacaatcggcggatctccccagccaaggcccagcgtgggtgcctttaatcccggcatggaggatatcctggatagcgcaatgggcacaaactgggttcctgaagaggcttccggagaggccagcgagatccccgtcccccaagggacagagctgtccccatccaggccgggtgggggatcaatgcagaccgagcccgccagaccaagcaactttctgagcgcgtcatctcctttgccagcttctgcgaagggacagcaacctgctgacgtaactgggcatgaaagacagtccgaaggcagcttcagtccccagctgcaggaaagtgtgttccatctcctggtaccctccgtaattttggtactgctcgccgtgggggggttgttgttctatcgctggagaagacgctcacatcaggagcctcagcgcgccgatagccctctggagcagcccgaagggtcccccttaacccaggatgacagacaagtcgaactgcccgtctag

SEQ ID NO: 23625 - DNA, 1665 bp, synthetic construct
  misc_feature 1..1665: note = Description of Artificial Sequence: Synthetic coding sequence
  source 1..1665: mol_type = other DNA
atgaccgcccccggcgccgccggccggtgcccccccaccacctggcttggcagtctgctgctgcttgtatgtctgctcgctagccgatctattacagaggaagtgtcggagtactgtagtcatatgatcggctcaggtcatctgcagtcacttcagaggctgatcgacagccagatggagacctcctgccaaattacgttcgagtttgttgaccaggagcagctgaaggatccagtctgttatcttaaaaaagcctttctgctggtgcaagatatcatggaggacacaatgcgtttcagggacaacacacccaatgctattgctattgtgcagcttcaagaactttcgctaaggctgaaatcttgctttaccaaagattatgaggagcatgacaaggcttgcgtgagaaccttctacgaaacacccctgcagctcctagagaaagtgaaaaatgtgttcaatgagactaaaaacctcctcgacaaggattggaatatctttagtaagaattgtaataacagttttgctgagtgcagttctcaggatgtggtgacaaagccagactgcaattgtttataccctaaggccattccctctagcgatcctgctagcgtgtcaccacaccagcccctggctccatccatggcacctgtggcgggactcacgtgggaggactccgaggggacggagggcagttctctgctcccaggcgaacagccgttgcacaccgtggaccctggttccgccaagcaacgaccccccaggagtacatgccagagctttgagccacccgaaacccctgtggtgaaagatagcactatcggaggatcacctcagccaaggccaagtgtcggcgcctttaaccctggaatggaggatatcctggatagtgccatggggacaaactgggtccccgaagaagctagcggcgaagctagcgagatccccgtgccacaggggaccgaactttcgccgtctaggccaggaggagggtctatgcaaacagaacccgctcggcctagtaactttctgtcagcttccagccctctgccagcgtcagccaagggccagcaaccggcggacgtaaccggcactgccctcccccgggtggggcccgtcaggccaaccggacaagactggaatcacacccctcagaagaccgatcacccatccgctttacttcgggatcctccagagccagggtctccccgtatttcttccctaagaccccagggactgtccaacccctccaccctgtctgcacagccgcaactctcacgcagccacagctcaggttcggtgctcccacttggtgaacttgaagggcgcaggagtaccagggacaggcgtagcccagcagaacccgagggaggacctgcgagcgagggtgcagctaggccactcccccgttttaattcagtcccattgaccgataccggccacgagcgccagtccgaagggtctttttcgccacagctgcaggagtcggtgttccatcttcttgtgccaagcgtgatcctggtactcctcgccgtaggagggctcttgttttacaggtggcgacgtcggtctcaccaagagccacagcgcgccgactcacctctggagcagccagagggctctccactcactcaagatgatagacaggtggagctacctgtctag

SEQ ID NO: 23626 - DNA, 771 bp, synthetic construct
  misc_feature 1..771: note = Description of Artificial Sequence: Synthetic coding sequence
  source 1..771: mol_type = other DNA
atgaccgcccccggcgccgccggccggtgcccccccaccacctggctgggctcgttgctacttttggtatgcttattagcaagcagatccattacggaagaggtcagcgagtactgttctcacatgatcggatcaggccacctccaatctctgcagcgccttattgactcccagatggagacctcatgtcaaataacgttcgaatttgtggatcaggaacaattgaaagatcccgtgtgctacttaaagaaggccttcctgctggtccaggacatcatggaagatactatgagattcagggacaatacacctaatgcaattgccatcgtacagctgcaggagctatcactgcgactgaaatcctgctttacgaaggattacgaggaacatgataaggcctgcgttcgaactttttacgaaacaccccttcagttattagagaaggtgaagaacgtctttaacgaaaccaagaaccttttggataaggactggaatatttttagtaaaaactgtaacaacagtttcgctgagtgctctagtcagggccatgagaggcagtcagagggctccttcagcccacagctccaggaatccgttttccatcttctggtgccgagtgtgatcctggtattgctggccgttgggggtttattattctaccggtggaggcgcaggagtcaccaagaaccacagcgagccgacagcccattagagcagccggagggatcacccttgacgcaagacgaccgccaggtggaactccccgtatag

SEQ ID NO: 23627 - DNA, 828 bp, synthetic construct
  misc_feature 1..828: note = Description of Artificial Sequence: Synthetic coding sequence
  source 1..828: mol_type = other DNA
ggcagccccggcatggccggcgccctgtgcgccggccacatcgccggcctgtatggcgacaggggactggttccatccactcgcagagaagagaggggcggcaggaagacctggcagaccggggctgctcggcctcagggtggcgcccgcggcgcaggtggaccctggcacccggataggcaccctcgaccgaaagagacaagaggcaacctcggcccccttgagacaccagcccgctgggccacccagggaccagcggccccgagcgagcccatacccggtatcaagggaaccaaaggttcccccggtaacatcaaggatcagccccgcccggctttttcagcaatacgccggaatccaaacggcggccaaagaggccatagcacacgtagtagccctacacgcaagaaccgcacccgaacgaccccagcagattccagcgccctttaccccgctaccacaacgtcaccctctaggtgctgcccctccggaaaatccgcctgtccatcgagccccccacaaggcgccaggtctgatgccccttgggcttcggtgacgccccctaccagaggcagctcccgatggtgtcagggcgcttggtgtttttcctgcagccgcgttactcgctcaggcctgaagaaaactcctaagagggtgacattcacccgcgccctgaggccaacggctagtagcgctgcctcatcctccagccatctcccagagcccggcaaggatcccctgcctcatccccctctgtggctgccttgttctgcttgtaaaatgggcgcactactgctgcagctgctgaaaggaggagggtggctctag

SEQ ID NO: 23628 - DNA, 738 bp, synthetic construct
  misc_feature 1..738: note = Description of Artificial Sequence: Synthetic coding sequence
  source 1..738: mol_type = other DNA
atggagggcccccggggctggctggtgctgtgcgtgctggccatctcgcttgcatctatggtgaccgaggacctttgtcgagcaccagacgggaagaagggggaggctggtagacctggcagacggggtagaccgggcctcaagggagaacagggcgagcctggcgctccgggcatccgcaccggcatccagggcttaaagggagatcagggtgagcccgggccaagcggaaaccccggaaaggtaggttacccaggccctagcggccctctaggtgcccgcggcatccctggcattaaaggaaccaagggatcccctggcaacatcaaagatcagcctcggcccgcttttagcgccatacggcgcaacccgcccatgggcggtaacgtggttatcttcgatacggtcatcacaaaccaagaggagccctatcagaaccatagcgggcggttcgtgtgcaccgttcctggctactactatttcacattccaggtgctctctcagtgggagatctgcctgtccatcgtctcctcctcgcgtggtcaggtgagacgctccctggggttctgtgatactacaaacaaaggcctctttcaggtggttagcggggggatggtactgcaactgcagcagggggaccaagtgtgggtagagaaagacccgaagaaaggccacatctaccagggctccgaggcggactcggtctttagcgggttccttatctttccttcagcatag

SEQ ID NO: 23629 - DNA, 738 bp, synthetic construct
  misc_feature 1..738: note = Description of Artificial Sequence: Synthetic coding sequence
  source 1..738: mol_type = other DNA
atggagggcccccggggctggctggtgctgtgcgtgctggccatcagcctcgcctctatggtcacagaggatttgtgtcgcgcccccgacggaaagaaaggtgaggctggaaggcctggacggcgagggcggcccggactgaaaggggaacagggcgaaccaggggcaccgggaatcaggactgggattcagggtctcaagggagatcagggcgaacctggtccctctggaaatcctgggaaggttggctacccaggcccgtccggccctttgggcgccagggggatcccggggattaaagggacgaaaggatcacctggcaatattaaggaccagcccagacctgccttctccgcaatacgcaggaacccgccaatgggcgggaatgttgtgatttttgataccgtgataacaaaccaggaggaaccataccagaaccattcaggtcgctttgtgtgtactgttcccggctactattatttcaccttccaggttctgagccagtgggaaatttgtctgtccattgtttccagttcacgagggcaagtgcggcgatcgctggggttctgcgatacaactaacaagggcctgtttcaggtcgtgagcggaggaatggtgctacagctccagcagggtgaccaggtgtgggtagagaaagatcctaaaaagggccacatctaccagggatcagaggccgattcagtgttcagcggattcctcatttttccatccgcctag

SEQ ID NO: 23630 - DNA, 666 bp, synthetic construct
  misc_feature 1..666: note = Description of Artificial Sequence: Synthetic coding sequence
  source 1..666: mol_type = other DNA
atggagggcccccggggctggctggtgctgtgcgtgctggccatctcccttgcatctatggtcacggaggacctctgccgagcacccgacggaaagaaaggggaggccgggcgcccaggcagaaggggcaggcccggactcaaaggtgagcagggcgagcccggtgctccaggaatcagaacaggaatacagggtcttaaaggagatcagggcgagccgggcccatccgggaaccctggaaaagtgggttaccctggaccctcggggcctcttggggcgaggggaatcccgggcatcaaggggaccaagggatccccaggcaatattaaggaccagcctcggcccgcattcagcgcgatccgccgtaacccccccatggggggcaatgtagtcatctttgacactgtgattaccaatcaggaggagccttaccagaaccattccggcaggtttgtttgcacagtgcctgggtactactactttacatttcaagtactaagccagtgggagatctgtctttctattgtaagtagctcacgcggccaagtgagaaggtccctcggtttctgtgacaccacaaacaaaggactcttccaggtcgtgtcaggcgggatggtgttgcagcttcaacaaggcgatcaggtgtgggttgaaaaagacccctag

SEQ ID NO: 23631 - DNA, 1050 bp, synthetic construct
  misc_feature 1..1050: note = Description of Artificial Sequence: Synthetic coding sequence
  source 1..1050: mol_type = other DNA
atgaccgccgccagcatgggccccgtgcgggtggccttcgtggtgctactggccttgtgttcccgccccgcagtgggacaaaattgtagtggcccctgcagatgtccagatgaacccgcacctcgttgtcccgccggcgtctctctcgttctggacggctgcgggtgctgcagggtgtgtgccaaacagctgggagagctgtgcactgagcgggatccatgcgatccccacaaagggcttttttgccactttggcagccccgccaaccgtaagattggcgtctgcaccgccaaggacggggctccgtgcatcttcggaggaaccgtttaccgcagcggagaaagttttcagagcagctgcaagtatcaatgcacatgtctcgatggggcagtcggatgcatgcctctgtgttctatggacgtaaggcttccaagccctgactgcccatttcctaggagagtcaagttgcccgggaaatgctgcgaggagtgggtatgcgacgaaccaaaggatcaaactgtggtgggacccgctctcgccgcttaccgactcgaagacacctttgggcctgatcctactatgatccgcgcaaattgcttggttcagacgaccgagtggtccgcgtgctctaaaacttgtggcatgggaatttccacacgggtgactaacgacaatgcctcctgcagactggaaaagcagagcagactgtgtatggtgcgcccttgtgaagcggacctcgaagagaatatcaaaaaggggaaaaagtgtatccgaacacccaaaatcagcaagcccatcaagttcgagctcagcggatgcacaagcatgaaaacttatagggcgaaattctgtggggtgtgcaccgacggcagatgttgtactccccatcgcactaccactctcccagttgaatttaaatgcccagatggtgaggtgatgaaaaagaacatgatgtttataaagacttgcgcctgccactataactgtccaggggacaacgacatttttgaatccctgtattaccgcaagatgtatggcgatatggcatag

SEQ ID NO: 23632 - DNA, 2238 bp, synthetic construct
  misc_feature 1..2238: note = Description of Artificial Sequence: Synthetic coding sequence
  source 1..2238: mol_type = other DNA
atggagcggccccccggcctgcggcccggcgccggcggcccctgggaaatgcgcgagaggctgggcacaggaggcttcggcaatgtgtgcctgtatcaacatagggaactcgaccttaaaattgcaattaagtcatgcaggctcgagctgtcaaccaagaatcgggaacgttggtgccacgagatacaaatcatgaaaaagctgaatcacgccaatgtcgtaaaagcatgtgatgtccctgaagaactcaatattctcatccatgacgtacccctccttgccatggagtattgttctggcggagacctgcggaaactgctgaacaaacctgagaactgctgtgggctgaaggagtcacaaatcctgagcctgctaagcgacataggttcagggatccggtacctccatgaaaacaagatcatccacagagacttgaagcccgagaatattgtgctacaagatgtgggcgggaaaattatccacaagataatcgatctagggtacgctaaggacgtcgatcagggaagtctatgtacttcttttgtcggcacattgcagtatctggccccagaactatttgaaaacaaaccttacacggctactgttgactattggtcttttggcaccatggtatttgaatgcatagccggatacagaccatttctgcaccacctgcagccgtttacctggcatgagaagattaagaagaaggatccaaagtgtatttttgcatgcgaggagatgtccggagaggtccgattcagttcccacttaccacagcccaattctctttgctccctggtggtggagccgatggaaaattggctgcagctgatgctgaattgggatccgcagcagcgagggggccccgttgacctgaccttgaagcagccaaggtgtttcgttctgatggaccacattctgaaccttaagatcgtacacattctgaacatgacatcagcgaaaataatctccttcctgctgccgccggatgagagtttgcactctctccagtcaagaatcgaaagggaaaccggcattaatacagggtcacaggagttgctctctgagactggtatttcgctcgatccgcgcaaaccagcctctcagtgtgtactcgatggggtacgggggtgcgattcctatatggtgtacctgtttgacaaatctaagacagtttacgaggggccctttgccagccgctcgctctccgactgcgtgaattacattgttcaagactctaagatccagttgcccataatccaactgcgtaaggtgtgggcagaagcggtccattatgtgagtggattgaaagaggactactcgcgtctgttccagggacaacgggccgctatgttgagcctcctgcgttacaatgctaacctgaccaaaatgaagaacactctgatttctgctagccagcagctgaaggcaaagctcgagttctttcataaatcaattcagcttgacctggagaggtattcagaacaaatgacatatgggatcagctcggaaaaaatgctgaaagcgtggaaagagatggaggagaaagccatccactacgctgaagtaggggtgataggatatctggaggatcagatcatgtctctccatgccgagatcatggagcttcagaagtccccctatggtcgcaggcagggagacttgatggaatctctcgagcagcgcgctattgatctctacaagcagttaaaacaccggccgtctgaccattcctatagcgatagcacagagatggtcaaaattattgttcacactgtgcagtctcaagatcgagtgcttaaagaattatttggccatctgtctaagctgctgggctgtaagcaaaaaatcattgatctgcttcccaaggttgaagtggccctgagtaacatcaaagaagccgataataccgttatgtttatgcagggtaagcgacagaaggagatctggcacctgctgaagattgcctgtacccagtcttccgcaagatcactggtggggtctagcctggagggggcggtgacgccgcagacctccgcctggctgcctccaacctcagcagaacatgaccattctctctcatgtgtggtgactcctcaggacggtgaaacttctgcccaaatgatcgaagaaaacctcaactgcttgggtcatctgagcactattatacatgaggctaacgaggaacagggcaattctatgatgaacctcgactggtcatggctgacagaatag

SEQ ID NO: 23633 - DNA, 1653 bp, synthetic construct
  misc_feature 1..1653: note = Description of Artificial Sequence: Synthetic coding sequence
  source 1..1653: mol_type = other DNA
atgtggaaggccagcgccggccacgccgtgagcatcgcccaggacgacgcaggcgctgacgactgggagaccgaccccgatttcgtgaacgacgtatctgaaaaggaacaacgttggggtgccaagacggtgcagggatctggacatcaggaacacataaacattcataagttacgggagaacgtgtttcaagaacatcagaccctcaaagagaaggaactggagactggacctaaggctagtcatgggtatggagggaaattcggagtggaacaggacaggatggacaaatcagccgtgggccacgagtatcagtccaaactctccaaacattgttcacaggtggactctgtgcgaggctttggcggcaaatttggtgtccaaatggatagagttgaccagagcgctgtcgggttcgaatatcagggcaagaccgaaaagcatgcctcccagaaggactatagctctggctttggtgggaaatacggcgtgcaagctgatcgcgttgacaaatccgccgtgggatttgattaccagggaaaaacggaaaaacacgagtctcagcgagactatagtaaaggattcggagggaagtatggcatcgataaagacaaggtagataagtctgctgtggggtttgagtatcagggtaagacagagaagcatgaaagtcaaaaggattacgtaaaggggtttggtggaaagttcggcgtacaaaccgataggcaggacaagtgcgcacttggttgggatcaccaggagaaattacaactccatgagtctcaaaaagattacaagactggttttggcgggaaatttggagtgcagtccgaacgacaggatagcgcggcagtcgggttcgattataaggagaagttagcaaagcatgaaagtcagcaggactattcgaagggctttggaggtaaatacggagtccagaaggatcgcatggataaaaatgcttcaacctttgaggatgtgacccaggtctccagtgcttaccagaagactgtcccagtcgaggccgtcacatctaagacgtctaatattagagccaatttcgagaatcttgctaaagaaaaggaacaggaggacagacggaaagctgaggcggaacgagcacagcgtatggcaaaggagcggcaggaacaagaagaggcacgcaggaaactcgaagaacaggcccgtgccaagacccagacccccccagttagtcctgctccccagcctacggaagagagactaccctccagccccgtgtacgaagacgcggcttcgtttaaggcagaactgagctacaggggacccgtgtctggtactgagccggaacccgtctacagcatggaggcagcggactaccgggaggccagttcacaacaaggactggcatatgcaacagaagctgtctacgagtcggcagaagcgcccggacactatcctgctgaagactcaacttacgacgaatacgaaaatgacctggggattacagccgttgctctgtatgattaccaggccgccggagatgacgaaatctcatttgacccggatgatatcatcaccaacatcgaaatgatcgacgacgggtggtggcgcggggtgtgtaagggccgctatggtctcttcccagctaattacgttgaactgcgacaatag

SEQ ID NO: 23634 - DNA, 1542 bp, synthetic construct
  misc_feature 1..1542: note = Description of Artificial Sequence: Synthetic coding sequence
  source 1..1542: mol_type = other DNA
atgtggaaggccagcgccggccacgccgtgagcatcgcccaggacgacgctggggctgacgactgggagactgacccagattttgtgaacgacgtctccgagaaggagcagcgctggggggcaaaaacagtgcagggttcaggacaccaggagcacattaacattcataaattaagagagaacgtattccaggaacatcagactctcaaggaaaaagagctcgagactggtccaaaggcgagccacggatacgggggcaagttcggtgtggaacaggaccgcatggacaagtctgctgtcggacacgagtaccagagtaaactgtctaagcactgcagccaagtggactcggtcagagggtttggcggaaagttcggcgtccaaatggaccgtgtcgaccaaagtgctgtgggctttgagtatcagggaaagacggaaaagcacgcttcccagaaggactatagcagcggatttggaggcaaatacggagtgcaagccgaccgcgtggataagtctgctgtcgggtttgattatcaggggaaaaccgaaaagcacgaaagtcaacgagattacagcaaagggtttggcgggaagtatggcattgacaaagataaggtggacaaaagtgctgtggggttcgaataccaggggaagaccgagaagcatgagtcccagaaggactatgtgaagggcttcggcgggaaattcggggtgcaaacagacaggcaggataagtgcgccctgggatgggatcaccaggaaaaactccagctgcatgagtctcagaaggactattctaagggtttcgggggcaaatatggggtgcagaaagatcgaatggacaagaacgccagcactttcgaagacgtgacacaggtctcaagcgcttatcagaaaaccgtcccagtggaagcggtaacctctaaaacatcaaatatcagggcaaattttgagaatctggccaaagaaaaggagcaggaggatcggagaaaggccgaggcggagcgtgcccagaggatggccaaggaaagacaggaacaggaggaagctaggagaaaactcgaagaacaagcccgagccaagacccaaacgccacctgtaagccccgcgccacaacccactgaagagagactccctagtagccctgtctatgaagatgctgcctcctttaaggctgaactgtcttacagaggacctgtgtccggcacagagccggagcctgtgtactctatggaggcagccgattatcgagaggcatcttcccaacaggggcttgcatacgccaccgaggccgtttatgagagtgctgaagctccaggccactacccagccgaagatagcacctatgatgagtacgagaatgatctcgggatcaccgccgtggccctgtacgactatcaagcagcaggggacgacgagatctcattcgatccggacgatattatcaccaacatagaaatgattgacgacggctggtggcgaggagtatgcaagggccgttatggtctgtttcctgccaattatgtggagttgcgacaatag

SEQ ID NO: 23635 - DNA, 1905 bp, synthetic construct
  misc_feature 1..1905: note = Description of Artificial Sequence: Synthetic coding sequence
  source 1..1905: mol_type = other DNA
atgtggaaggccagcgccggccacgccgtgagcatcgcccaggacgatgcaggggccgacgattgggagacggatcccgattttgtgaatgacgtgagtgaaaaggagcagcggtggggcgcaaagacagtgcagggctccggccaccaggaacatatcaacatacataagcttagggagaacgtcttccaagagcatcagaccctcaaagaaaaagagcttgagaccggcccaaaggccagtcatggatacggtgggaaatttggagtggaacaggatcgcatggataaaagtgcagtggggcatgagtatcaatcaaagctaagcaaacactgttctcaagtcgatagcgttagggggtttggggggaagttcggggtacagatggatcgagtagaccagtccgctgttggctttgaatatcagggcaaaaccgagaaacatgcatctcagaaggattactcctctggctttggaggcaagtacggcgtgcaggctgatcgcgtggataaaagcgctgtcggctttgactaccaggggaagacagaaaaacacgaaagccagcgagattactcgaaagggttcggtggcaaatacggcatcgataaagataaagttgacaagtccgccgtgggatttgagtaccagggcaaaactgaaaagcatgagtcgcagaaagactacgttaagggctttggcggcaaatttggagtgcagacagatcgacaggacaagtgtgctcttgggtgggaccaccaggaaaagctgcagctgcacgagtctcaaaaggattattcaaagggctttggcggcaagtacggcgttcagaaggaccgaatggacaagaacgccagcaccttcgaagatgttacacaggtgtcttctgcataccagaagacggtccctgtggaggctgtgaccagcaagaccagtaatatcagagccaacttcgagaacctggcaaaagagaaagagcaggaggaccgacgaaaagccgaggccgaacgggcacaaaggatggcgaaagaacggcaagagcaggaggaggccagaaggaaattggaagagcaagcacgcgctaagacacagaccccacctgttagccccgccccacagccaacggaggagagactgcccagtagccccgtctacgaagacgccgccagcttcaaagccgaactgtcctacaggggtccagtcagcggcactgaaccagaacccgtatattctatggaagccgcggactaccgtgaggcttcctcgcagcagggcctggcctatgccactgaggccgtgtatgaaagcgccgaggcaccaggccactacccagccgaggactctacatatgacgagtatgaaaatgatctggggattactgcagtcgctctttacgactaccaggccgccggggacgatgagattagctttgatcccgatgacattatcacgaacattgagatgatcgatgatggctggtggaggggcgtgtgcaagggcagattccgtgagctcgccttctcatgcgtgagagttgctctggttcctattaaatgtagcagagatctgcctggccaggctcgcgggctgagaagcgcattgtggcgtgttgggcgcaaagactgtccgcggcgtggggcaagttcacgagtgtcactattgggtagaagggggttaggtctgatggaggtgaatcctgaactgtctcaccccgaacaccggagttgccacgttagatgggaaatctgcttgtgtcatacagttactgcgcgtcggatcagaaagctgatttccttcttgaggtctcgggaggcaggccctgttccaagctgttctcaggtcggcggagtaagctttcagaaggtcacctggaagtgcctcggcacttgggttccggagtgtccctag

SEQ ID NO: 23636 - DNA, 945 bp, synthetic construct
  misc_feature 1..945: note = Description of Artificial Sequence: Synthetic coding sequence
  source 1..945: mol_type = other DNA
atggacaagaacgccagcaccttcgaggacgtgacccaggtgagcagcgcatatcagaagaccgtccccgttgaggctgtcacctccaagaccagtaacatcagggcgaacttcgaaaacctggcaaaggagaaggaacaggaggaccgccgcaaggcggaggccgaaagggcccagaggatggccaaagaacgacaggagcaggaggaggcccgaagaaaactcgaagagcaggccagagccaaaacccagacacccccagtatcacccgcaccacaaccaacagaggagcggctgcctagctcccctgtgtacgaggacgcagcctcatttaaggcggagctcagctaccgggggcccgtgtcgggcaccgagcctgagccagtgtattccatggaggcagccgactatagagaggcttcgtcacagcaggggctggcatacgcaaccgaggcggtctacgagagcgcggaagccccggggcactaccccgctgaagattcaacctatgatgagtatgaaaatgatctcggaatcacagccgtagctttgtacgattaccaagctgccggtgacgacgaaatctcattcgatccagacgatattataacaaacattgaaatgattgatgacgggtggtggcggggagtctgtaaggggcgcttcagggaactcgcattcagctgcgtgagagtggccttagtccctatcaagtgcagcagagatttacccggacaggctcggggattgagaagcgcgttgtggagagtgggtcggaaggattgcccccgcagaggagcctcttcaagagtgtcgttactaggaaggaggggactcggattgatggaagtcaacccagagcttagccacccggagcatcgcagctgccatgtgcggtgggagatatgtctgtgtcacacggtgaccgctcgtcggattaggtag

SEQ ID NO: 23637 - DNA, 1761 bp, synthetic construct
  misc_feature 1..1761: note = Description of Artificial Sequence: Synthetic coding sequence
  source 1..1761: mol_type = other DNA
atgggcgtgaacgccgtgcactggttccggaagggcctgcggctgcatgacaaccccgcattgaaggaatgtatccagggcgcagacacaattcggtgcgtttatatcctggatccttggtttgccggaagttccaatgttggcataaaccggtggcggttcctgcttcagtgcttggaggacctggacgctaatttgaggaaattaaatagcagactgttcgtgatccggggtcagcctgccgacgtgtttccacgactttttaaggagtggaacattacgaagttgtccatcgagtacgactccgaacctttcggtaaagaacgagacgctgctatcaaaaagctggccactgaggctggcgtcgaagttattgtgcgcataagccatacactctatgatttggataagataatcgagcttaacgggggtcaaccaccccttacatataagaggtttcagaccctgatatcaaagatggagcccttggagatccccgtcgagacaatcacatcagaggtgatcgaaaagtgtacaacacccctgtccgacgatcatgacgagaagtatggagttccatctctggaagagctcggctttgacaccgacgggttatcctctgctgtctggcccggcggtgagacggaagctttgacgagactcgagcgacacctcgaacgaaaagcctgggttgcaaatttcgagcggccccgcatgaatgcaaactcgctgcttgcatctcctacaggcctgtccccgtacttgagattcgggtgtctgtcatgtagactcttctacttcaaacttaccgacctgtacaaaaaggtcaaaaaaaacagttccccccctctatcactatacggacagctattgtggcgcgagttcttctatacggccgccaccaacaacccaaggttcgacaagatggagggtaaccccatttgcgtccagatcccatgggacaaaaaccctgaggccctcgctaagtgggctgaaggtcggaccggtttcccctggattgatgccatcatgacacagctgcgacaggaaggttggattcaccaccttgcacggcatgccgtggcctgttttctcacacggggtgatctgtggatttcctgggaagaggggatgaaggtgttcgaagaacttctgctggacgctgactggagcattaacgctggttcctggatgtggctcagctgtagttctttcttccagcaattctttcattgctactgtcctgtcggctttggccggcgcactgaccccaacggggattacatccggcggtatctccctgtgctgaggggctttccagccaagtatatctacgacccttggaacgccccagaaggcattcagaaggttgctaaatgtttgatcggcgtgaactatccaaagcccatggtgaatcacgccgaagctagcaggctgaacatcgagcggatgaagcaaatttatcagcagctctcccgctatcgcggattgggcttgcttgccagcgtccctagcaatcccaatggtaacggtggctttatgggttattctgctgagaacatcccaggttgctcatcatccggatcctgtagtcagggctcggggattctccactatgctcacggcgacagccagcagactcacttactgaagcaaggaaggtcaagcatgggcacaggtttatcaggcggaaagcgcccctcacaggaagaagacactcagagcattggccccaaggtgcagaggcaatccactaattag

SEQ ID NO: 23638 - DNA, 582 bp, synthetic construct
  misc_feature 1..582: note = Description of Artificial Sequence: Synthetic coding sequence
  source 1..582: mol_type = other DNA
atgctggaggtgggctgcggctgcctggtggtgcccttcttcaactttttccattgctattgtcccgtgggcttcggtaggagaaccgatcctaatggcgattacatccgccggtatctaccggtgctgagggggttcccggccaagtacatttacgacccctggaatgcccccgagggaatacagaaagtcgcaaaatgtctcatcggcgtgaactaccccaagcctatggtcaaccacgctgaggccagccggctgaacatcgagcgcatgaaacagatttaccagcagctgtccagatatagggggctgggtctgctggccagcgtcccctcaaatcccaacgggaacggaggtttcatgggatactcagcagagaacattccagggtgcagctccagtgggagttgcagccagggatccgggatcctgcattacgctcacggggattcacagcagacgcatttactgaagcagggtagatcgagcatgggtacaggcctgagtggcggcaaacggccatcacaggaggaggacacacagtccatcggccctaaggttcagagacagtccacgaattag

SEQ ID NO: 23639 - DNA, 1323 bp, synthetic construct
  misc_feature 1..1323: note = Description of Artificial Sequence: Synthetic coding sequence
  source 1..1323: mol_type = other DNA
atgggcagcagccacctgctgaacaagggcctgcccctgggcgtgcggcccccgattatgaacggccccctccatcccagacctctggtggccctcttagatggcagagattgcaccgtagaaatgccgatattgaaggacgtggcaactgtggccttctgcgacgcccaaagtacccaggagatccacgaaaaagtgctcaacgaggccgttggtgccctaatgtaccacaccatcactctcacacgggaggatctggaaaaattcaaggctctccgcatcatagtccgtattgggtccgggtttgataatatcgatataaaaagtgcgggagacctggggatcgccgtgtgcaacgttcccgcagctagtgtagaagaaaccgcagatagcacgctttgccatatccttaatctctacagacgagccacctggctgcaccaggctctcagagaggggactcgagtgcaatctgttgagcagatcagggaggtggcctcaggcgcagcccgtatcaggggcgaaacactgggtattatcgggttgggtagagttggccaggcagtggcgttacgcgccaaggcctttgggttcaacgttttgttttacgacccatacctttccgacggggtcgagagagcactgggcctacagagagtctcaacactccaagacctcctctttcatagtgattgtgtgacactgcactgtggactcaatgaacacaatcaccatctaatcaacgacttcacagtgaagcagatgcgacaaggagcatttctcgtcaatacagctagaggcggcctcgttgacgagaaagcgctagcccaggccctgaaggaggggcgtatacggggagctgcactcgatgtgcatgagtcagagcctttcagctttagccagggaccgttgaaagacgctcctaatctcatctgtacaccccatgcagcatggtattccgagcaagcctccatcgagatgagggaagaagccgctcgggagattagaagggccatcaccgggaggatcccggactctctgaaaaactgcgtcaacaaagaccaccttactgccgccacccattgggcatcaatggatcctgctgtggtgcacccagaactcaacggcgctgcgtacagatatccccccggagttgtcggtgttgcgcccacgggcattcctgccgccgtcgagggcatagtgccttcagccatgtccctgtcacacggcctccccccggtggctcaccctcctcacgcaccaagtcccggccagaccgttaagcccgaggccgaccgcgaccatgccagtgatcaattgtag

SEQ ID NO: 23640 - DNA, 1290 bp, synthetic construct
  misc_feature 1..1290: note = Description of Artificial Sequence: Synthetic coding sequence
  source 1..1290: mol_type = other DNA
atgagcggcgtgcggccccccatcatgaacggccccctgcacccccgacctctggtggccctgctagacgggagggattgcactgttgagatgccaattctcaaggacgtggccacagtcgctttttgtgacgcacagagcactcaggagatccacgagaaagttcttaacgaggctgtaggggctttaatgtatcacactattacactgacacgcgaagatctcgaaaaattcaaagccctcaggattattgtgcgtatcggcagcggctttgacaacattgatatcaagtcagccggggacctggggattgcagtctgtaacgtgcctgccgcttccgtggaggagaccgcagattcgaccctctgtcatatcttaaacctctaccggagggccacatggctccaccaggctctgcgggagggaaccagggtccagtccgtagagcagatccgagaggtggcctcaggagccgccagaattcggggggaaactctagggatcatcgggctgggccgggtgggacaggctgtagccctgagggctaaggcctttggttttaatgtgctattctatgatccctacctgtcagatggcgttgagagggctctgggcttgcaacgcgtgtctaccctccaggacttactattccattctgactgcgtgactctccactgtggccttaacgagcacaatcatcacttgataaacgacttcacagtgaagcagatgcgacagggagccttcctggtgaacactgcccgcggaggcctggtggatgaaaaggcccttgctcaagccctgaaggagggcagaattcgaggagccgcacttgatgtgcatgagagcgagcctttcagcttctcccagggcccgctgaaggatgcccctaatttgatctgtactccccacgcagcgtggtatagcgagcaggcctccatcgagatgagggaggaggccgcaagggaaatacgaagggctatcactggccggatcccagattccttgaagaattgtgtaaataaggatcatctgaccgctgctacccattgggcgagtatggaccctgcagttgttcaccctgagcttaatggtgcagcatatcggtaccctcccggcgtcgtgggtgtcgcaccaaccggtatccccgccgctgtggagggtatcgtccctagcgccatgtctctgagccacgggctgcctccagttgcacacccgccgcatgctccatctccaggccaaaccgttaaacccgaggcagatagagatcacgcgtctgaccaattgtag

SEQ ID NO: 23641 - DNA, 438 bp, synthetic construct
  misc_feature 1..438: note = Description of Artificial Sequence: Synthetic coding sequence
  source 1..438: mol_type = other DNA
atgagcggcgtgcggccccccatcatgaacggccccctgcacccccgcccattggtcgcgctcctagatggacgagattgcaccgttgagatgcccatcctaaaggatgtagccaccgtggccttctgcgacgcacaaagcactcaggagatccatgaaaaggtcttgaacgaagcagtgggcgcgttgatgtatcacaccatcaccctgacccgagaggacttggagaagttcaaagcattacgcattatcgtcaggatcggctctggatttgataatatagacattaaaagcgctggcgaccttggcattgcagtgtgcaatgtgccagcagcctcagtcgaggagacagcagactctacactatgtcacatccttaacttatacagaagggctacctggctgcaccaagctctgagggagggaactagagtttag

SEQ ID NO: 23642 - DNA, 516 bp, synthetic construct
  misc_feature 1..516: note = Description of Artificial Sequence: Synthetic coding sequence
  source 1..516: mol_type = other DNA
atgagcggcgtgcggccccccatcatgaacggccccctgcaccccagacccctggtagcactgctggatggacgtgattgcacagtggagatgcccatcttgaaggatgtggctaccgtcgctttttgcgacgcacagtctacacaggagattcacgagaaggttcttaacgaagctgtgggagccttgatgtatcatactatcaccctgacccgcgaggacttagagaagttcaaggcccttaggataatagtaaggattggatctggctttgataacattgatattaaatccgccggcgatctgggtatcgcagtctgtaacgtccccgccgcttcggtggaagagacggctgattccaccctgtgtcacatccttaatctttacaggagagccacttggttacaccaggctctccgcgaaggcacaagagtgcagagcgtggaacaaattcgtgaggttgccagcggggcggccaggattcgtggagagacactcggtatcatagggctctag

SEQ ID NO: 23643 - DNA, 2958 bp, synthetic construct
  misc_feature 1..2958: note = Description of Artificial Sequence: Synthetic coding sequence
  source 1..2958: mol_type = other DNA
atgcccgtgcccagccggcacatcaacatcggccggagccagagctgggacgctgctggttggtatgaggggccttgggaaaacgccgaatctcttaggcccctgggcaggaggagctcgctgacatacggtacagcagaaggaacctggtttgaaccaaaccataggccacaggacgccgcattacccgtcgctgccgagccgtacttgtacagagaggctgtgtataacagcgtggcggcccgcaaaggatctacccctgattttaccttctacgacagtaggcaggcagtcatgtccgggcgctctcccctgctgccccgagagtactactccgaccctagtggcgctgcccgcgtgccaaaggaacccccactttatagggacccaggggtgtctcgccctgtcccttcttacggtgtactgggatcccgcaccagctgggatcctatgcagggacggtcccctgccctccaagacgctggacatttgtacagagacccaggaggcaaaatgatacctcagggtcgtcagacccagtccagggccgcctctccaggcagatacggccgcgagcagccagacacaaggtacggggcagaggtccctgcctaccctctctcacaggtgttttctgatatcagcgagagacccattgacccagcccccgcccggcaggtcgctcccacgtgtttagtcgtggacccttcttcggccgccgctcccgagggctcaacaggggtcgcacctggcgccctcaacaggggctatggccctgcgagagagtccatcccttcgaagatggcctacgagacatatgaagcggacttgagtacattccaaggcccagggggaaagagaactgtgcttcccgaatttctggcgttcttgagagctgaaggcctggcagaggccactctaggagcgctgctccaacagggctttgattctcctgcagtgttggccacgcttgaagacgcggacatcaagtctgttgccccaaacctggggcaggcacgcgttctgagcagactcgccaattcttgtcggaccgagatgcagttgagacgccaggatcgcggtggaccactcccaagggcccgatcatcgagtttctcacataggtccgaactgctacacggggatctagcaagtctgggcgctgccgccccacttcagacagcttccccacgggccggagaccccgcccgaaggccaagctcagctccctctcagcacctcttagagactgccgctacatactctgcacccggtgtaggcacccacgcgccgcatttccccagcaacagcgggtactcgtctcctaccccctgtgccctcactgcccgcttgtccccaacttatcccctgcaggctggcgtggctctcacaaacccgggacctagcaaccccctgcaccccggtccccggaccgcctatagcaccgcttacacggtgccaatggaattgctcaaaagggagcgaaacgtggccgcctctcccctcccatcgccccatggatcccctcaggtccttcgcaaaccaggcgctcctctgggtccctcgaccctgccacccgcttctcaaagcctacacacgcctcactctccttaccagaaggtcgcccgaaggactggagctccaatcatcgtctcaacaatgctagcgcccgagccatcaatccggcctcaaattatgaatggtcccctgcacccacggcccttggtagccctgctcgacggtcgcgattgcaccgtggaaatgcctatcctaaaggatttagcgacggtcgctttctgcgatgctcagagcacgcaggagatccatgaaaaggtgcttaatgaagccgtgggtgctatgatgtatcataccatcaccctcacacgggaggacctggagaagtttaaggcacttagggtgatcgtgcgaatagggagcggatatgataatgtcgacattaaggctgcaggtgagttggggatcgctgtgtgcaatatcccatccgctgcagtagaggagacggcggattcgaccatttgtcatattctgaatctctatcgcaggaatacctggctctaccaggctcttcgcgagggcactcgagttcagagtgtggaacagatccgcgaggtagcttcgggcgccgccagaattagaggagagaccctgggtttgataggtttcggtcgaacaggacaggctgtcgccgtgagggccaaagccttcggttttagtgtgattttctacgatccatatctgcaggacggaatagaaagatccctcggggttcagcgggtttatactttgcaggacttgctctaccagtctgactgtgttagcctgcactgtaacttgaacgaacacaaccaccacttgattaacgattttaccattaaacagatgcggcaaggggcctttctggtgaatgcagcacggggcgggcttgttgatgagaaagccctcgctcaggcccttaaagaaggccgaatcaggggcgcggccctggacgtgcacgagagtgagcccttctccttcgctcagggacccctcaaggacgcacctaacctgatttgcacgccacacactgcttggtactcagagcaagcctcactggaaatgagggaagctgctgcaacagaaatccgtagagccatcaccggtcgtatccccgagtctcttagaaattgtgtcaacaaggagttctttgtgacttccgcaccttggtcagtcattgaccagcaagccatacatcctgagctgaacggagcaacatatagatacccccccggcattgtgggcgtggcccccggtggtctgcctgccgcaatggagggcatcatcccaggcggaatccctgtcacacacaacttacctacagtggcccatccctcccaggccccttcccctaaccaaccaaccaaacacggggataaccgagagcaccctaatgagcagtag

SEQ ID NO: 23644 - DNA, 1338 bp, synthetic construct
  misc_feature 1..1338: note = Description of Artificial Sequence: Synthetic coding sequence
  source 1..1338: mol_type = other DNA
atggccctggtggacaagcacaaggtgaagcggcagcggctggaccgcatttgcgaagggattcgcccacagattatgaatggccctctccaccctaggcctctggtggctctactggacgggcgcgactgtactgtagaaatgcctatcttgaaagacctggccaccgttgcattctgcgacgcccagtcgactcaggagattcacgaaaaggtgcttaatgaggccgtgggcgcaatgatgtaccacactattaccctgacaagggaagacctggagaaattcaaagcacttcgggtgatagttcgtatcgggagcggctacgataatgtggatataaaagccgcaggcgaactgggcatcgccgtatgcaacattccaagcgcagccgtggaggaaactgctgactccacaatctgtcacattctaaacctgtaccgccgaaatacctggctgtaccaggcactccgggagggcacacgcgtccaaagcgtcgaacagatacgagaagtggcatccggcgccgcccggattagaggtgaaacgctagggttaataggattcggaaggaccggacaagccgtggcagttcgagcaaaagcgtttggcttcagtgtgattttctacgacccgtacctgcaggatggaatcgaaaggagcctgggcgtccagcgcgtgtacacactgcaggacctgctctatcagtctgactgtgtgtccctacattgcaacctcaatgaacacaatcatcatttaattaatgatttcaccatcaagcaaatgaggcaaggggcctttctggtgaatgccgcccgcggtggcttggtcgatgaaaaggccctcgcccaggccctgaaagaggggcggataagaggcgcagcgcttgatgtccatgagtccgaacccttctcatttgcccaggggcctctgaaggatgctcctaacttgatctgtactccccacaccgcttggtactctgagcaagcgagcctggagatgcgggaggccgccgcaacagagatacgcagggcgattactgggagaatccctgagtcattgcgtaattgcgtgaacaaggaattctttgttacttccgcaccatggagcgtcatcgatcagcaggccatacatcccgagttgaacggggcaacatataggtatcccccagggatcgtgggagtcgcgcctggcgggctcccagccgcgatggagggtataatccctggtgggatacctgtaacccataatcttcccactgtggcccatcctagtcaagcaccttccccgaatcagccaaccaaacacggtgacaaccgagagcatccaaacgaacagtag

SEQ ID NO: 23645 - DNA, 1338 bp, synthetic construct
  misc_feature 1..1338: note = Description of Artificial Sequence: Synthetic coding sequence
  source 1..1338: mol_type = other DNA
atggccctggtggacaagcacaaggtgaagcggcagcggctggaccgcatctgcgagggcattcgcccccagatcatgaacggtccgttacaccctcggcccctggttgccctgctggacggccgggactgcacagttgagatgcctatactgaaagatctggcaaccgtcgccttctgcgacgcgcagagcacgcaagaaatccatgaaaaagttctgaacgaagcagtcggcgcaatgatgtaccacactataacactgaccagggaagacttagaaaagtttaaggccctccgcgtcatcgtgcggattggaagtgggtacgataatgtggacatcaaagctgctggcgagctgggtatcgcagtctgcaatattccgtccgccgccgtggaggaaacggcagattcaaccatctgccacatcttgaatctttatagacgcaatacatggttgtatcaggccctccgcgagggcaccagggtgcaaagtgtcgaacagatacgcgaggtggcttcaggcgccgcgcggattagaggtgaaacattgggtttaattggattcgggcgcactgggcaggccgtggcggttagagccaaggctttcggcttctccgttatcttctatgatccttacttgcaggacggaattgaacgctccctcggggtgcaacgcgtgtacacccttcaggacctgttataccaatcggattgcgtgagtctccactgcaatctcaacgagcataaccaccatctgatcaatgacttcaccatcaagcaaatgcgacagggggcattcctggtgaatgccgctcggggcggccttgtggacgagaaggctctcgcccaagctctgaaggagggcaggattagaggagcagccttggacgtgcatgagtctgagcccttttccttcgctcagggtcctttaaaagatgctcccaacctgatctgtaccccccacacagcttggtattcagagcaggcgtccctggagatgagggaagccgctgctaccgagataaggcgagctattaccggccggattccagaaagcctgcgtaattgcgtgaataaggagttctttgtgacaagcgcaccttggtctgtgatagatcagcaggcaatacatcctgaacttaacggtgcgacctatcgctatccccctggcatcgtaggagtggcgcccggggggctccctgccgcaatggaaggaattatccccgggggtatccctgtgacacataatcttccaactgtggctcatccaagtcaagccccgtctcccaaccagcccaccaaacacggggataacagagaacaccctaacgaacagtag

SEQ ID NO: 23646 - DNA, 1338 bp, synthetic construct
  misc_feature 1..1338: note = Description of Artificial Sequence: Synthetic coding sequence
  source 1..1338: mol_type = other DNA
atggccctggtggacaagcacaaggtgaagcggcagcggctggaccgcatctgcgagggaattaggccccaaatcatgaacggcccgctccaccccaggccactcgttgctctcctcgacggacgcgactgcacggttgagatgcccattcttaaggaccttgccaccgtggccttttgcgatgcacagtcaacccaggaaatccacgaaaaagtgctaaatgaggccgtcggcgcaatgatgtaccacaccataacactcacaagagaagaccttgagaagttcaaagccttgagggtgatcgtgcgaattggttccgggtatgacaacgtcgacatcaaagcagctggagaactggggatcgcggtatgtaacatacctagtgcggcagtggaggagacagccgacagcactatttgtcacatcttaaacctctacaggcgcaacacctggctctatcaggctcttagagaggggacacgcgtgcaatctgtcgaacagatcagagaagtggctagtggggcagccaggattcgcggcgagacattgggtcttattggcttcggacgcactggacaggctgttgccgttcgggcaaaagcttttgggtttagcgtgatcttttacgacccatatctgcaggacggcattgaaagatctctcggagttcagagggtgtacacactgcaagaccttttgtatcagtccgattgtgtgtctctgcattgcaatctaaatgagcacaaccaccacttaataaatgattttaccatcaaacagatgcgacaaggggcctttctcgtgaatgcggccaggggtggactcgtggatgagaaagccctggctcaagctttaaaagaaggccggattaggggcgcagctctcgatgttcacgagtctgaacctttctcattcgcgcaaggtcccctgaaagacgcgcccaatcttatctgtacccctcataccgcgtggtattctgagcaagcaagtctggaaatgagggaagccgccgcgaccgagattcgccgtgctatcactggcagaatcccggaatccctcagaaattgcgtgaacaaggagttctttgttacctcagctccttggtccgtgattgaccagcaggcaatacatcctgagctcaatggtgctacatatcgctacccccctggtatcgtgggcgtagcccctggaggtctgccagcagcaatggaaggtattatacctggcggaataccagtgacccacaatctgccaactgtggcccatccatcgcaggctccaagccccaaccagcctaccaagcatggagataatagggagcatcccaacgagcagtag

SEQ ID NO: 23647 - DNA, 12 bp, synthetic construct
  misc_feature 1..12: note = Description of Artificial Sequence: Synthetic coding sequence
  source 1..12: mol_type = other DNA
atggccctgtag

SEQ ID NO: 23648 - DNA, 1338 bp, synthetic construct
  misc_feature 1..1338: note = Description of Artificial Sequence: Synthetic coding sequence
  source 1..1338: mol_type = other DNA
atggccctggtggacaagcacaaggtgaagcggcagcggctggaccgcatctgcgagggcataagaccccagatcatgaatgggcccctgcatcctaggccactcgtggcattgttggatggtagggactgcacggtggaaatgcccatattgaaagatctcgccaccgtggctttttgtgatgcccagtccacccaggaaatccatgagaaggtgctgaacgaggctgtgggggctatgatgtatcacacaatcaccttgaccagggaggacttggagaagtttaaagctctgagagtgatcgtgagaataggctccggctacgacaatgtcgatataaaggctgccggcgaactcggaattgcagtgtgtaacattcccagtgcagcagtggaggagaccgctgactctacaatctgccacattctcaacctgtatagacgaaacacctggctttaccaagcactgagagaaggaaccagagtacaaagcgtggaacaaatccgtgaggttgccagtggcgcagcaaggatccggggggagaccctaggcctaatcgggtttggaagaactggccaagccgtggccgtacgggccaaagcgttcggcttctcagttattttctatgacccttatctgcaagacgggatcgaaaggagcctcggggtacagagagtgtatacactccaagacctgctgtatcagagtgactgcgtcagtctgcactgcaacttgaatgagcataatcatcatctgattaacgatttcacaataaagcagatgaggcagggcgcattcctagtgaatgccgccaggggcggcttggtcgatgaaaaggctcttgcccaggctctcaaagaggggaggataagaggcgccgcattagatgtgcacgaatctgagccattttcgtttgcacaggggcccctgaaggatgcacccaatctgatctgcaccccgcacacagcctggtactccgagcaagcatccctagagatgagagaagccgcagctaccgaaattcggagggccattacaggacggatccctgagtcactgcgcaactgcgttaacaaagagtttttcgtcacatccgccccctggagcgtaatcgatcaacaggccattcatcccgagttgaacggcgccacctacaggtacccgcccggtattgtgggtgtggccccaggaggcctgccagctgctatggaaggcattatcccagggggtatacctgtgactcataacctaccgaccgtagcccatcctagtcaggccccatcccccaatcagccgacaaagcacggagacaatagagaacatccgaatgagcaatag

SEQ ID NO: 23649 - DNA, 2331 bp, synthetic construct
  misc_feature 1..2331: note = Description of Artificial Sequence: Synthetic coding sequence
  source 1..2331: mol_type = other DNA
atgagcagcacccggagccagaacccccacggcctgaagcagatcggcctggatcagatttgggacgacctccgagcgggaatccagcaggtgtatacaagacagtctatggccaagagtagatacatggagctttacacccacgtatataattactgcaccagtgtgcaccagtctaaccaagctcgtggagctggagtgcctccaagcaaatccaagaaggggcaaactccggggggtgcccaatttgtgggcttggagctttacaaaaggctgaaagagttcctgaagaattacctgaccaatttgttgaaggacggggaggatctaatggacgagtctgtgttaaagttctacacacaacagtgggaggactataggttttctagcaaggtactgaacggaatctgtgcgtatctaaatcgtcactgggtgaggcgcgaatgtgacgagggtcggaagggcatatacgagatttattctctggccctcgtgacatggcgagactgtctgttccgaccactgaacaagcaggttaccaacgcggtgttgaagcttatcgagaaggaaagaaacggcgagaccattaacaccagactgatatctggcgtggtgcaatcttacgtagagctcggcctgaatgaggacgatgcattcgccaaagggccaacactgaccgtctacaaagagtccttcgaaagtcaattcctcgccgacacagaacgtttttatacgagggaatccaccgagttcctccagcaaaaccccgtcacagaatacatgaagaaggcggaagccaggctgcttgaagagcagagaagggtgcaggtctaccttcatgaatcgacccaggacgagctcgctcggaagtgtgagcaggttttgattgaaaaacacctggagatcttccacacagagtttcagaacttacttgacgctgacaaaaatgaggatctcggtaggatgtacaatctggtgagtcgcattcaagacggactgggcgagctgaaaaagctcctggagacacacatccacaaccagggccttgcagcgatagaaaaatgcggggaggccgcactgaatgacccaaaaatgtatgtgcagacggtgctggatgtccataagaagtacaatgcccttgtcatgtcagccttcaacaacgatgccggcttcgtagcagcactagataaggcctgcggccgcttcataaataacaacgccgtgacgaagatggctcagagttccagcaagtctcctgagttactggcacgatattgcgactccctgctcaagaagagtagcaagaatccggaagaggcagaactggaagacaccctgaatcaggtgatggtcgtgtttaagtatatagaggacaaagacgtgttccagaaattctacgctaaaatgctggcaaagcgattagttcaccagaacagtgcgagtgatgacgccgaagcttcgatgatttccaagctgaagcaggcttgcggctttgagtatacaagcaagctgcagagaatgttccaggacattggtgtgtctaaagacctcaatgagcaatttaaaaaacacttaaccaactctgaacccctggatttagacttctcgatccaggtactgagctccgggtcctggccattccagcaaagttgcacattcgctctgccatcagagctggaaagaagttaccagcggtttacggccttctacgcgtccagacacagtggaaggaaacttacttggctctaccagctgagcaaaggggagctggtgacaaattgctttaaaaatcgctataccctgcaagcaagtactttccagatggccattttactgcagtacaatacagaggatgcttataccgtgcagcagctcacagatagcacccagattaagatggacatactcgcccaggtgctgcagattcttcttaagtccaaactgctggttctagaggacgagaatgccaacgtcgatgaagtcgaattgaagcctgataccctgattaaactttatctgggatacaaaaataagaagctgcgagttaacattaatgtccctatgaaaacggagcagaagcaagaacaggaaacaactcacaagaatatcgaggaagatcggaagctgctgattcaggcagctattgtgaggatcatgaagatgaggaaagtgctgaagcaccagcagctgctgggggaggtactgacacagctgagttctaggtttaagccccgggttccagtcatcaaaaaatgcatagacattctgatagagaaggagtacctggagcgggtggacggggagaaggacacatactcataccttgcgtag

SEQ ID NO: 23650 - DNA, 2331 bp, synthetic construct
  misc_feature 1..2331: note = Description of Artificial Sequence: Synthetic coding sequence
  source 1..2331: mol_type = other DNA
atgagcagcacccggagccagaacccccacggcctgaagcagatcggcctggaccagatttgggacgatctgagagccggcattcagcaggtgtatactcgccagtctatggccaagtccagatacatggaactgtacactcacgtgtataactactgtacctccgtgcaccaaagtaatcaagctaggggggcgggagtccccccgtcaaagagcaagaaagggcaaacacccgggggagcacagttcgtcggcctagaactgtacaagagactgaaggaattcctgaagaattacctgaccaatttactaaaggacggggaggacctaatggatgagtccgtcctgaagttttacacacaacaatgggaagattaccggtttagctcaaaggtcctcaacggtatctgtgcatacctgaaccgccattgggtaagaagggaatgcgacgaaggcagaaagggcatctacgaaatctacagcctggcactggtgacctggagagactgtctcttcagaccactcaataaacaggtcacaaacgccgtcttaaaactgatagaaaaagagcgtaacggcgaaactataaacactcgtctcatatctggggttgttcagtcctatgtggagctcgggctgaacgaagacgacgcgtttgcgaaagggcccactctcactgtatataaagagtcatttgaatcacagtttctcgctgacaccgagcgcttttacaccagggaaagcacagaatttcttcaacagaaccccgtgactgagtacatgaagaaggcggaagcacggctcttggaggaacaaaggcgagtgcaggtatacctccacgagtctacccaagacgaattggctcgaaaatgcgagcaggtactgatagagaaacatcttgagatatttcacacagaatttcaaaacctgttagacgcagataagaatgaagatctcggacggatgtacaacctcgtcagtagaatccaagatggcttgggcgagctgaagaaactgctggaaacacatattcataatcagggactcgcagctatcgagaagtgcggagaagctgcgctcaacgatccaaagatgtacgtgcagaccgtgctagacgttcacaagaagtataatgccctagtgatgtcagcatttaataacgacgccggcttcgttgccgctctggacaaggcgtgcggccgtttcatcaacaacaatgcagtaaccaagatggcacagtccagttcaaagtctcctgaactgcttgccagatactgtgattcactcctcaagaagagctccaaaaatccggaggaagctgagctggaggacacactgaatcaagtaatggtggtcttcaagtatatcgaggacaaagatgtttttcagaaattttatgccaaaatgctggctaagaggctcgtgcaccaaaattctgcatcagacgacgccgaggcatcaatgattagtaaactgaaacaggcctgcggatttgaatatacaagtaagctacagaggatgttccaggacatcggggtgtctaaggacttgaacgagcagttcaagaagcacctgaccaattccgagcctttggatctggatttcagcattcaggtgctttcgtctggatcgtggccctttcagcagtcctgcaccttcgccctccctagtgagttggaaaggtcgtatcagcgctttacagctttttatgcttcccgccactctgggagaaagcttacctggctataccagcttagcaagggagagctggtaaccaactgctttaagaatagatataccttgcaggccagtaccttccagatggccatcctgctgcagtataacaccgaagacgcttacacagtacagcagttgaccgactcaacacagattaagatggacatcttggctcaggtgctgcagatcctattgaaatccaagctcttggtcctggaggacgagaacgccaacgtcgacgaggtggagttaaaaccagataccctaatcaagctgtacctagggtacaaaaataaaaagctacgggtgaatatcaatgtacccatgaagaccgaacagaaacaggagcaggagaccactcataaaaacatcgaggaagaccgcaagcttctcatacaggccgctatcgtcaggattatgaaaatgagaaaggtgttaaaacaccagcagctccttggagaagttcttacacagctctcctcacgttttaagccaagagttcctgtcattaagaagtgcatcgacatactcatcgagaaggagtatctggagcgcgtcgacggggaaaaagatacctatagttatctggcgtag

SEQ ID NO: 23651 - DNA, 2112 bp, synthetic construct
  misc_feature 1..2112: note = Description of Artificial Sequence: Synthetic coding sequence
  source 1..2112: mol_type = other DNA
atgagcagcacccggagccagaacccccacggcctgaagcagatcggtctggatcagatttgggacgatctgcgggctggcattcagcaagtgtacacccgtcagagtatggccaaatcgcgctacatggagttgtacactcaacagtgggaggactaccgtttttcctcaaaggttctaaatggcatctgtgcatacttgaatcgccactgggtccgccgagaatgcgacgaaggcaggaaaggaatctatgagatctattctcttgctttggttacttggcgtgattgtctgtttaggcctcttaataagcaggtaacaaacgccgtgctgaaacttatagaaaaggagcggaatggcgagactatcaacaccaggttgatctcaggagtggtccagtcatacgtcgaattaggtctgaacgaggacgatgcgtttgcgaagggcccgacccttaccgtctataaggaatcttttgaaagtcaatttttggcagatacagaaagattttacactagggaaagtaccgaattcttgcagcagaacccagttacagagtatatgaagaaagctgaggccaggctgcttgaggaacaaagaagggtccaagtgtatctgcatgaaagtacgcaggacgagcttgcccgaaaatgtgaacaggtgctcattgagaagcacctggaaatcttccacactgaattccagaacctgctggacgccgataagaatgaggatttaggccggatgtacaatttggtgtcccgcatccaagacgggcttggagagcttaagaagttgttagaaacccacatacacaaccagggacttgcggcgatagagaaatgcggggaggcggccctgaacgatcccaagatgtacgtgcagaccgtcctagacgttcacaaaaaatataacgccttagttatgagtgcctttaacaatgacgccggatttgtggccgctttagataaggcctgcgggcggtttattaataacaatgctgtcaccaagatggcacagtccagcagcaagtcccccgagctcttggcgcgctactgcgatagcctgctgaagaaatccagtaaaaatcccgaggaagctgagttggaggataccctaaatcaagttatggttgtcttcaagtatatcgaagacaaggatgtctttcagaagttctatgctaaaatgctggcaaagcgcttagtccatcaaaacagtgcgtctgatgacgccgaagccagtatgatatcaaaactaaagcaggcctgcggattcgagtacactagcaaactgcagcgtatgttccaggacataggagtgtctaaggatctcaatgaacagttcaagaagcacctcaccaatagcgagccactggatttggacttttccatccaagtgctgagctccggcagctggccatttcaacagtcctgcactttcgctctgccttccgagctagagcggagctatcagaggttcactgctttttacgctagccggcattccgggcgcaagctgacatggctctatcagctcagtaagggtgaattggtgactaattgtttcaaaaacagatacactctgcaggcgtcaacctttcagatggcgatactgctccagtataatacagaagacgcatatacggtccagcaactgactgattccacgcagataaagatggatatcctagctcaggtgctgcaaatactgctgaaaagcaagctgctggtgctggaggacgagaacgcaaacgtcgatgaggtagagttgaagcctgataccctcattaagttatacctgggttacaaaaacaagaagctgcgagtgaacattaacgtgcccatgaagaccgagcaaaaacaggagcaggagactactcataagaacatagaggaggaccgcaagctgctcatccaagccgcaatcgtacggattatgaaaatgcggaaagtgctgaagcatcagcaattgctgggagaagtgttgacccagctttcatccaggtttaagcctagagttcctgttattaagaagtgcattgacatcttaatcgagaaggagtatctggaacgagttgacggggaaaaagacacctactcctacctggcatag

SEQ ID NO: 23652 - DNA, 1824 bp, synthetic construct
  misc_feature 1..1824: note = Description of Artificial Sequence: Synthetic coding sequence
  source 1..1824: mol_type = other DNA
atggagctgtacacccacgtgtacaactactgcaccagcgtgcaccaaagcaaccaagcccggggtgctggcgtacctccgtcgaaaagcaagaaaggccagactcccgggggagcccagtttgtaggactggagctgtacaagcgcctgaaggagttccttaaaaattatctcaccaacttgctgaaggacggggaagacctgatggatgaaagtgttcttaaattctatacccagcagtgggaggattatcgcttctcgagcaaagtacttaatggcatttgtgcttacctcaatagacactgggtgcgccgggaatgtgacgaggggcgcaagggaatttatgagatctacagtttagctctcgtgacttggcgcgactgcctgtttagacctttgaataagcaagtgaccaatgctgtcctcaagttgattgaaaaagagcgtaacggtgagaccattaatacacgactgatttccggtgtagtgcagtcttacgtggagctggggctcaacgaggatgatgcatttgccaaaggccctactttgacggtctacaaggaaagtttcgaatcacagtttctagccgacaccgagcggttttatacccgcgagtcaacagagttcctgcagcagaatccggtcaccgaatacatgaaaaaagccgaggctagattgctggaggagcagcgcagagtgcaggtgtatctgcatgagagcacccaggacgaacttgctaggaaatgcgagcaggtcctaatcgagaagcatctcgaaatttttcatacggagttccaaaatctcctggacgccgacaagaacgaagaccttggcagaatgtataacctggtgagtagaatccaggatggactgggtgaattgaagaagctcctagagactcacatccataaccaggggctcgccgctatcgagaagtgcggcgaggcggcactaaacgaccccaagatgtatgtccagacagttctcgacgtgcacaagaaatacaacgcattagtgatgtctgcttttaataacgacgccggctttgtagccgccttagacaaagcttgcggccgtttcatcaataacaatgcggtcaccaagatggctcagtcttcaagtaaatctccggaattgctggccagatattgcgactctctgctcaagaagagctccaagaaccccgaagaggctgagctagaggataccctcaaccaagtgatggtagtgttcaaatatatcgaagacaaggatgtgttccagaagttctatgccaaaatgctggcaaagcgcctggttcaccaaaattctgcttcagacgatgccgaggctagcatgatcagtaagctcaaacaagcctgcgggtttgaatacacatcaaagttacagcgtatgttccaagacattggtgtctccaaagatctgaatgagcagttcaaaaagcacctcaccaactctgaaccccttgatttggacttcagtatccaggtgctctcctccgggagttggccttttcaacagtcctgcacatttgccctgccttcagagctggagcgtagttatcagaggtttaccgccttctacgcctctaggcactcagggcggaagcttacatggctgtaccagttaagcaaaggtgagctggtcaccaactgttttaaaaacaggtataccttacaggccagcaccttccagatggcaatcctccttcaatacaacaccgaggatgcctacactgtgcagcagctcacagattctacccaaatcaaaatggatatactcgcccaggtgttgcagatactgttaaagtcaaagctgctttag

SEQ ID NO: 23653 - DNA, 2121 bp, synthetic construct
  misc_feature 1..2121: note = Description of Artificial Sequence: Synthetic coding sequence
  source 1..2121: mol_type = other DNA
atgagcctgaagccccgggtggtggacttcgacgagacctggaacaagcttctaacaactataaaggcagtggttatgctggagtacgtagagagagccacatggaacgaccgcttctctgacatctacgccctttgtgtggcataccccgagccactaggagagaggctctacactgaaactaaaatctttctggagaatcatgtgcgacacctccataaaagagtactggaatcagaagaacaagtcttggtaatgtaccacaggtactgggaggagtactctaaaggagctgactacatggattgcctgtacagatatttgaacacacagttcattaaaaaaaacaagctgaccgaggccgacttgcagtacggctatggtggtgtggatatgaatgagcctctgatggaaatcggcgaactggccctggacatgtggaggaagcttatggtggaaccactccaagcaatccttatccgaatgctcctcagagagataaagaacgacagggggggggaagatcccaatcagaaagtaatccacggagttatcaatagttttgtccacgtcgagcaatacaagaaaaaattccctctgaaattctaccaggagatctttgagtctccattcctcaccgagaccggagagtattataagcaggaggctagcaacctactgcaagagtcaaattgctcccaatacatggagaaggttcttggacgcttgaaagacgaagagatcaggtgccggaagtacttacacccctcatcctatacaaaagtgatccatgagtgccaacagaggatggttgcggaccatctgcagtttttgcatgctgaatgccacaacattataagacaggagaagaaaaacgacatggccaacatgtacgtgctccttcgggcggtgtccactggcctcccacatatgatccaggagctgcagaatcacatccacgatgaagggctccgagctacaagtaatttgacccaggaaaatatgcctacgctctttgtcgagtccgtgctggaggtccacggcaagttcgtgcaacttattaacactgtcctgaatggcgatcagcatttcatgtctgccctcgataaggccttaacatccgtagtgaactaccgtgagccgaagtccgtgtgcaaggcccccgagctgcttgccaaatactgcgataatctgcttaaaaagtcagcaaagggcatgaccgaaaacgaagttgaggatcgcctgacaagttttataactgtgttcaaatacattgatgacaaggacgtgtttcaaaagttctacgcacgcatgttggctaagcgcctcatccacggcttaagcatgtccatggacagtgaggaggcaatgatcaataagctgaagcaggcatgcgggtatgaatttacctctaaattgcataggatgtacactgatatgtccgtgagtgccgacctgaataacaagttcaacaacttcattaagaaccaggacaccgtcattgacctcggtataagcttccagatttatgttcttcaggcaggagcatggcccctaacacaggcgccctccagtacttttgccattccacaggagttggagaaatcagtgcagatgttcgaattgttctattcacaacacttttcaggtaggaagcttacatggttgcactacctgtgcacgggagaagttaagatgaattacctgggaaaaccctatgtggcaatggtaacaacataccagatggctgtgctcctcgccttcaacaatagcgaaaccgtgtcttacaaggaactacaggattctacgcagatgaatgagaaggagctgacaaagacaatcaaaagcctgctggacgttaaaatgattaaccacgactccgaaaaagaagacatcgatgctgagagctcattctccctgaatatgaatttctcaagcaaacggaccaaattcaaaatcactacctccatgcagaaagacacgccccaggtgatcagccaatctcgggccaggtttaacccatccattagtatgattaaaaagtgcatcgaggtactgatcgacaaacaatacatagagagaagccaagcaagcgccgatgagtattcgtatgtcgcgtag

SEQ ID NO: 23654 - DNA, 2121 bp, synthetic construct
  misc_feature 1..2121: note = Description of Artificial Sequence: Synthetic coding sequence
  source 1..2121: mol_type = other DNA
atgagcctgaagccccgggtggtggacttcgacgagacctggaacaagctgctgactacaatcaaggccgtcgtcatgttagagtatgtggagagagctacctggaacgacaggttctccgatatttatgcactttgcgtagcttaccccgagcctttgggcgagaggctgtacaccgagaccaagatttttctcgaaaaccacgtccgacatctgcacaaaagagtccttgaaagtgaagagcaggtcctggtcatgtaccacaggtactgggaggagtattccaagggcgctgattatatggattgcctgtaccgatatctgaacactcaatttatcaagaaaaacaaacttactgaggccgatctgcagtacgggtacggtggagtggatatgaacgagcccctgatggaaataggggagctggccctggatatgtggagaaaacttatggtggagccattgcaggccattttgattagaatgttactgcgggagattaagaatgacagaggtggcgaggatcctaatcagaaggtgattcatggagttataaacagcttcgtgcatgtggaacaatacaagaagaagttccctctgaagttctaccaagaaattttcgaaagtccctttttaaccgagactggcgaatactataagcaggaagcttctaacctcctgcaggagagcaattgcagccagtacatggaaaaagtgttgggaagactcaaagacgaggagataaggtgcagaaagtatttgcacccatctagctacacaaaggttatccacgaatgccaacagcgtatggtggcggaccatctccaattcctgcacgctgaatgccataatatcatccggcaagagaaaaagaacgacatggcgaatatgtacgtacttctccgtgcagtaagcactggcttgccacatatgattcaggagctgcaaaaccatatccacgacgaagggctgagagctacaagcaaccttacgcaggaaaacatgccaaccctcttcgtcgaatccgtgctcgaagtccacggcaaattcgtgcaactgataaataccgtgcttaacggcgatcagcactttatgagcgcactggataaagcccttaccagcgttgttaactatagggaacccaagagcgtgtgtaaggcgcccgagctactggcaaagtactgtgataatcttctgaaaaaatccgccaagggcatgactgaaaacgaggttgaagataggctgacgagcttcattactgtgtttaagtatatcgacgataaagacgtgttccagaaattctatgctcgcatgcttgccaaaaggttgatccacggattatctatgagtatggattctgaagaggcgatgatcaacaaacttaagcaggcttgcgggtacgagttcacctccaaacttcatagaatgtatacggatatgtctgtcagcgctgaccttaacaataaatttaataattttataaagaatcaagacacagttattgatctggggatctcttttcagatttacgttctgcaggctggtgcctggcccctgacacaggctcctagcagcacattcgcaattccccaggagctggagaagtcagtacagatgttcgagttgttttattctcaacacttcagcggtagaaagctgacctggcttcattatttatgtacgggggaagtaaagatgaactatctgggaaagccttacgtagccatggtgaccacttatcagatggcagtgctgctggcatttaacaacagtgaaaccgtgagctataaggaactccaagactcaacccagatgaacgaaaaagagttgactaagaccattaagagtttgctcgacgtcaaaatgatcaaccacgactcggagaaggaggacatcgacgcggaatcatcattcagtctgaatatgaacttctctagcaaacggactaaattcaagatcactacctccatgcagaaggacacacctcaggtgatctcccaatcccgagcccgcttcaatccttccatttctatgattaaaaagtgtatagaggtgctgatcgacaagcagtacatcgaacggagtcaggcttccgccgacgagtactcctacgtggcatag

SEQ ID NO: 23655 - DNA, 2238 bp, synthetic construct
  misc_feature 1..2238: note = Description of Artificial Sequence: Synthetic coding sequence
  source 1..2238: mol_type = other DNA
atgagcctgaagccccgggtggtggacttcgacgagacctggaacaagctgctgaccaccataaaggccgtggtaatgcttgaatatgtcgagagggctacctggaacgataggttttcagacatctatgcgctgtgcgtggcttaccccgagccactcggtgagagactgtataccgagactaagatattcctagaaaatcacgtccgccatctccacaagagggtacttgaaagcgaggagcaagtcttagtgatgtaccacagatactgggaggagtactctaaaggcgcagattatatggactgcctctatcgttatctgaatactcaattcatcaagaaaaacaagcttactgaggcggatctccagtatggatacggcggcgtcgatatgaatgaacccctgatggagataggtgagctggctcttgacatgtggcgaaagctgatggtcgaacccctgcaggccatcctaattaggatgctgcttcgtgaaattaagaatgaccggggcggcgaggaccccaaccagaaagtgattcacggtgttatcaattccttcgttcatgtcgagcagtacaagaagaaattcccactgaaattttaccaggaaatcttcgaatccccgttcctgacagagaccggggaatactacaaacaggaggcttctaacctcctgcaggaaagtaattgttcccagtatatggaaaaggtgttagggcggttgaaggatgaagagatccgctgtcgcaagtatctccatcccagctcttacacgaaagttatacacgagtgccagcaacgaatggtggccgaccacttacagttcttgcacgccgagtgtcataacattatacgtcaagagaaaaagaacgatatggccaatatgtatgtcttactgagggccgtctctactggactgccccacatgatccaggagctgcaaaatcatattcacgatgaaggattacgtgccactagcaacctgacgcaggagaacatgccaacgcttttcgtcgagtctgttctcgaagttcacggaaaattcgtgcagctgatcaacactgtcttgaacggggaccaacacttcatgagcgccttggacaaggctttaacttccgtggtcaattatcgggaaccaaagtccgtgtgcaaggctcccgagttgctggctaaatactgcgacaacctgttaaaaaaatccgcaaaagggatgaccgaaaacgaggtcgaggataggctgacaagctttattactgtgttcaagtacattgatgataaagatgtgttccagaagttttatgctagaatgcttgcgaagcggctaattcatggcctctctatgtctatggatagcgaggaggcgatgattaacaaactgaagcaggcctgcggatatgaatttaccagtaagctgcacaggatgtacaccgatatgtcggtgtccgctgatcttaacaacaagtttaataatttcataaaaaaccaggacaccgtcatcgacctggggatcagttttcagatttacgtgctccaggcaggcgcctggccacttacccaggcaccctccagcactttcgcaattcctcaggaacttgaaaagagcgttcaaatgtttgaactgttctattctcaacatttcagcggccgtaagttgacctggcttcattatctgtgtacgggggaagtgaagatgaactacctgggcaagccctatgtggccatggtgacaacctaccaaatggctgtgctcctggctttcaacaattctgaaacagtaagttacaaggagctgcaggactccactcagatgaatgagaaagaactgactaaaacaattaagagcctactcgatgtgaaaatgatcaaccacgattcagaaaaggaagacattgatgccgagagttcgtttagccttaatatgaactttagctctaaacgaaccaaatttaagataaccacttccatgcagaaggacacaccgcaggaaatggagcaaactcgatcagccgttgatgaagaccgcaaaatgtatctccaggctgctatcgtgcggatcatgaaagctcgcaaggtgcttaggcataacgccctgatccaggaagttatttcacaaagtagagccaggtttaacccttctataagtatgatcaagaagtgcattgaggttcttattgacaaacaatatatagaacgaagccaagcctcagccgatgagtattcctatgtggcgtag

SEQ ID NO: 23656 - DNA, 2238 bp, synthetic construct
  misc_feature 1..2238: note = Description of Artificial Sequence: Synthetic coding sequence
  source 1..2238: mol_type = other DNA
atgagcctgaagccccgggtggtggacttcgacgagacctggaacaaactgttaaccaccatcaaggctgtggtgatgctcgagtacgtcgagcgagcgacctggaatgatcggttctcggatatttacgctctctgtgtggcataccccgagccattaggcgaaagactgtacacggaaaccaagattttccttgaaaaccacgtacgccacctacacaaacgggtattggagtccgaggaacaggtgctggtgatgtaccacaggtattgggaagagtacagcaagggcgctgattatatggattgtctgtaccgatacctgaatacccagttcattaagaagaacaagctgaccgaagcagacctgcagtatggatacggaggagtggatatgaatgagccgctcatggaaatcggtgaactcgccctagatatgtggagaaagctgatggtggaacccctccaggccatcctcattcggatgctgttaagagagatcaaaaatgatcggggcggggaggaccccaatcaaaaggtgatccacggggtgatcaacagcttcgtccatgtggagcaatataaaaaaaagtttcccctgaagttttatcaggaaatctttgaatctccttttctcactgagactggagaatactataagcaggaggcgtcaaatctgttgcaggagtcaaattgtagccaatacatggaaaaggtcctggggcgcttgaaagacgaggagattagatgcagaaaatacctgcatccttcgagctataccaaggtcatccatgagtgccaacagagaatggtcgccgaccacttgcaatttctacatgccgaatgtcacaacatcatcaggcaggagaagaagaatgatatggcgaatatgtatgtcctgctacgcgcagtgtctaccgggctcccacacatgatccaggagctgcagaatcacattcatgacgaagggctgcgcgccacttccaacctgacacaggaaaacatgcctaccctgtttgtggagagcgtgctagaagtgcatgggaagtttgtgcagctgattaataccgttttgaacggagaccaacacttcatgtctgcactagacaaggcactgacctcagtagtcaactatcgagagccaaaaagcgtttgtaaggctccagaactactcgcgaaatattgtgacaatctgttaaaaaagtccgccaaaggcatgactgagaatgaggttgaggaccggctcacctccttcataactgtttttaaatatatcgacgacaaggatgtctttcaaaagttctacgccaggatgctggccaagcggttaatccacggactgtctatgagcatggactctgaagaagcgatgatcaataagctcaagcaagcatgcggctatgagtttacctctaaactccaccgaatgtatactgacatgtcagtctctgcagatcttaataacaaattcaacaactttatcaagaatcaggataccgtcatcgaccttggcatatcttttcagatctatgtgctgcaggctggggcttggccgctgacacaagctccttcctctacgttcgccatccctcaggaacttgagaagtcagtccagatgttcgaacttttttacagccagcactttagtggaaggaagttgacctggctgcactacctgtgcactggtgaagtcaaaatgaactatcttgggaagccctacgtggccatggttaccacctatcagatggccgtcctgttggcctttaataactctgagacggtctcgtataaggaactgcaggatagtacccagatgaatgaaaaagaactgaccaaaaccatcaaaagtctgctcgatgttaagatgatcaaccatgattctgagaaagaggacattgatgccgagtcatcattctccctgaatatgaatttcagctccaagcgcaccaagttcaagattacgacctccatgcagaaagacacccctcaagagatggaacaaaccagatctgcggtggatgaagatcggaagatgtatcttcaggctgcaattgtgaggatcatgaaagcacgcaaagtgctgaggcacaacgcacttatccaggaagtgatttcacaatccagggcacggttcaacccctctatcagtatgatcaaaaagtgtatcgaggtactgatagacaaacagtacattgaacgatcccaggcctccgctgatgaatacagctacgtcgcctag

SEQ ID NO: 23657 - DNA, 2238 bp, synthetic construct
  misc_feature 1..2238: note = Description of Artificial Sequence: Synthetic coding sequence
  source 1..2238: mol_type = other DNA
atgagcctgaagccccgggtggtggacttcgacgagacctggaacaaactgttgaccactatcaaagccgtcgtgatgctcgagtatgtagagcgcgctacttggaacgatagattcagcgacatctatgcattgtgcgtcgcctaccccgaaccactaggcgagaggttgtacactgaaaccaaaatctttctcgaaaaccatgtgcggcacctgcacaagcgggtgctggaatcagaagaacaggttctggttatgtaccaccgctactgggaggaatatagtaaaggtgcagattatatggattgcctgtatcgctacctgaatacccagttcatcaagaaaaataaactgacagaggctgacttgcaatacgggtacgggggggttgacatgaacgaaccactcatggaaattggggaactggccctggatatgtggagaaaactaatggtggaaccactgcaggccattctgattaggatgcttctccgcgagataaaaaacgatcgaggtggcgaagatcccaaccagaaggttatccatggggtgattaatagctttgtgcatgtggagcaatacaagaaaaagtttccattgaaattctatcaagagatcttcgagagtccattcttaactgagaccggggaatactataaacaagaggcctcaaacttactgcaggagtctaattgctctcagtacatggaaaaggttctgggacggctgaaagatgaagagattaggtgcagaaaatatctgcaccctagttcttatactaaagtgattcacgagtgccaacagagaatggtggctgatcatttgcaatttctccacgcagagtgccacaacatcatcaggcaggaaaaaaaaaatgacatggccaatatgtatgtcctgctgcgtgcagtgagtacagggctgcctcatatgatccaggaactccaaaatcatatccatgacgaaggcttgcgggctaccagcaatttgacacaagagaacatgccaactctgtttgtggagtccgtgctggaggtgcatggtaagttcgtgcagcttatcaacactgttttaaacggcgaccagcactttatgtccgccctagataaagccctcacctccgtcgtgaattacagagaaccgaagagcgtctgcaaggcgcccgaactgctggcaaagtactgtgataatcttcttaaaaaaagcgcaaaaggtatgacggagaacgaggtagaggaccgcctgacttcctttatcacagtgtttaagtatatcgacgataaagacgttttccagaagttttacgccaggatgctcgccaaacgtttgatccacggcctgtccatgtctatggactctgaagaagccatgatcaataagctgaagcaggcctgcggctacgagttcacttctaaactgcacagaatgtatacagacatgagcgtgagtgcagatttgaataataaattcaataacttcattaagaaccaggatacggtcatcgaccttgggatttcctttcagatctacgtgctccaggcaggggcttggcccctgacccaggcaccatcttccacattcgctatcccgcaggaactggagaaatctgtacagatgtttgagctattttactcccaacacttcagtggtcgcaaattgacttggctgcactatctgtgcactggcgaggtcaagatgaactatttagggaagccgtatgtcgccatggttaccacataccagatggctgtgctgcttgctttcaacaatagtgagactgtttcctacaaagagctccaggatagtacccagatgaacgagaaagaacttacaaaaacaattaagtctctgttggatgtcaaaatgatcaaccacgattcagagaaagaagatatagatgctgaatcttcctttagtcttaacatgaatttctcttcgaaacgcaccaagttcaagataaccacgtctatgcagaaagacacaccacaggagatggaacaaaccaggtcggccgtggacgaagatagaaagatgtatctccaggcagccatcgtgcggattatgaaggcgcgaaaagtcttaaggcacaatgccttaatccaggaagtcatcagccagagtcgagctcggtttaatccaagtatatcaatgatcaaaaagtgcattgaagtgctgatagacaagcagtacatagaacgctcccaggcatcagctgacgagtatagctacgtggcctag

SEQ ID NO: 23658 - DNA, 2067 bp, synthetic construct
  misc_feature 1..2067: note = Description of Artificial Sequence: Synthetic coding sequence
  source 1..2067: mol_type = other DNA
atgctgtacgtgtggcccatcctgaaccccctggagaaggacttcatacagaaactgcgttttttttggaaaataatgttcggcatctgcattagatactgggaagaatacagcaagggcgcagattatatggattgcttgtaccgctaccttaacacccagtttatcaagaaaaataaactcacagaggccgacctgcagtacgggtacgggggcgttgatatgaacgaacccctgatggaaattggcgaactagccctggacatgtggcgaaagcttatggttgaaccactacaggcaatcttgatccggatgctgctgcgtgagattaaaaacgaccgtggtggggaggaccccaatcagaaagtgatccacggcgtcatcaactccttcgttcatgtcgagcagtacaagaaaaaattcccactcaagttttaccaggagatcttcgagtccccgtttttgacagagacaggagaatattataaacaggaggcctccaatctgttgcaggagagcaactgttcccagtatatggagaaagtgctgggccggttgaaagatgaagagattcgatgccgaaaatacttgcatccttctagctatactaaagtgattcacgaatgtcagcagcgaatggtggccgaccacctgcagtttctgcacgccgagtgccataacatcattagacaagagaagaaaaatgacatggccaacatgtatgtgcttctgagggcagtctcgacaggactcccccacatgattcaggaactgcagaatcacatccacgatgaaggcttacgcgctacatcaaaccttacacaagaaaacatgcctacattgttcgtggaatccgtgctggaggtgcacggaaaatttgtccagttgataaacaccgtgctgaatggtgaccaacactttatgagcgccctggacaaagctctgactagcgtagtgaactatcgagagcctaaatccgtgtgtaaggcacccgagctgctggccaagtattgtgataatctcctcaagaagagcgctaaaggcatgacagagaacgaggttgaggatcgtcttacttcatttatcacagtgtttaagtacattgatgacaaggatgtgttccaaaagttttacgctcggatgcttgccaagcgactgatacacggtctctcaatgagtatggactccgaagaggccatgataaacaaacttaaacaagcctgcgggtatgagtttacttcaaaactgcaccgaatgtacacggacatgagcgtcagcgctgacctgaacaacaagtttaacaacttcatcaaaaaccaggacactgttattgacctcggcatcagcttccagatatatgtcctgcaagccggagcgtggccgctcacccaagccccgagttctacttttgctatcccccaagaactcgaaaaatcagtccagatgtttgaactcttttactctcaacatttctccggccggaagctaacatggctccactacttgtgtactggtgaagtcaagatgaattacttgggcaaaccatacgtcgccatggtaaccacttatcagatggcagtgctgcttgctttcaataatagtgagacagtgtcttataaggagcttcaggattccacacagatgaacgagaaagaacttacaaagacaatcaagagtcttcttgatgttaagatgattaaccatgattctgagaaagaagatattgatgcagagtcgagcttctccctgaacatgaacttcagttctaaaagaaccaaattcaaaattactaccagcatgcagaaagacacacctcaggaaatggagcagacaaggtcggccgtggacgaagatagaaagatgtacttacaggcagcgatcgtgaggataatgaaggcccggaaagtcctgcgccacaacgcccttatccaagaagtgatctcacagagcagggcgaggttcaacccttctatctcaatgatcaaaaaatgtatcgaggtcctcatcgacaagcagtacatcgagagatctcaggccagcgccgacgagtactcttatgtggcatag

SEQ ID NO: 23659 - DNA, 651 bp, synthetic construct
  misc_feature 1..651: note = Description of Artificial Sequence: Synthetic coding sequence
  source 1..651: mol_type = other DNA
atgagcctgaagccccgggtggtggacttcgacgagacctggaacaagttacttaccactatcaaagccgttgtgatgctcgagtacgtggagagggccacctggaatgaccggtttagcgatatctacgccctatgcgtggcataccctgaacctctgggggagcggctgtacaccgagacaaagatctttctggaaaaccatgtacgacacctacataaacgggtcctcgagtctgaggagcaggtgctggtgatgtaccatcggtactgggaggagtattccaagggagccgactacatggattgcctgtacagatatctgaacacccagtttattaaaaaaaacaagctaaccgaagccgacctgcagtatggctacggaggggtcgatatgaacgaaccgttaatggaaatcggggaacttgccttggacatgtggcgcaaattgatggtggaacccctgcaggctatcttgattaggatgctactgcgcgagataaagaatgaccgaggaggtgaggacccaaaccaaaaggtcatccacggagtaataaacagctttgtgcatgtggagcaatacaagaaaaagtttccactgaagttctaccaggaaatttttgagagtccgttcttgactgagacaggttag

SEQ ID NO: 23660 - DNA, 2295 bp, synthetic construct
  misc_feature 1..2295: note = Description of Artificial Sequence: Synthetic coding sequence
  source 1..2295: mol_type = other DNA
atgtaccgggtgacctggagcaccttctggctgcggttccagcactacacgtgcactatgagcctgaagccacgggtcgtggactttgatgagacgtggaacaagcttctgaccactatcaaggcagtggttatgttggaatatgtggagagagccacgtggaacgacagatttagcgacatatacgcactctgcgtagcttatcctgagcctctgggcgaaagactgtacactgagaccaaaattttcctggaaaatcatgttaggcacctacacaaaagggtactggagtctgaagagcaggtgctggtaatgtaccataggtactgggaagagtattccaaaggtgcagactatatggactgtctgtaccggtatctgaatacccaattcattaaaaaaaacaagctgacagaagcagatctgcagtacgggtacgggggcgtcgatatgaatgaacctctgatggagataggggagcttgctctggatatgtggcgcaagttgatggtggagccccttcaggctattctcattcgcatgctgctgcgggagatcaaaaacgaccgggggggtgaggatcctaaccagaaagtgatccatggagtgatcaactcattcgtgcacgtcgagcaatacaagaagaagtttcccttgaaattctaccaggaaatattcgagagtcctttcctgactgagactggcgaatactataaacaggaagcctctaatttgctacaggagtccaactgcagccagtacatggagaaagtactgggtaggctgaaggacgaggagatcagatgccgcaagtacttgcacccatcaagctatacaaaggtgattcacgaatgccagcagcgcatggtggctgaccacttgcagttcctgcacgcagagtgccataacatcatccgtcaagagaaaaaaaatgacatggccaacatgtacgtactacttcgggctgtgtcaactgggcttcctcatatgatccaggaacttcagaatcacattcacgatgagggcctgagggccacctccaatctgactcaggagaatatgccgacgctgttcgtggaatcagtactggaggtgcacggcaagtttgtccagctcattaatacagtcctgaacggggatcaacattttatgtctgccttggataaggcactgacgtcagtggtcaattaccgggagccaaaatcggtctgtaaagcgccggaattgctagcaaagtactgcgataacctgctgaagaaaagcgctaagggcatgacagagaatgaagtcgaggaccgcttgacgagctttatcacagtcttcaagtacatagacgacaaagacgtgtttcaaaagttctatgcccgaatgctggccaaaagattgattcacggcctcagcatgagcatggactccgaggaggctatgattaataagttgaaacaggcgtgtggttacgaatttacctccaagctgcatcggatgtataccgacatgagtgtcagcgctgacttgaacaacaagttcaataacttcataaagaatcaggacacagtgattgacctgggcatctctttccaaatttacgtgctgcaggctggggcttggcccctgacgcaggctccatcctctacctttgctatcccgcaggaactggagaagtccgtccagatgtttgagctcttttactctcagcatttcagcgggcggaagctgacctggctccattatctgtgtaccggggaggtgaagatgaactatctcggcaagccgtatgtagcgatggtaacgacctaccagatggcagttttactggctttcaataattcagaaacagttagctacaaagaactccaggacagcacccagatgaacgagaaggagctgacgaagaccataaaatctctcttagacgtcaagatgataaaccacgattccgagaaagaagacatcgatgccgagtcgtcgttcagcctgaatatgaatttttcctccaaacgtactaaatttaagatcaccacttcgatgcagaaggacactccacaagaaatggaacaaacacgttcggctgtggacgaggacagaaaaatgtatttacaggcagccatcgtgcgcatcatgaaagcacgaaaggtcctgcgacataatgcccttattcaggaagtcataagccagagtagggcccgcttcaatccctccattagcatgattaaaaagtgcattgaggtcttgatcgataagcagtacatcgaaagaagccaggctagtgccgatgaatatagctacgtggcttag

SEQ ID NO: 23661 - DNA, 2307 bp, synthetic construct
  misc_feature 1..2307: note = Description of Artificial Sequence: Synthetic coding sequence
  source 1..2307: mol_type = other DNA
atgagcaacctgagcaagggcaccggcagccggaaggacaccaagatgcgcattcgtgcattccctatgacaatggatgagaagtatgttaattctatttgggacctccttaagaacgctattcaagagatccagagaaagaataacagcggactgtccttcgaagagctgtacagaaacgcctacaccatggttttgcacaaacacggtgaaaagctgtatactgggctacgtgaggtcgtaactgagcacttgattaacaaagttcgggaggatgtcctcaattctctgaacaataatttccttcagaccctgaatcaggcctggaatgaccatcagaccgcaatggtcatgatccgcgacattctcatgtacatggaccgtgtgtacgtccagcagaataacgtggagaacgtgtacaatctcgggctgatcatcttccgggatcaggttgtgagatatggctgtatccgagaccatctccggcagacattactcgacatgattgctcgcgaacgcaagggggaggtggtagaccgcggcgcaatccgaaatgcctgccagatgttgatgattctcgggttggaaggcagaagtgtgtacgaggaggatttcgaagctcccttcctggagatgtccgccgaatttttccaaatggaaagtcagaaatttctcgccgagaacagcgcttccgtctacatcaaaaaagtcgaagccagaattaacgaagagattgaaagggttatgcactgtcttgataaaagtacagaagagcctatagtgaaagtggtggagagggagcttatcagcaagcatatgaagaccatcgtggagatggagaatagcggtttggtgcatatgctgaaaaacggcaaaaccgaggacttgggttgcatgtacaagctattttctcgcgttcccaatggattgaaaacgatgtgcgagtgcatgtcaagctatctgcgggaacaggggaaagccctggtctctgaggaaggcgagggaaaaaatcctgttgactacattcagggcctattggacctgaagagcaggtttgaccggttcctcctggagagtttcaacaatgataggcttttcaaacagaccatcgcgggggatttcgagtacttccttaacctgaatagccggtcccctgagtatcttagtctctttatcgacgacaagctgaaaaagggagtgaagggtctgaccgagcaagaggttgagacaatacttgacaaagccatggttttgtttcgttttatgcaagagaaagatgtgttcgaacggtactataagcagcatctggctagacgcctccttacaaacaaatcagtttcggacgactccgaaaaaaatatgatttctaaactgaagaccgaatgcgggtgccagtttaccagtaaacttgaagggatgtttcgtgatatgtcgattagcaacaccactatggatgaattcaggcagcacctgcaggcaactggcgtttcactggggggggtggacctcacagttagagtgttaaccactggttattggcctacccagtctgctacacccaagtgcaatataccccccgcaccacgccatgcctttgaaattttcagaagattttacctcgcaaaacactctgggcgacagcttacactgcagcaccacatggggtctgcagatctcaacgcaactttctacggtcccgtaaaaaaggaggatgggagcgaggtcggcgtgggcggagcccaggtaaccggatctaatacacgtaagcatattctgcaggtgtccacgtttcagatgacgatcttgatgctgtttaacaaccgggaaaagtacacattcgaggagatccagcaggagacggacataccagagcgggaactggtcagggcccttcagtctctggcctgcggaaaaccaacacagagagtgctcacaaaagagcctaagagcaaggagatcgagaacggccatatattcactgttaatgatcaatttacatcaaaattacacagggttaagattcagaccgtggccgctaaacagggggaaagcgatcccgagagaaaggagactcggcagaaagttgatgatgacaggaagcatgaaatagaggccgcgatcgttaggatcatgaagtccaggaagaagatgcagcacaacgttcttgttgctgaagtcacacaacaactgaaagcacgttttctgccttcgccggtggtgattaaaaaacgtatagaggggttaatcgagagagaatacctggctcggaccccagaagaccgcaaggtgtacacatacgtggcctag

SEQ ID NO: 23662 - DNA, 2109 bp, synthetic construct
  misc_feature 1..2109: note = Description of Artificial Sequence: Synthetic coding sequence
  source 1..2109: mol_type = other DNA
atgagcaacctgagcaagggcaccggcagccggaaggacaccaagatgcgcatccgagcgtttccggttcgagaagacgtcctcaattcactaaataacaattttctccaaacactgaaccaggcctggaatgaccaccagacagctatggtgatgatccgggacatcctgatgtacatggaccgcgtgtacgtgcagcagaacaatgttgaaaacgtttataacttgggcctgatcatttttcgagatcaggttgtacggtacggttgcatcagagaccacctgagacagaccttgcttgatatgatagccagggagcggaagggagaagtggtggatagaggcgctatccgtaatgcttgccagatgttaatgattcttggactcgagggtcgctctgtatatgaggaggatttcgaggccccttttctcgagatgagtgcggagttctttcagatggagtctcaaaaattcctggccgaaaatagtgctagcgtgtacataaaaaaggttgaggcacggatcaacgaagaaatcgagagagtgatgcattgtcttgataaaagcaccgaagaacccatagtgaaggtcgtggaaagggagttgatctccaaacacatgaagaccatagtggagatggagaacagcggcctcgtgcacatgctcaagaacgggaagacagaggatctaggttgcatgtataagctgtttagtcgggtgcctaacggtttgaaaacgatgtgcgagtgtatgagctcatatttgcgagaacagggcaaagctctagtgagcgaggagggggaggggaaaaaccctgtagattatattcaggggctgctggacctgaaatctcgctttgacagatttctgctagagagtttcaataacgatcggctgtttaaacaaactatagccggcgacttcgagtactttctcaacctgaattcgcggagcccagaatacctgagcctcttcatcgacgacaagctcaagaagggagtcaaaggcctcacggaacaggaggtagagacaattctggacaaagccatggtgctgttccgcttcatgcaggagaaggatgtatttgaaaggtactacaagcagcatctggctcggcggctcctgactaataagtctgtgagcgatgacagcgaaaagaacatgatctctaaacttaagactgaatgtggctgccagtttacgtctaagctggagggcatgttccgggatatgagtatctcgaacacgactatggatgaattccggcagcaccttcaggccacaggcgtgagcttaggcggagttgatctcaccgtgagagtcttgaccacaggctactggccaacacagagcgccactccaaaatgtaatattccccccgctcccaggcacgcattcgagatatttagacggttctatctcgcaaagcacagcgggaggcagctaacactgcaacatcacatgggttccgcagacctcaatgccactttctatggcccggtgaaaaaggaagatggtagcgaggtaggcgttggaggtgcccaggtcactggctccaatactcgcaagcatatcctgcaggtcagcacattccagatgactatccttatgctgtttaataaccgcgagaagtacacgttcgaagagatacagcaggaaacagatatacctgagcgcgagctggttcgcgccctgcagagcctcgcatgtggaaagcctacacagagagtcttgactaaagagcccaaaagcaaggaaattgaaaacggacacatttttaccgtgaacgaccaattcacaagcaaactgcaccgcgtgaagatccagactgtggctgccaaacagggtgaaagcgaccctgagaggaaggagactcgacagaaagtggacgatgatcgtaaacacgaaattgaggcagctatcgtgcggatcatgaagagccggaagaagatgcagcacaacgtattggtagctgaggtcactcaacagttaaaggccaggttcctgccatcaccagtcgtcattaagaagcgcattgaaggactcatagagcgcgagtatctggctcgtacgcctgaggaccgtaaagtctacacctatgttgcctag

SEQ ID NO: 23663 - DNA, 2235 bp, synthetic construct
  misc_feature 1..2235: note = Description of Artificial Sequence: Synthetic coding sequence
  source 1..2235: mol_type = other DNA
atggacgagaagtacgtgaacagcatctgggacctgctgaagaacgccattcaagagattcagcggaagaacaattctggtctctcattcgaagaactgtaccgaaacgcctatacaatggtgctgcataaacatggagaaaaactttacacgggtcttcgagaagttgtgaccgaacacctgataaacaaagtgcgggaagatgtgctgaacagcctgaataataacttcctgcagactctgaatcaggcctggaacgaccaccagacagccatggtgatgattcgcgatatcctgatgtacatggatagggtgtacgtgcaacaaaataacgtagagaacgtgtataacctgggattgatcatctttcgcgatcaggtggtgcggtacggctgcattagagaccatctacggcaaaccttgttagatatgatcgcacgggagagaaagggggaagttgtcgaccggggcgccattcgtaatgcctgtcaaatgctgatgatcctgggcctcgagggacgcagtgtgtatgaggaggacttcgaggccccattcctagagatgtctgctgagtttttccaaatggaatcccagaaattcctggccgagaattctgcgtctgtgtatatcaagaaagtggaggctaggatcaacgaggaaatagaacgggtcatgcactgtctggacaagtctaccgaagagccaatcgttaaagtagttgagagggagctcatatcaaagcacatgaagactattgtggaaatggagaatagcggtctggtccatatgttaaaaaacgggaagaccgaagacctgggctgcatgtacaaactcttctctcgcgtgcccaacggcctgaaaacaatgtgtgagtgcatgtcttcttacctgcgagagcagggtaaagccctggtgtccgaggaaggcgaggggaagaaccccgtggactatatccagggattgctagatcttaaaagccggtttgatcgctttctgcttgagtcctttaataatgatcggttattcaagcagactatcgccggtgatttcgagtacttcctcaatctgaactcccgcagccctgagtacttgtccctcttcatcgacgacaaattgaaaaaaggagtgaaggggctgacagaacaggaagttgaaactattctcgataaagccatggtgttgtttcggttcatgcaagagaaagatgtgttcgagaggtactataaacagcatttagctaggaggctgttgaccaacaaatccgtaagtgacgattcagagaaaaacatgatctccaagctgaagaccgagtgcggatgccaattcacgtccaagctcgagggcatgttccgcgatatgtctatttcaaacacaaccatggatgagtttagacagcacctccaggctaccggggtgtcattggggggcgtcgatctgaccgtgcgggtcctaacaaccgggtactggcccacgcagtcagccacacctaaatgcaatatcccccccgctccccggcatgccttcgagattttcagaaggttctacctcgcgaagcatagtggccggcaactgactttgcagcaccatatgggatctgcagacctcaatgctacattttatgggcccgtgaagaaggaagatggctctgaggttggagtcggcggggctcaggtaacaggtagcaacactagaaagcacatcctgcaagtttcaacattccagatgactatcctcatgctctttaataacagagagaaatatacttttgaagagattcaacaggagaccgacattccggagcgtgagttggtgcgtgccttacagagcttggcttgcgggaagcctactcagagggtactcacaaaggaacctaagagcaaggagatcgagaacgggcacattttcaccgtgaatgatcagtttacatcaaaactacacagggttaagatccagacagtggcagccaagcagggggagagcgaccctgaaaggaaagaaacccggcagaaggtcgatgacgaccgaaaacacgagattgaggcagccattgtcagaatcatgaagagcaggaaaaagatgcagcataacgtgctggtggcagaggttacccagcagcttaaggctcggtttttgccaagccctgtcgttattaagaaaagaatcgagggccttattgaacgagaatatctcgcgcggacacccgaagacaggaaagtatatacctacgtagcatag

SEQ ID NO: 23664 - DNA, 2235 bp, synthetic construct
  misc_feature 1..2235: note = Description of Artificial Sequence: Synthetic coding sequence
  source 1..2235: mol_type = other DNA
atggacgagaagtacgtgaacagcatctgggacctgctgaagaacgccatccaggaaatccagaggaagaacaactccgggttgagttttgaggagttatataggaatgcttacaccatggttctccataaacacggcgaaaagctgtacacaggtctcagggaagtggtgactgagcacctgatcaataaggttagggaggacgttttgaactctttgaataacaatttcctgcagacactgaaccaggcttggaatgaccatcagacggccatggtaatgatccgcgatatactgatgtatatggatcgcgtgtatgtgcagcagaacaatgtcgagaatgtgtataatttgggcctaatcatctttcgggaccaggtagtgagatatggatgcattcgagatcacttgaggcaaacactcttggacatgattgccagagaacgtaaaggcgaagtggtggatcgaggcgccattaggaatgcttgccaaatgctaatgatcttggggctggaaggtagatcggtctacgaggaagattttgaagcgccctttctggagatgtctgcagagtttttccagatggaatctcaaaagttcctggctgagaattctgcttccgtgtacataaaaaaggttgaggcacggatcaatgaagagattgaaagggtgatgcattgcctggataaaagcactgaggagccaatagtgaaagttgtcgagagggaactgatttccaaacacatgaagaccatagtggagatggagaattctggcctggtccacatgctgaagaacggcaagacggaggacttagggtgtatgtataagctcttctctcgtgttcccaacgggttgaagaccatgtgtgaatgtatgtcatcttatctcagagagcagggaaaagccctagtgagtgaagaaggagaggggaaaaatccagttgactacatacaagggttactggacctcaagtcacgatttgatagatttcttctagaatcattcaataacgataggctctttaagcagactattgctggtgatttcgagtactttctgaatttgaactcaagatcccctgagtatctaagcctctttatcgacgataaacttaaaaaaggagtgaaggggctgaccgagcaagaggttgagacaatcctcgacaaagccatggttctctttcgatttatgcaggagaaagatgtcttcgagagatattacaaacagcaccttgccaggagactgctgactaacaaaagtgtaagtgacgattccgagaagaatatgatatcaaagctgaagacagagtgcggttgccagtttacaagtaaacttgaggggatgtttcgggacatgtcaatcagcaataccaccatggacgagttccgccagcacctgcaggctaccggtgtcagcctcggcggggtagaccttaccgtgagagtgctgaccacgggctattggcccacgcagtccgcaacacctaagtgcaacataccacccgccccacggcatgccttcgaaatcttccgtagattttatttggccaaacacagcggacgccaattaaccctccagcaccacatggggtctgcggacctgaacgctacattctatggccccgtgaaaaaagaagacggctctgaggtcggggtgggtggagcccaggtgacgggatccaacactcgcaaacatatccttcaggtgtctacattccagatgacgattctgatgctatttaacaatcgggaaaagtacaccttcgaagaaatccagcaggagacggatatccccgaaagagagctggtgagagcgctccagtctttagcgtgcggaaagccgacacaacgggtgctgacgaaggagcctaagtccaaagaaatcgagaacggccacattttcacagtcaacgaccaatttacttcaaagctccatagagtgaagattcaaacagtcgcagccaaacaaggagagtctgatccagagagaaaagaaacccgccagaaggtggacgacgatagaaaacacgagatcgaggccgcaattgtgcggatcatgaagtccaggaagaaaatgcagcacaacgtcttggtcgccgaggtgacgcaacagctgaaggctagatttctgccttccccagtcgtgatcaaaaagaggatcgaggggctgatagaacgggagtatctcgccagaacgccagaggatagaaaagtgtatacttacgtggcctag

SEQ ID NO: 23665 - DNA, 1398 bp, synthetic construct
  misc_feature 1..1398: note = Description of Artificial Sequence: Synthetic coding sequence
  source 1..1398: mol_type = other DNA
atggagaccggcttccccgccatcatgtaccccggcagcttcatcggcggttggggggaggagtatctctcatgggaaggaccagggttgcctgatttcgtgttccagcaacagccagtcgagtccgaggccatgcattgcagtaaccccaaatcaggcgtagttctcgctaccgttgcacgtggcccagacgcttgccaaatcctgacaagggcccctctaggacaggacccaccccagagaactgtgctcggcctgctgaccgccaacgggcaatatcgcagaacctgcggccagggcattacccggattcgttgttactcaggctccgagaacgcctttccacctgcgggcaagaaggcgctgcccgattgcggtgtccaggaaccacctaaacagggcttcgatatttacatggacgagctggagcagggtgaccgggactcttgttctgtccgtgagggcatggcattcgaagatgtgtatgaggtcgacacagggactctcaagtcggatctgcatttcctcctcgacttcaatacagtgagtcccatgctagtcgattccagcttgctgagccagtccgaggacatttcaagcctgggtaccgatgtaatcaacgtcacggagtatgcagaagagatctaccagtacctgagggaggccgagatacgccaccggcccaaggctcattatatgaagaagcaaccggatatcaccgagggtatgaggaccatcctggtagattggttggttgaagtgggggaggaatacaagctacgggccgagacgctgtatctggctgtaaattttttggatagatttctgtcatgtatgagcgtacttagaggcaagctgcagctggtgggaactgctgccatgctcctggctagcaagtacgaggagatctacccacccgaggtggacgaattcgtgtacattacggacgacacatataccaaaagacagctgttaaagatggaacatctgctgcttaaggtgttggctttcgatctgaccgttccgacgactaatcagttcctgctacagtacctgaggaggcagggcgtctgtgtgcgaaccgagaacctcgccaaatacgtcgcagagttgtctctgttagaagccgatcctttcttgaaatacctccctagcttgatagctgccgctgccttttgtcttgccaattatacagtgaataaacacttttggcccgaaacactcgcggcatttactggttactctctgtctgaaatagttccttgcctgtcagagcttcacaaagcatatctggacatcccccataggcctcaacaggctatccgtgagaaatacaaggcctcaaaatatctgtgtgtgtctctaatggaacccccagctgtgctgctccttcaatag

SEQ ID NO: 23666 - DNA, 1395 bp, synthetic construct
  misc_feature 1..1395: note = Description of Artificial Sequence: Synthetic coding sequence
  source 1..1395: mol_type = other DNA
atggagaccggcttccccgccatcatgtaccccggcagcttcatcggcggctggggagaggagtatttgtcatgggaagggcccggcctgcccgatttcgtgtttcaacagccagtggaatcagaagccatgcactgttctaatccaaaatctggcgtggtcctagccacggtagctaggggtcccgatgcttgtcagattttgacccgggctccgctagggcaagaccctccacagcgtaccgtgctcgggctgttgactgcaaatgggcagtaccggaggacttgcgggcagggtattacacgcatccgatgctacagcgggtctgaaaacgctttcccccccgcagggaagaaggcactccccgactgcggggtgcaggaaccccccaaacaggggtttgatatttacatggatgagctagagcagggagatcgcgattcatgtagcgttcgcgagggaatggccttcgaagacgtgtacgaggtggacactggaaccttgaagtctgacctgcatttcctcctggacttcaatactgtatccccaatgttggtagatagttccctgcttagtcagtctgaggatatctctagccttggtacagacgtgatcaacgtcaccgagtatgcagaggagatttaccaatatctgagggaagcagagatcaggcaccggccgaaagctcactatatgaagaagcagcccgatattaccgaaggcatgcgtaccatcctcgtggactggcttgtagaggtcggagaggagtacaagcttagggctgagaccctctacttggcagttaatttcttagacaggtttctctcctgtatgtctgtgttacgggggaaacttcaactcgttggcaccgctgctatgcttcttgccagcaaatacgaagagatctacccccctgaagtggatgagttcgtctacataaccgacgacacttacaccaagaggcagttgctgaagatggaacacctgctgttgaaggtcttggcctttgatctgaccgtgcccaccactaaccaattcctgttgcagtatctaaggcgccagggcgtgtgcgtccgcactgagaatttagctaaatatgttgcagagctcagcctgctagaggcagacccatttcttaagtatctgccctcattgattgctgctgcagctttctgtcttgcgaattacacagtgaataaacacttctggcccgagactctggctgcttttacagggtactccctctctgagatcgtgccttgcctgtcggagttgcataaagcatatctcgacattccgcatagaccacagcaggctatccgggaaaagtataaagccagcaagtacttgtgtgtgagcctaatggaaccgcctgctgtcttactcttgcagtag

SEQ ID NO: 23667 - DNA, 1266 bp, synthetic construct
  misc_feature 1..1266: note = Description of Artificial Sequence: Synthetic coding sequence
  source 1..1266: mol_type = other DNA
atgcactgcagcaaccccaagagcggcgtggtgctggccaccgtggctagagggcccgatgcgtgtcagatcctcaccagggccccacttggccaggatccccctcagcgcactgtcctcggcctccttaccgccaacgggcagtataggcggacctgcggccaggggattactcggataaggtgctacagcgggagtgagaacgcattcccacctgccgggaaaaaagccttacctgactgtggcgtccaagaaccgccaaagcagggatttgacatctatatggatgaactggaacagggagatcgggacagctgcagtgtgcgcgaggggatggcttttgaggacgtctacgaagtggatactgggacactgaagagcgacctgcactttctgctggacttcaataccgtgtctccgatgctcgtggattcctctttactcagccagagcgaggatatcagctctctgggaactgatgtgattaacgtgaccgaatatgccgaggagatttaccaatatcttcgggaagcagagattagacatcgtccaaaagcccactacatgaagaagcagcctgatattactgagggcatgcgaaccatcctcgttgattggctggtagaggtgggagaagagtacaaactacgcgctgaaaccctctatctggccgtgaattttctggacaggtttttaagttgcatgtctgtgctgcggggaaagctgcaactggtaggcaccgctgcgatgcttctcgccagtaaatatgaggaaatatatccccctgaagtcgacgagttcgtttatatcaccgacgacacttatacaaaacggcaactactgaagatggagcatctacttttgaaagtcctggcctttgacttgaccgtccccaccaccaatcagttcctgttacaatatttgcggcggcagggagtgtgtgtaaggacagaaaacctcgccaaatatgtggcagaattatctctcttggaggccgatccgtttctgaagtatctgccatctctgattgccgctgctgccttttgccttgccaattacactgttaacaagcatttctggccggaaaccctggctgcattcaccggctactcattatccgagatagtgccttgcctatccgaactccacaaggcctacctggacattcctcataggccacagcaagccatccgggagaagtataaagcctccaagtacctttgtgtgagtttaatggagccgcctgctgtgctgctactacagtag

SEQ ID NO: 23668 - DNA, 1266 bp, synthetic construct
  misc_feature 1..1266: note = Description of Artificial Sequence: Synthetic coding sequence
  source 1..1266: mol_type = other DNA
atgcactgcagcaaccccaagagcggcgtggtgctggccaccgtggccagaggccctgatgcctgtcaaattttgactcgggcccctttgggtcaggatcctcctcagcggacagtgcttggactcctcacagccaacggacaataccggagaacatgtggccagggcatcaccagaatccgctgttacagcggctccgagaacgccttccctccagccggcaagaaggcactgcccgattgtggagttcaggagccccccaagcaggggttcgacatttacatggatgagcttgagcaaggcgacagggacagttgttcggtgagggagggcatggcctttgaggatgtttatgaggttgacaccggcaccctcaagagcgatctgcattttctgctcgactttaatacagttagtcctatgctggtcgatagctccctgttgtcacaaagcgaagacatctcttcactcggcacggacgtcataaatgtgacggaatatgccgaggaaatttaccagtatctgagggaggctgagatccggcaccgacccaaggcacactacatgaagaagcaaccagatatcacggagggtatgcgcaccattctcgtggactggctggtcgaagttggagaggagtacaaacttcgtgctgagaccttgtacttagcagttaactttctggaccgtttcctgtcttgcatgtccgtactgagagggaagctgcagctggtgggtaccgctgccatgcttttagcaagcaagtacgaggaaatttatcccccggaggtagatgagttcgtttatatcacggatgacacttatacaaagagacaactgttgaagatggaacacctccttctgaaagtcctagcctttgacctgactgtgccaacaaccaaccagttcctgctgcagtaccttcgcagacagggtgtctgtgtcaggactgaaaacctcgccaagtacgtagcagagctcagtcttttggaggccgacccgtttctcaaatatctcccctcactgatcgccgccgcggccttctgcctggcaaactacactgtaaataagcatttttggcccgagactttggccgctttcactggatactcccttagtgagatcgtgccttgtttaagtgaactgcacaaggcgtatctcgatattcctcacaggccacagcaggccataagggaaaaatacaaggcaagtaagtatctgtgtgtgtctcttatggagcccccagcggtgctgttactccagtag

SEQ ID NO: 23669 - DNA, 1299 bp, synthetic construct
  misc_feature 1..1299: note = Description of Artificial Sequence: Synthetic coding sequence
  source 1..1299: mol_type = other DNA
atgctgggcaacagcgcccccggccccgccacccgggaggccggctccgccctactggcccttcaacaaactgcactacaggaggaccaggaaaatattaatccagagaaagctgctcccgttcagcagccacgaacccgagccgccctcgcagtgctgaagagtggaaatccacgaggcctggcccagcagcagaggcctaagacccggcgcgttgctccacttaaggatctaccagtgaatgatgaacacgttacggtgcctccatggaaggccaatagcaagcagcccgcattcacaatccacgtggatgaggcagaaaaagaagctcagaaaaagccggctgagagccagaagatcgagcgagaagatgcgctcgccttcaactccgcaatttcactgcctggaccgcgaaagcctctcgtccctctcgattatcccatggacgggtccttcgagtcaccccatacaatggatatgtctattatacttgaagatgaaaagccggtaagcgtaaatgaagtgcctgactatcatgaggacatccacacttacctgagggagatggaagtcaaatgcaaacctaaggttggatacatgaaaaagcagccagacatcactaacagcatgcgagccatcctggtggactggttggttgaggttggcgaggagtacaagttacaaaacgaaaccctgcacttagcagtgaattatattgatagatttctgtccagtatgtcagtcctgagaggtaagctacagctggtgggcaccgcagccatgttgctggcttccaaatttgaagagatatatcctccagaagtagcagaattcgtttacatcactgacgacacgtatactaagaagcaagttcttcgaatggaacacttggttttgaaggttttgacatttgatttggccgccccaaccgtcaaccagtttttgacccagtattttctgcaccagcagccagctaactgtaaggttgagagcttagccatgttcctgggagagctgtccttgatcgatgcagacccctatctaaaatacctaccaagtgttatagctggggcagctttccacttagccctttatactgtgaccggacagagttggcctgagagcttaatccgcaaaacagggtacacgctcgaatcgttaaagccgtgtctgatggaccttcatcagacctatttaaaagcacctcaacacgcccagcagtctatccgggagaagtataaaaactcaaagtatcacggtgtttcgctccttaacccaccggaaactctcaatttatag

SEQ ID NO: 23670 - DNA, 1302 bp, synthetic construct
  misc_feature 1..1302: note = Description of Artificial Sequence: Synthetic coding sequence
  source 1..1302: mol_type = other DNA
atggccctgcgggtgacccggaacagcaagatcaacgccgagaacaaagcgaagataaatatggctggggccaaaagagttcccaccgccccggcagccacttccaagcctggcctgagaccccggaccgcactgggcgatattgggaacaaggtgtctgaacagcttcaggccaaaatgcctatgaaaaaggaggccaagccatccgcaaccggaaaagtgatagataaaaagctccctaagcctctagagaaggtgccgatgctggtgcctgtgccagtttcagaacccgtgccagagcctgagccggaacctgaacctgagccggtcaaggaggagaagttaagtcctgagccaatcctggtggataccgcctcgccatcccccatggagaccagcggctgtgctcccgctgaagaggacctctgtcaggccttctctgacgtcatcttagcagtgaacgatgtggacgctgaggacggggcagatcccaacctttgttcagaatacgtcaaagacatctatgcctacctccggcaattggaggaagagcaagccgtcaggccaaagtacctgctaggacgcgaagtgactgggaatatgagagcaattttgattgattggctggtgcaggtccaaatgaagtttagattactgcaagaaaccatgtacatgacggttagtatcatagacaggttcatgcaaaacaactgcgttcccaaaaagatgctgcagctggtgggcgtgactgcgatgtttatcgcgtccaaatacgaggaaatgtaccctcctgagatcggcgacttcgccttcgtcaccgataatacgtacacaaagcatcagatcagacagatggagatgaaaatccttagggccttgaacttcggtctgggtcggccacttcccctacactttctgaggagagcatccaagatcggcgaagttgacgtggaacagcatacactggcgaagtacctcatggaattaacaatgctagattatgacatggtgcacttccctccttcgcagatcgctgcaggagccttctgtctggcccttaaaatcttagataacggagagtggacacctacgttacagcactacctctcgtacaccgaggaatctttactgcctgtgatgcagcatcttgctaaaaacgtcgtcatggtgaatcaggggctcaccaagcatatgacagtcaagaacaagtacgccacatcaaagcacgccaagatctccacattgccgcagttgaactcagccctcgtgcaggatctagccaaggccgtggccaaggtatag

SEQ ID NO: 23671 - DNA, 1191 bp, synthetic construct
  misc_feature 1..1191: note = Description of Artificial Sequence: Synthetic coding sequence
  source 1..1191: mol_type = other DNA
atggccctgcgggtgacccggaacagcaagatcaacgccgagaacaaagctaagatcaatatggctggtgctaagcgggttcccactgctcccgctgctacttctaaacccggcctaagaccgcgaaccgccctgggcgacatcggaaataaagtcagtgagcagctgcaagccaagatgcctatgaagaaagaagccaagcctagcgctacaggtaaggtaattgacaaaaagcttcccaaacccctggagaaggtgcccatgctggtgccagtgcctgtgagcgagcctgtccctgagcctgagcccgaaccggagcctgagccagtgaaagaggagaagctgagccccgagccaatcctggtcgataccgcctctccgtcgccaatggagacttctggctgcgcccctgctgaggaagacctctgccaggcctttagcgatgtgatcctggctgtcaatgatgtggacgctgaagacggtgctgatccaaacttgtgcagcgaatatgtgaaggatatctatgcttacctgagacaacttgaagaggagcaggctgtcagacctaagtacctgctggggagagaggtaaccggtaacatgagggccatactcatcgactggctggtacaggtccaaatgaagtttagactgctgcaggagacaatgtacatgacggtgagcatcattgaccgattcatgcagaataattgtgtgccaaaaaagatgctccagttagtgggggtgactgctatgttcatcgcatcaaaatacgaggagatgtatcctcccgagatcggagattttgcttttgtgactgataacacatacacaaaacaccaaattagacaaatggaaatgaagattctgcgtgcactcaattttggcctaggacgccccctgcccctgcattttctccggcgggcgtccaagattggagaggtggatgtcgaacagcatactctcgccaagtatctaatggagttgactatgctggactacgatatggtgcatttcccgcccagccagatcgccgcgggcgctttctgtctggctttaaagattttggacaatggggagtggacagtgaaaaacaagtacgcgacatccaaacacgcaaagattagcactcttcctcagctcaattccgcgctggtccaggatcttgccaaggctgtggctaaggtttag

SEQ ID NO: 23672 - DNA, 1206 bp, synthetic construct
  misc_feature 1..1206: note = Description of Artificial Sequence: Synthetic coding sequence
  source 1..1206: mol_type = other DNA
atggccctgcgggtgacccggaacagcaagatcaacgccgagaacaaggcgaagattaacatggccggtgctaagcgtgttccgacagcgcctgcggctacaagcaagcccggtttacggcctcgtacagccttgggcgacattggaaataaggtgtcagaacagctacaggcaaaaatgcctatgaagaaggaggctaagccttcagcaaccggaaaagtcattgataagaagctccctaaacctctggagaaagtcccaatgctggtacccgtgcctgtgagcgaacccgtgcccgaacccgaacctgagccggagcccgagcccgtaaaagaggagaaactgtccccagagcctatactcgtggacactgccagtccctcccctatggagacctctggttgtgcccctgccgaggaagatctttgccaggcattcagcgacgttatcttggccgtgaatgatgtggacgccgaggacggagctgacccaaatctgtgtagtgagtacgtgaaagacatttatgcctacctgcgccagctggaagaggaacaggcagtcagacccaagtacctgctcggcagagaggtgaccggcaatatgcgtgctatcttgatcgactggctagttcaagtccagatgaaatttaggctgctgcaggaaacaatgtacatgacagtcagcatcattgacaggtttatgcagaacaattgtgtccccaaaaaaatgctgcagctcgtcggggtgactgcaatgttcattgcttccaaatatgaagaaatgtatccaccagagattggagactttgcattcgtgacagacaatacctacacaaagcatcaaatacgtcagatggagatgaaaatcctgcgagccctgaatttcggcttggggcgcccgctgcccctgcactttctgcggagggcctccaagataggcgaagtcgacgttgaacagcacacactggctaaatatcttatggagcttacaatgcttgattacgatatggtgcactttccacccagccagatcgctgcgggcgcgttctgcctggccctgaagattctcgataatggagagtggacgccgaccttgcagcattatctcagctacaccgaggaaagcctcctgcccgttatgcagcatctggcaaaaaacgtggtgatggttaatcagggactgactaagcatatggtcagccaatag

SEQ ID NO: 23673 - DNA, 1197 bp, synthetic construct
  misc_feature 1..1197: note = Description of Artificial Sequence: Synthetic coding sequence
  source 1..1197: mol_type = other DNA
atggccctgctgcggcggcccaccgtgagcagcgacctggagaacattgacaccggcgttaattccaaggtcaagagtcacgtgaccatcaggcggaccgtgttggaggagattgggaacagggttacaactcgagcagctcaggtcgctaaaaaagcccagaatacaaaggtgcctgtccaaccaactaagaccacgaacgtgaacaagcaactgaaacctactgcatctgtaaaacccgtgcagatggagaagctagcgccgaaaggcccttctcccacccctgaagatgttagtatgaaagaggagaacctttgtcaagctttttctgatgctcttctgtgcaaaatcgaagatattgacaacgaggattgggaaaatccccagctttgcagcgattacgtgaaagacatctaccagtacctacgtcagctggaagtgctccagagtattaaccctcattttctggacggccgggacataaatggcaggatgcgagctattttagtggactggctggtgcaggtacattctaagttccggttgctacaggaaactctgtatatgtgcgtgggaattatggatcgctttctccaggtgcagccagtgagtcgcaagaagcttcaactggttgggattaccgcgcttctgctcgcgagcaaatacgaggagatgttcagtcctaatatcgaggattttgtctacattactgacaacgcctacacctccagccagatcagagagatggaaacactgatcctcaaagaactaaaatttgagctaggccgccccctgcctctccatttcctgcggagggcaagcaaagctggagaagtggacgtcgaacagcacacgctggccaaatatctcatggagctaacactcatcgattacgatatggtgcattaccatccatccaaggtggccgctgccgcctcatgtctgagccagaaggtgctcgggcagggaaagtggaacctgaaacagcagtactacacaggctacactgagaatgaggtcctggaggtgatgcaacacatggcaaagaacgttgtgaaggtcaatgagaatctgacaaagttcatcgctataaagaataaatatgcttcttcgaagctgcttaagatcagcatgatccctcagctgaactctaaagccgttaaggatctggcgtccccgttaatcggtcggtcatag

SEQ ID NO: 23674 - DNA, 432 bp, synthetic construct
  misc_feature 1..432: note = Description of Artificial Sequence: Synthetic coding sequence
  source 1..432: mol_type = other DNA
atggccggcaacttctggcagagcagccactacctgcagtggatccttgataagcaggatctcctgaaggaaaggcagaaggatctgaagttcttgagtgaggaagaatattggaagttgcagatcttttttaccaacgtcattcaagctttgggggaacatctgaaactgcgtcagcaagttatagcaaccgccactgtttacttcaagcgcttttacgctagatattcactgaagtccattgaccctgtgctcatggcccccacttgcgtgtttctggcctcaaaggtggaggaattcggagtcgtgtctaatacacgattaatcgcggctgcaacctctgtttgcaagtgtaagaagtacatatgctttaaagacgtgatactaaaaaaggctcccgagtatatagattttttcttctttagtctctag

SEQ ID NO: 23675 - DNA, 852 bp, synthetic construct
  misc_feature 1..852: note = Description of Artificial Sequence: Synthetic coding sequence
  source 1..852: mol_type = other DNA
atggccggcaacttctggcagagcagccactacctgcagtggatcctggataaacaggacttactgaaagaacgacaaaaggatctgaagttcctgagcgaggaggaatactggaagttacagatcttcttcacaaatgtgattcaggcattaggcgagcacttaaagctgcgccagcaggtaatcgctactgcgacagtgtactttaaaaggttttacgcccggtattccctgaagagcatcgacccggtcctgatggcgccaacgtgcgtttttctcgccagcaaagtggaggaatttggggtggtgtcaaatacgaggttaatagccgctgccaccagtgtgctcaaaactcgtttcagctacgccttccccaaggaattcccttaccgtatgaatcatatcctggagtgtgaattttacttactcgagctgatggactgctgcctaatagtctatcacccataccggccactgttacagtatgtacaggacatggggcaagaagacatgctgcttcctctggcctggagaattgttaacgacacgtaccgcaccgacctctgcctgctgtatcctccatttatgattgctctcgcttgtctacatgttgcttgtgtagtgcaacaaaaagacgcgaggcagtggttcgcagagcttagcgtggatatggagaaaatcctcgagattatccgagtgatcttgaaactgtacgaacagtggaaaaacttcgacgagcggaaagagatggcgaccatcctgtccaagatgccaaagcccaaacctccacccaactccgagggcgaacagggccccaatggtagccagaactctagctatagccaatcctag

SEQ ID NO: 23676 - DNA, 597 bp, synthetic construct
  misc_feature 1..597: note = Description of Artificial Sequence: Synthetic coding sequence
  source 1..597: mol_type = other DNA
atggcccccacctgcgtgttcctggccagcaaggtggaggagttcggcgtcgtctcaaacactcggcttatcgccgcagccacaagcgtgttaaagacccgcttttcttatgcatttcccaaagagtttccctaccggatgaaccatatcttggagtgcgagttttatctgcttgagctgatggattgttgtctaatcgtgtaccatccctaccggcccttacttcagtacgtgcaggatatgggacaagaggacatgctgttacctttagcatggcggatcgtcaacgatacctatcggacagatctctgtctgttatatccaccgttcatgatcgctctcgcctgcctccatgtggcatgcgtcgtccagcagaaggatgctcggcagtggtttgccgaactctcggtggacatggagaaaatcctcgaaattatccgtgtgattctgaaactgtacgaacagtggaaaaattttgacgagagaaaggagatggccaccattctctcaaagatgcccaagccaaaacctccgccaaacagcgagggggagcaggggcccaatggaagtcagaacagctcatactctcagtcctag

SEQ ID NO: 23677 - DNA, 597 bp, synthetic construct
  misc_feature 1..597: note = Description of Artificial Sequence: Synthetic coding sequence
  source 1..597: mol_type = other DNA
atggcccccacctgcgtgttcctggccagcaaggtggaggagttcggggtggtctcaaacacacgcctcatcgccgcagccacatctgtgctgaagacgaggttttcatacgcattccccaaagagtttccataccgtatgaaccacattctcgagtgtgaattctacctgctagaattgatggactgctgtttgattgtttaccacccctacagaccattacttcagtatgtccaagatatgggccaggaagacatgttactaccactcgcttggcgtatcgtaaacgacacgtatagaacggacttatgcctgttgtatcccccatttatgatcgccctcgcatgtctgcatgtcgcatgcgtggtccagcagaaagatgcgagacagtggttcgccgaactgagcgtggacatggaaaaaattttggagatcattagggtgattctgaaattgtacgagcaatggaaaaatttcgatgagaggaaagagatggccaccatcttaagcaaaatgccaaaacccaagccgccgccaaattcggagggggagcaaggccccaatggctctcagaattcctcttatagtcagtcttag

SEQ ID NO: 23678 - DNA, 489 bp, synthetic construct
  misc_feature 1..489: note = Description of Artificial Sequence: Synthetic coding sequence
  source 1..489: mol_type = other DNA
atggcccccacctgcgtgttcctggccagcaaggtggaggagttcggcgtcgtgtccaacacacgactgatcgccgcggccactagcgtgctgaaaactaggttttcctacgcatttccaaaagagttcccttataggatgaaccatatcctcgagtgtgaattctatctgctggagttaatggattgctgtctcatcgtgtaccacccctacagacccctgcttcagtacgtgcaggatatgggtcaagaggacatgctgttgccgctggcgtggagaattgttaatgacacctataggacagacctgtgtcttctgtacccgccctttatgattgccctggcctgcctccacgttgcatgcgtcgtccagcagaaggatgcccggcagtggttcgccgagctgtcggtcgatatggaaaagattctcgaaatcatacgggtgatccttaagctttatgagcagtggaagaacttcgacgaaaggtag

SEQ ID NO: 23679 - DNA, 2283 bp, synthetic construct
  misc_feature 1..2283: note = Description of Artificial Sequence: Synthetic coding sequence
  source 1..2283: mol_type = other DNA
atgagcaccgtggaggaggacagcgacaccgtgaccgtggagaccgtgaacagcgtgacgctcacccaggacaccgaggggaatctgattctgcattgcccacagaacgaagcggacgagatcgactccgaagactctatcgaacctccacacaaaaggctctgcttatccagtgaagatgaccagtccatagacgactccaccccttgcattagcgtggtcgcattgcctttgtctgaaaatgatcaatcttttgaagtaaccatgaccgccaccacggaggttgctgatgacgaggtcaccgaaggcactgtcactcagatccaaatcctacagaatgaacagctggatgagatttcccccctgggcaacgaggaggtgtctgctgtatcccaggcatggtttacaacgaaagaggacaaagatagcctgactaataagggtcacaagtggaagcaggggatgtggagcaaagaggagatcgatatactcatgaataatattgagcgatacttgaaggctcgggggattaaagatgcaacagagatcatcttcgagatgagtaaggacgaaagaaaagatttctacaggaccatagcctggggactcaatcggccgcttttcgcagtataccgtcgggtcttgcgaatgtacgacgacaggaaccacgtcggaaaatatactccagaagaaatcgaaaaactgaaggagctgcggatcaagcatgggaatgattgggccactatcggagccgctttaggcaggtcagcctcgtcagtcaaagatagatgtcgcttaatgaaggacacctgcaataccggaaaatggacagaggaagaagagaaacggttggcggaggtggttcacgaactgacttctactgagccaggcgacatcgttacccagggggtatcctgggcagctgtggccgagcgagtgggcacacgctcagaaaaacagtgtaggtcaaagtggctgaattacctcaactggaagcagagcgggggtactgaatggaccaaggaggatgagatcaatttgatcctcaggatcgccgagttggacgtggccgacgaaaatgacataaactgggaccttttggccgagggttggtcctccgtgcggtctcctcaatggttacggagtaaatggtggaccattaaaagacaaatcgcaaaccacaaggatgtaagctttcccgtgcttattaaaggcctgaagcaactacatgaaaatcagaaaaacaatccgacgcttctggagaacaagtccgggtctggcgtgcctaactctaacacaaattcatctgtccagcacgtccagataagagtggcacggctggaggacaacaccgccatcagctcatcccctatggccgccctgcagattccagtgcagatcacccatgtgtccagcgccgattcaccagctactgtggattccgaaacaatcactctcaacagtgggacgctccagacctttgagatcctcccctcttttcacctacagcctacagggacccccggcacgtatctcctgcaaacctcatcaagtcagggtctgcccctgactctcacagcgagccccaccgtgaccctgactgccgcggcccctgccagccctgagcagattatcgttcatgcactctcccccgaacacctccttaatacatccgacaacgtgacagttcagtgtcatactccccgggtgattattcagacagttgctactgaggacatcacgtccagcatctctcaagcggagttaaccgtagatagcgacattcagagctccgatttccctgaacccccagatgctctggaggccgacacattccctgacgagattcaccaccccaaaatgacagtggagccctcctttaacgatgcccatgtgagcaaatttagtgatcagaacagcaccgagcttatgaacagcgtcatggtgaggaccgaggaggaaatcagtgatacagacctgaagcaagaggagtccccgtctgatctggcctcggcctacgtgaccgaaggactggagagccctacgatagaggagcaggtcgaccagacaatagatgatgagacgatactcatcgtgccatccccccatggctttattcaggcctctgacgtcatagacacggagagcgtgcttcccctgactacattgactgatcccattctacagcatcaccaagaagagtccaacattatcggatcttcgctgggctctcctgtcagcgaggattccaaagacgtggaggatctggtcaattgccattag

SEQ ID NO: 23680 - DNA, 858 bp, synthetic construct
  misc_feature 1..858: note = Description of Artificial Sequence: Synthetic coding sequence
  source 1..858: mol_type = other DNA
atgagcaccgtggaggaggacagcgacaccgtgaccgtggagaccgtgaacagcgtgaccttaacgcaggacaccgaaggaaacctgatcctgcattgccctcagaacgaagctgacgaaatcgattccgaagattccattgaacccccccataagcgattatgcctttcctcagaagacgatcaatcgattgacgattctacgccctgcatcagcgtggtggctttaccactcagtgaaaatgatcagtcatttgaggtgactatgacagcaacaaccgaagtcgctgacgatgaggtcaccgaaggtaccgtgactcaaattcagatactgcagaatgagcagttagatgagatttcgcccctggggaatgaggaggtatctgctgtctctcaggcctggtttaccaccaaagaagacaaggactctctgaccaataagggtcataaatggaaacagggaatgtggagtaaggaagagatcgacatactgatgaataatattgaacgctacctgaaggcgaggggtatcaaggatgctacggaaatcatttttgaaatgagtaaggatgaacgtaaggacttctaccggaccatcgcatgggggctgaatcgccccctgtttgccgtctacagacgagtactgcgtatgtatgatgacagaaaccacgtgggaaagtatactcctgaggaaattgagaagctgaaggagaaaaaagccatcgccgcctgcttcttcttcacacatagacagctctggaccccaaagaaaggacatacctttaaactctggttaagtaaatactgctgtccacagctgcctaaccagtcaaatggcaaaaaaaagaatgaggaatag

SEQ ID NO: 23681 - DNA, 2283 bp, synthetic construct
  misc_feature 1..2283: note = Description of Artificial Sequence: Synthetic coding sequence
  source 1..2283: mol_type = other DNA
atgagcaccgtggaggaggacagcgacaccgtgaccgtggagaccgtgaacagcgtaactctaactcaggacaccgagggcaacctgattttgcattgtccccagaacgaggccgacgagattgattccgaggactctatagagccaccccataagagactgtgtctgagtagcgaggacgatcagagcatcgacgactctactccttgcatttcggtggtcgccttgcctctcagtgagaatgaccagagcttcgaggtgacaatgaccgccaccactgaggttgccgacgatgaagtgaccgagggtactgtcactcagatccagatcctgcagaacgaacagcttgacgagattagtcccctcgggaacgaagaggtgtccgcagtttctcaggcctggttcaccacaaaagaggacaaggactctctcacaaacaaaggccacaagtggaagcagggaatgtggtcaaaagaagaaattgacatccttatgaacaacatcgagagatatctgaaagcccggggcattaaagacgcaacggagataatcttcgaaatgtcaaaagatgaacggaaggacttttatcggaccatcgcgtgggggttgaacaggcccctgtttgcggtataccgtcgcgtgctccggatgtacgacgacagaaaccacgtgggtaaatacacaccagaggaaattgagaagctgaaggagctgcgtataaagcatggcaacgattgggccacgatcggagcagcgctggggagaagtgcttccagtgtcaaagaccggtgcaggctgatgaaagacacatgcaacactggaaaatggactgaggaggaagaaaagaggctggcagaggtggtccatgagcttacctctacagagcccggcgacatagtcacccaaggagtgtcatgggctgcggtggcagaaagggtgggaacccgcagtgaaaaacagtgtcgatccaagtggctgaattacctcaattggaaacagtcgggcggaaccgagtggaccaaggaggatgaaattaacctgattctcaggattgcagaacttgacgtcgctgacgaaaatgacattaactgggatctactggccgagggttggtctagtgttagatccccacagtggttgaggtcaaagtggtggaccatcaaacgccaaattgccaaccacaaggatgtatctttcccagtcctgatcaaaggcctcaaacagttacacgagaatcagaagaacaacccgacccttctcgagaataagagtggttctggcgtccccaacagcaacaccaactcttctgtgcaacacgtgcagatcagagttgcccgtctcgaagacaatacagccatcagctctagccctatggctgccctgcaaattcccgtgcagatcacacatgtatcctctgccgattctccagctaccgtggactcagagacaatcacccttaacagcggtacactgcagacattcgaaattctgccgagctttcacctgcagccgaccggcacaccaggtacctacctgctccaaacatccagcagtcaaggcctccctctgactttgacggcatctccaaccgttacactcacagccgctgcgcccgcatcccctgagcagattattgtacatgccttaagccctgagcacctgctcaacacttctgataacgtgacagtgcagtgtcacacccccagggtaattatccagactgtggctaccgaagatataacatccagtatctcccaggccgagctgactgtggactcagatatccaatcttcggatttccccgaaccacccgatgccttagaggcagatactttccctgacgaaatacaccaccctaaaatgacagtggagcctagtttcaacgacgcccatgtttccaaattttccgaccaaaacagcaccgaactgatgaacagcgtgatggttcgtaccgaagaggaaatctccgacaccgatcttaaacaagaggaaagcccttctgacctcgcctcggcctacgtcacggagggcctcgagagtcccacaatcgaagaacaagttgaccagacaatcgatgacgaaactattttgatcgtgcccagtccacacggattcatccaggcaagcgacgtaatagatactgagtctgttctgcctctgaccacattaactgatccaatcctacagcaccatcaggaagagtcaaacataatcggatcttccctgggctcccctgtgagtgaagacagtaaggacgtggaagatttggtgaattgtcactag

SEQ ID NO: 23682 - DNA, 735 bp, synthetic construct
  misc_feature 1..735: note = Description of Artificial Sequence: Synthetic coding sequence
  source 1..735: mol_type = other DNA
atgagcaccgtggaggaggacagcgacaccgtgaccgtggagaccgttaactctgtaactctgacacaggacaccgaggggaatctcattctacattgcccacaaaatgtatccgagaacgatcagtcttttgaagtaaccatgacagccactaccgaagtcgcggacgatgaagtgaccgagggcaccgtgacccagatccagatccttcagaatgaacagttggacgagatctcccctcttggcaatgaagaagtgagcgccgtctcgcaggcctggttcactactaaggaggacaaggactccctcacaaataaggggcacaaatggaagcaaggcatgtggagtaaggaggaaatcgatatacttatgaataacatcgaaagatatctcaaggcgaggggaataaaggacgccactgagatcatatttgagatgagcaaagatgagcggaaggatttttacaggaccattgcttggggtttaaatagacccctttttgcagtctacaggagggtgctcaggatgtatgatgacaggaaccacgtggggaaatataccccagaggagatcgaaaaacttaaggaaaagaaagccattgctgcgtgctttttctttactcaccgccagctgtggactccaaaaaagggccacacgttcaagctgtggctgagcaagtactgctgcccccagttacccaaccagagtaacggcaagaagaagaatgaggagtag

SEQ ID NO: 23683 - DNA, 819 bp, synthetic construct
  misc_feature 1..819: note = Description of Artificial Sequence: Synthetic coding sequence
  source 1..819: mol_type = other DNA
atgagcaccgtggaggaggacagcgacaccgtgaccgtggagaccgtaaatagcgtgactctgacccaggatactgaagggaacctcatcctgcattgtcctcagaacgaggctgatgagatagattctgaagattccatagaaccacctcataagcgactgtgtctttcttccgaggatgatcagagtatcgacgacagtacgccttgtatttccgtggttgcattgccactgagcgagaacgaccagtcgttcgaggtcaccatgaccgccacaacagaggttgcggatgacgaggtcaccgagggaacggtgactcagatccaaatcctgcagaatgagcagctggacgaaatcagccctctgggaaacgaagaggtgtcagccgtaagtcaagcttggttcaccactaaggaggacaaggactcactgactaacaagggacataagtggaaacagggcatgtggtccaaagaggaaatcgacatcctgatgaataacattgagaggtacctgaaggccagaggaataaaggacgcaactgagataatattcgagatgtccaaagacgagcggaaagacttttaccgaacgatcgcttgggggctgaacagaccgctgtttgcagtgtaccgccgcgtcctcaggatgtatgatgatagaaatcatgtaggtaaatacactcccgaggaaatcgagaaattgaaagagcagctctggacgccaaagaagggccatacattcaaactttggctgagtaaatattgctgtccccaattgccaaaccaatcaaatgggaagaaaaaaaacgaggaatag

SEQ ID NO: 23684 - DNA, 2073 bp, synthetic construct
  misc_feature 1..2073: note = Description of Artificial Sequence: Synthetic coding sequence
  source 1..2073: mol_type = other DNA
atgagcaccgtggaggaggacagcgacaccgtgaccgtggagaccgttaattctgtgacgttgacccaggatactgaaggtaacttaattctccattgcccacagaacgaggccgatgagatcgatagcgaagattctattgagcctccgcataagcgactgtgtctgagctccgaagatgatcagtccatcgatgattccacaccttgcattagcgtggtcgctcttcctttgagcgagaatgaccagagtttcgaagtgactatgactgcaactaccgaggtggccgacgacgaggtgaccgaaggaactgttacccaaattcaaatcttgcagaatgagcaattagatgaaatcagtccgcttggcaacgaagaagttagcgctgtgtcacaagcatggttcacgaccaaagaggataaggatagccttacgaataaggggcacaagtggaagcagggtatgtggtctaaagaagaaatcgatattctgatgaacaatatcgaaagatatctgaaagctcggggcattaaagatgccactgagatcatttttgaaatgtctaaggacgagcgtaaagacttttaccgaactatcgcgtggggacttaatcgcccgctcttcgctgtgtaccggagggtgcttaggatgtacgacgatagaaaccatgttggaaaatacactcctgaagagatcgagaagcttaaggaactcaggataaaacatggcaatgattgggctactatcggcgctgctctcggtagatcagccagttcagtaaaagaccggtgtaggctaatgaaggatacctgcaacactggcaagtggactgaagaggaggagaagagactggctgaagtcgtgcacgaattaacgtccaccgagccaggggacatcgtgacacagggtgtgtcttgggctgcagtggctgagcgggtcggtaccaggtctgaaaaacaatgtagatctaaatggcttaattacctcaattggaagcagagcggcgggaccgaatggactaaagaggatgaaatcaacttaatccttcggattgccgaattggatgttgccgatgagaatgacatcaattgggatctgctggcagaggggtggtcttcagtcagatctccacagtggttaaggtcaaaatggtggaccattaagagacagatcgccaaccacaaggatgtctcctttccagcctccgcagattcgccagccaccgttgattcggaaacgattacacttaatagcgggacgctacagacttttgaaatcctgccatcattccatctgcagcccacaggaacacctggaacatacctgttacagacttccagtagtcaggggctaccgctaacactgacggcctccccgacggtcacactgaccgctgctgcccccgcatccccagagcagattatcgtgcacgccctgtctcctgaacacttgcttaacacctccgacaatgtaactgtgcagtgtcacacccccagagttatcatccagacggtcgcgaccgaggatatcacatccagcatctcacaggctgaactcacggtggacagcgacattcagtcctccgatttcccagagccaccggacgccctagaggctgacaccttccccgatgagattcatcacccgaaaatgaccgtagaaccgagcttcaacgacgcccatgtcagcaaattctccgaccagaacagcactgagctgatgaatagcgtgatggtgcggaccgaagaggagatcagcgacaccgacctgaagcaggaggagagccctagcgatctggcaagtgcctatgtgacggagggacttgagtccccaacaattgaggaacaggtggaccagactatcgacgatgagacaatactcatcgtcccctccccccacggatttatccaggcatcagacgtcatagacactgagtccgtgctgcctttaactactctaactgatccgatattacaacaccaccaggaagagtccaatatcattggcagtagcctgggaagtcccgtgtccgaggactccaaagatgtcgaggacctggtgaattgtcattag

SEQ ID NO: 23685 - DNA, 1485 bp, synthetic construct
  misc_feature 1..1485: note = Description of Artificial Sequence: Synthetic coding sequence
  source 1..1485: mol_type = other DNA
atgaaggacacctgcaacaccggcaagtggaccgaggaggaggagaaacgtcttgccgaagtagtgcatgaactgacgtctacagaaccaggcgacatagtaactcaaggcgtaagttgggctgctgtggcagagagagttgggacaagatcagaaaaacagtgtagaagtaagtggttaaattatctgaactggaaacaatctggcggaactgaatggacaaaggaggatgaaatcaacttgattcttagaattgcagaactggatgtggccgatgaaaatgacattaactgggacctcttggccgagggctggtccagcgtgcgcagcccccagtggcttaggtcgaaatggtggacgatcaaaaggcaaatcgcaaatcataaagacgtatcttttcctgtgctgattaaaggtttgaaacagttgcacgagaatcaaaagaataaccctacactcctagaaaataagtccggctctggggtccctaactctaacactaattcaagtgtccagcatgttcaaatcagggtggcccgcctcgaggacaatacagccattagtagctctccaatggctgccctgcagattccggtgcagatcactcacgtgtcaagcgctgattcgccagcgaccgtggacagtgaaactatcaccctgaactctgggacactgcaaacattcgaaattttacccagcttccatttgcagcccactgggacccccggcacatacctgctgcagactagttccagtcaaggacttcccctcaccttgactgcctcccctaccgttaccttgacggcagctgcccctgcctctcctgaacaaattattgtgcacgccctgtccccagaacaccttttgaacacatctgacaacgtcacagtacagtgtcatacaccgagagtgataatacagactgtagcaacagaggatatcactagtagcatttctcaggcagaactcacagtcgactctgacattcagtcttctgactttccagagcctcctgatgccctggaggctgacaccttccctgacgaaattcatcaccctaaaatgaccgtcgaaccttcctttaacgatgcccatgtaagcaaattttccgaccagaactctaccgagctgatgaatagcgtgatggtgagaactgaggaggaaatttcagacaccgatttaaagcaggaagagtcaccctctgaccttgcgagcgcttatgtcacagagggtctggaatcccctacaatcgaggagcaggtggatcagaccattgacgatgagacaatactcatcgtaccctccccacacgggttcattcaggcctctgatgtcattgataccgagtcagtcttgccactcaccacattaacggatcccattctgcaacaccatcaggaggagtctaacatcatcgggtcgtctctcggtagtccagtaagcgaggactctaaggatgtagaggacctggttaactgccattag

SEQ ID NO: 23686 - DNA, 111 bp, synthetic construct
  misc_feature 1..111: note = Description of Artificial Sequence: Synthetic coding sequence
  source 1..111: mol_type = other DNA
atgagcaccgtggaggaggacagcgacaccgtgaccgtggagaccgtgaattccgtcacacttactcaggacaccgagggcaacctgattctccactgccctcagaactag

SEQ ID NO: 23687 - DNA, 33 bp, synthetic construct; identical to SEQ ID NO: 10223
  misc_feature 1..33: note = Description of Artificial Sequence: Synthetic coding sequence
  source 1..33: mol_type = other DNA

SEQ ID NO: 23688 - DNA, 111 bp, synthetic construct
  misc_feature 1..111: note = Description of Artificial Sequence: Synthetic coding sequence
  source 1..111: mol_type = other DNA
atgagcaccgtggaggaggacagcgacaccgtgaccgtggagaccgtcaactctgtgacactgacacaggacactgaagggaatctgatcttacactgccctcaaaattag

SEQ ID NO: 23689 - DNA, 735 bp, synthetic construct
  misc_feature 1..735: note = Description of Artificial Sequence: Synthetic coding sequence
  source 1..735: mol_type = other DNA
atgagcaccgtggaggaggacagcgacaccgtgaccgtggagaccgtcaatagtgtgacccttacccaggatactgagggcaacctcattctgcattgcccccagaacgtgtctgaaaatgatcaaagcttcgaggttacaatgactgccaccactgaagtagctgatgacgaggtcaccgaaggtaccgtgacccaaattcagatcctgcaaaatgagcagctggacgagattagcccactcggtaacgaagaggtgtccgctgtctcccaagcatggtttacaacgaaggaggacaaggacagtctcaccaataaagggcacaagtggaagcagggaatgtggtctaaagaggagatcgatattctgatgaacaatatcgagcggtacttgaaagcacgggggatcaaggacgcgactgaaattatttttgaaatgagcaaagacgaacgtaaagacttctatcgcaccattgcctggggcttaaacaggccgctctttgcggtttaccggagagtgctgcggatgtatgatgaccgcaaccatgtgggaaaatacacacccgaggagatcgagaagttgaaagagaagaaggctattgctgcttgtttttttttcacgcacaggcagctgtggacccccaagaaagggcatactttcaaactgtggctgtctaagtattgctgtccgcagcttcctaatcagtccaatggaaagaagaagaacgaggagtag

SEQ ID NO: 23690 - DNA, 582 bp, synthetic construct
  misc_feature 1..582: note = Description of Artificial Sequence: Synthetic coding sequence
  source 1..582: mol_type = other DNA
atgagcaccgtggaggaggacagcgacaccgtgaccgtggagaccgttaattccgtgacccttacacaagacaccgagggaaacctgatcctgcattgcccgcaaaacgaggcagatgagattgattctgaggactctatcgagccaccccacaagaggctgtgtttatcttcagaggacgaccagtctattgacgattctaccccttgtatctccgtggtggctcttcctctgtcagagaatgatcaaagtttcgaggtaacaatgacagctacaacagaggtggcagacgacgaggtgaccgagggaaccgtaacccagatccagattttacagaacgaacaactggatgagatcagtccccttggtaacgaggaggtctctgccgtgtcgcaagcttggtttaccaccaaggaggacaaggatagcctgaccaacaaaggccataagtggaaacagggcatgtggtccaaggaggaaattgacattctgatgaacaatatcgaacggtaccttaaagccaggggaatcaaggacgcaacagagatcattttcgagatgagtaaggatgaacgaaaatag

SEQ ID NO: 23691 - DNA, 84 bp, synthetic construct
  misc_feature 1..84: note = Description of Artificial Sequence: Synthetic coding sequence
  source 1..84: mol_type = other DNA
atgagcaccgtggaggaggacagcgacaccgtgaccgtggagaccgttaacagtgtgacattaacccaggacaccgagggatag

SEQ ID NO: 23692 - DNA, 444 bp, synthetic construct
  misc_feature 1..444: note = Description of Artificial Sequence: Synthetic coding sequence
  source 1..444: mol_type = other DNA
atgagcaccgtggaggaggacagcgacaccgtgaccgtggagaccgttaactctgtgacattgacccaggacaccgagggtaacctgattctgcattgcccacaaaatgaggccgacgaaattgattccgaggatagcatcgaaccccctcacaaacgactgtgcctctcctctgaggacgaccagagcatagacgactccaccccttgtatctccgtggtagcacttccactgtccgagaacgaccagtccttcgaggtcacaatgaccgccacaacggaggtcgcagacgacgaagtgaccgagggaacagtaacacagatccagatacttcagaatgaacagcttgatgaaattagccccctcggcaacgaggaggtgtctgctgtatctcaagcttggttcaccaccaaggaggacaaagactccttgacaaataagtag

SEQ ID NO: 23693 - DNA, 222 bp, synthetic construct
  misc_feature 1..222: note = Description of Artificial Sequence: Synthetic coding sequence
  source 1..222: mol_type = other DNA
atgagcaccgtggaggaggacagcgacaccgtgaccgtggagaccgtgaatagtgtgacccttacccaagataccgagggtaacttgattctgcactgtccccaaaacgaggccgacgagatcgattccgaagactcgattgagcctccccacaagcgattgtgcttatcatctgaagacgatcagagcatcgacgattctacgccttgcatcagcgtctag

SEQ ID NO: 23694 - DNA, 2019 bp, synthetic construct
  misc_feature 1..2019: note = Description of Artificial Sequence: Synthetic coding sequence
  source 1..2019: mol_type = other DNA
atgaccgccaccaccgaggtggccgacgacgaggtgaccgagggcacggtcacccagattcaaattcttcaaaatgagcagttggatgagatctcccccctgggcaacgaggaggtgtctgcggtgtcacaagcgtggtttacaactaaagaagataaggacagcctgactaacaaggggcataaatggaaacaggggatgtggagcaaagaagagatcgacattttaatgaataatatcgaacgttacctgaaggcaagaggcataaaggatgcgactgaaatcatcttcgaaatgtcaaaggatgaacgtaaggatttttaccgcacaatcgcatgggggctgaacagaccgctctttgcagtctaccggcgggtcctgcgtatgtacgatgatcgaaatcatgtgggcaagtacacccccgaagagattgagaaactaaaggaattgagaatcaagcatgggaatgattgggctacaatcggagccgctcttggccggtcggcgtcttcagtcaaggatcgatgcaggctgatgaaggacacctgcaataccggaaagtggacagaggaagaggaaaagcgattagcagaggtggtgcatgagctgacatctacagagcctggcgatattgttacacagggcgtgtcatgggcagcagtggccgagcgagtggggacgcgttccgagaaacagtgcaggagcaagtggctaaactacttgaactggaagcagtccggagggacggaatggaccaaagaagatgagataaatctcatcctgaggatcgctgaattggacgttgccgatgaaaatgacatcaattgggatctcctagctgaagggtggagctccgtcagaagcccacagtggctgagaagcaaatggtggaccatcaaacgccaaattgcaaatcacaaagacgtgagttttcccgtgctaattaaaggcctcaagcagctccacgagaatcagaaaaacaatccaaccttgcttgaaaacaagtccggtagtggggttccaaatagcaacacaaactcttctgttcagcacgttcagattagagtggccagactcgaggataataccgctatctcttcgagcccaatggctgcactgcagatccctgtccagatcacccatgtgtcaagtgccgactccccagccacggtggatagcgagacaatcacactcaacagcggaacactgcagacctttgagatcctgccaagtttccacctgcaaccaaccggcacgcctggaacctacctgctgcaaacaagcagctcgcagggcctacctttgaccctcacagcatccccaactgtgactcttacggccgctgctcctgcatcccctgagcagattatcgtacacgcactgtcacctgagcacttgctgaacacttcagacaatgtcacggtgcaatgtcatacacccagggtaatcattcagacagtagccaccgaagacataacatcctctatctcccaggccgagttgactgtagactcggacatccagagcagcgacttccccgagcctcctgacgctctggaggccgatactttcccggatgagattcatcacccaaagatgactgtggaacctagttttaatgacgcccacgtgtcaaagttttcggatcagaactctaccgaattgatgaactccgtgatggtgcgtactgaagaggagataagtgataccgatctgaagcaagaagagtctccatccgatctggcaagtgcttacgtaaccgagggcctcgagtctcctaccatcgaggagcaggtggatcagaccatcgatgatgagactatacttatagtgccgagcccccacggtttcatacaagccagtgacgtgatcgatacagagtccgtgctgcctctgacaacccttacggacccgatactgcagcaccaccaggaggagtccaacataattggctcctccttaggatcccctgtttccgaggactcaaaggacgtcgaggacttggtgaattgtcactag

SEQ ID NO: 23695 - DNA, 291 bp, synthetic construct
  misc_feature 1..291: note = Description of Artificial Sequence: Synthetic coding sequence
  source 1..291: mol_type = other DNA
atgagcaccgtggaggaggacagcgacaccgtgaccgtggagaccgtgaacagcgtaactctgactcaggataccgaaggaaatctcatattgcactgtcctcaaaacgaagccgatgagatcgattccgaagactctatcgagcctccccataagcgtctgtgcctgtctagcgaggatgatcagtctatcgacgactcaacgccttgtatctcagttgtggccctgccactcagcgaaaacgatcagagtttcgaggtgacgatgacggccaccactgaagtggcgtag

SEQ ID NO: 23696 - DNA, 171 bp, synthetic construct
  misc_feature 1..171: note = Description of Artificial Sequence: Synthetic coding sequence
  source 1..171: mol_type = other DNA
atgagcaccgtggaggaggacagcgacaccgtgaccgtggagaccgttaactccgtgactctgacccaagataccgagggaaatctgattctacattgtccccagaacgaggcggatgagatcgacagtgaggactccatcgagcctccacataagagactttgtctttag

SEQ ID NO: 23697 - DNA, 858 bp, synthetic construct
  misc_feature 1..858: note = Description of Artificial Sequence: Synthetic coding sequence
  source 1..858: mol_type = other DNA
atgagcaccgtggaggaggacagcgacaccgtgaccgtggagaccgttaactctgttaccctgacccaggatactgagggtaatctgatcctgcattgtccacaaaacgaggccgacgaaatcgatagcgaggatagcatcgaaccaccccacaagagactctgtttatcaagtgaagacgatcagagcatcgacgacagtacaccatgtataagtgttgtggctttgcccctgtcagagaacgatcaatcctttgaggtgacaatgaccgcaaccactgaagttgccgacgacgaagtaactgagggaaccgtgacacaaatccagattctccaaaacgagcaactagatgagatatcaccgcttgggaacgaggaagtgtctgcggtgagtcaggcgtggttcaccacaaaggaggacaaggattccctgaccaataaaggtcataagtggaaacaggggatgtggagcaaagaggagatagacatcctcatgaataacattgagcggtatctgaaagcaagaggcataaaggatgccacagaaattatctttgaaatgagcaaggatgagcggaaggacttctacagaactatagcgtggggtctaaacagaccactttttgctgtttatcggcgtgtgctcagaatgtatgacgataggaaccatgtgggaaagtatacaccagaggagatcgagaagctgaaggagaaaaaggccattgcggcctgttttttcttcacgcatcgacagctatggacgcctaagaagggacataccttcaagctctggctgtctaaatattgctgtccacaactgcccaaccagagcaatggaaagaaaaagaacgaagagtag

SEQ ID NO: 23698 - DNA, 150 bp, synthetic construct
  misc_feature 1..150: note = Description of Artificial Sequence: Synthetic coding sequence
  source 1..150: mol_type = other DNA
atgagcaccgtggaggaggacagcgacaccgtgaccgtggagaccgttaactctgtgaccctgactcaggacaccgaagggaacctgattctccactgtccacagaacgaggctgacgagattgactcagaagattccattgaaccatag

SEQ ID NO: 23699 - DNA, 330 bp, synthetic construct
  misc_feature 1..330: note = Description of Artificial Sequence: Synthetic coding sequence
  source 1..330: mol_type = other DNA
atgagcaccgtggaggaggacagcgacaccgtgaccgtggagaccgtgaatagcgtgacactgacccaagacaccgagggaaacctgattctgcattgtccacagaacgaggcggatgaaatcgattccgaggactctatcgagcccccccacaagcgcctgtgcttgtcaagtgaggacgaccagtccattgatgactcaactccatgcatatccgtcgtggccctgcctctgagcgaaaacgatcaatcttttgaggtcactatgactgccactaccgaggtggcagacgacgaagtgacagaaggaaccgtcacacagatccagtag

SEQ ID NO: 23700 - DNA, 276 bp, synthetic construct
  misc_feature 1..276: note = Description of Artificial Sequence: Synthetic coding sequence
  source 1..276: mol_type = other DNA
atgagcaccgtggaggaggacagcgacaccgtgaccgtggagaccgtcaattcagtaacactcactcaggacaccgagggaaacctgatcttacattgtccacagaacgaagcagacgagatcgattcagaggattcaatcgaacctccgcacaagcggctgtgcctctcatcagaggatgatcaaagcatcgacgatagcaccccatgtatctccgtggttgcccttccgctcagcgagaacgatcagagtttcgaggtcactatgacggcctag

SEQ ID NO: 23701 - DNA, 1647 bp, synthetic construct
  misc_feature 1..1647: note = Description of Artificial Sequence: Synthetic coding sequence
  source 1..1647: mol_type = other DNA
atggccaccggcgccaacgccacccccctggacttccccagcaagaaaaggaaaaggagcaggtggaaccaagatacgatggaacagaagaccgtcatccccggaatgcctactgtcattcccccggggctgactagggagcaggaacgagcttacatcgtgcagctgcagattgaagacctcacaagaaagctgcgcacgggcgacctggggatcccgccaaacccggaggaccggtctcctagccctgaacccatttacaactccgagggcaaacggcttaacaccagagagtttcgcacacggaagaagttagaagaagaacggcacaacctcatcactgaaatggtggctctgaacccggatttcaagccacctgctgattacaagcctcctgctaccagggtgagtgataaagtcatgattcctcaggacgagtaccctgaaatcaacttcgttggattgttaatcggcccacgagggaacacactgaagaatatcgagaaggaatgcaatgccaaaattatgattagaggaaaaggaagcgtaaaagaaggtaaggttggtcggaaagacgggcagatgttgccaggcgaggacgagcctcttcacgccctggtgaccgccaatacgatggagaacgtaaagaaggcggtcgagcagatcagaaatatactgaagcagggaatagagaccccagaagatcagaatgatttgcgaaaaatgcaattgcgcgagcttgcccggcttaacggcactctcagggaggatgataatcgcattttaaggccatggcagtctagcgaaaccaggtcaatcactaacacaaccgtgtgcaccaaatgtgggggagctggtcacatcgccagcgattgcaagtttcaaagacctggggatccccaatcagcccaagacaaagcaaggatggacaaagagtatctgagcctaatggctgagttaggggaagcacccgtgcccgcctccgtaggcagcacctctggccctgcaactacaccacttgcctcagctccacgcccagccgccccggcaaacaaccctcccccccccagtctgatgtccacgactcaatctcgccccccatggatgaattctggtcccagtgaatcccgcccttaccacggaatgcacggaggaggacccggaggcccgggcggtggaccacattctttccctcacccactgcccagcctgacaggcggtcacggtggccatcccatgcaacacaaccctaatggaccacccccaccgtggatgcagcccccaccgccacctatgaatcaaggccctcaccccccagggcaccatggtcccccccctatggaccaatacctgggctcaaccccggttggcagcggggtctataggcttcaccaaggaaaggggatgatgccaccacctccgatgggtatgatgccccctcctcccccaccacctagcggccagcctccccctccaccctccggacccctgccaccttggcaacaacagcaacagcagccgcctcctccaccaccaccatcttcgtcgatggcaagctcaacacctttaccctggcaacagcgaagcctcccagcagccgctatggcacgggctatgcgcgtgagaacatttcgcgcccattggtag

SEQ ID NO: 23702 - DNA, 486 bp, synthetic construct
  misc_feature 1..486: note = Description of Artificial Sequence: Synthetic coding sequence
  source 1..486: mol_type = other DNA
atggagcaccagctgctgtgctgcgaggtggagaccatccggcgggcctatcccgacgccaatctcttaaatgacagagtgctgcgcgccatgttaaaggcagaggaaacttgcgctccttctgtctcctattttaaatgtgttcagacttttgtggctctgtgcgctaccgacgttaaattcatttccaacccacctagtatggtggcagcgggtagcgtggtggcagctgtgcaggggctgaatctccgtagtcccaataatttcttgtcatactacagactgacccgctttctgagccgggtgatcaagtgcgatcctgactgtctaagggcatgccaggaacagatcgaagccctccttgaatcgtctctccgacaagcccagcagaatatggaccctaaagccgcggaggaggaggaggaggaagaagaagaggtggatcttgcatgtactcccacggacgtgcgggacgttgacatctag

SEQ ID NO: 23703 - DNA, 870 bp, synthetic construct
  misc_feature 1..870: note = Description of Artificial Sequence: Synthetic coding sequence
  source 1..870: mol_type = other DNA
atggagctgctgtgccacgaggtggaccccgtgcggcgggccgtgagagaccggaacctgcttcgagatgacagggttcttcagaacctgctgaccatagaggaacgctatttaccccagtgctcttatttcaagtgtgtccagaaggatattcagccatacatgcgcaggatggtggcaacctggatgctggaagtgtgtgaagagcagaagtgtgaagaggaagtgttccctcttgctatgaactacctggacaggttccttgccggcgtgcctacacccaaaagccacttgcaactcctgggcgccgtctgtatgttcctcgcatctaagttaaaagagacctctcctttgacagcagagaaattgtgtatttatactgataactccattaagccccaggagctgttagagtgggaactggtggtcctgggaaagctcaagtggaatctcgctgccgtgacgccccacgacttcattgagcacatcttgcgtaagcttccccagcaacgcgagaaattgtccctgatccggaagcatgctcaaactttcatcgctctgtgtgcgaccgactttaagttcgcaatgtatcctccatccatgatagctaccggttccgttggagcagccatctgcgggctacaacaagacgaggaagtgagctctttgacatgcgacgctctcacagaacttcttgccaagatcactaacacagatgtggattgtctgaaagcttgccaagaacagatcgaagccgtgcttcttaatagtctgcaacagtaccgacaggatcagcgcgatgggagcaaaagtgaggatgagttggatcaagcctctaccccaaccgacgtgcgagatatcgacctgtag

SEQ ID NO: 23704 - DNA, 729 bp, synthetic construct
  misc_feature 1..729: note = Description of Artificial Sequence: Synthetic coding sequence
  source 1..729: mol_type = other DNA
atgaagagcgccggcggcagcggccggagcctgctgcccagcccccgtgtctgtgaagagcagaggtgcgaagaggaagtgttcccactggctatgaactatctggatagatatctaagctgtgtccctactcgcaaggcacagctacagctccttggggcagtctgtatgcttctggcgtctaagcttcgtgaaacaactcccctgacgatcgagaaactttgtatctacactgatcatgcggtgtctccccggcaattacgagactgggaggtactggtgctgggaaagttgaaatgggatctagccgctgtcatcgcccatgatttcctagcgtttatcctgcacagactttcactgccaagagacagacaagccctggttaagaagcacgcccaaacctttctggctctctgtgcaaccgattatacttttgctatgtacccaccgagcatgatcgccacaggctccataggcgcagccgttcaaggcctgggggcctgctcaatgagcggcgacgaactgaccgaattgctcgccgggattacagggaccgaagtggactgtctacgagcctgtcaagaacagatagaggccgctcttagagaaagtttgagggaagctagtcagaccagcagttcccccgcccccaaggcccccagagggagctcttcccagggcccttctcaaacatcaacgcctacagatgttacagccattcatctgtag

SEQ ID NO: 23705 - DNA, 636 bp, synthetic construct
  misc_feature 1..636: note = Description of Artificial Sequence: Synthetic coding sequence
  source 1..636: mol_type = other DNA
atgaactacctggaccggtacctgagctgcgtgcccacccggaaggctcaactgcagctcctgggcgccgtctgcatgcttttagctagcaaactcagggagactacaccgctgaccatcgagaagctgtgcatatacaccgatcacgccgtcagccctagacagctgcgagactgggaggtactggtgttgggtaagttgaagtgggatctagccgccgtgattgcacatgactttttagctttcattctgcatagactgtctttgcccagagaccgacaggccctcgtcaagaagcacgctcaaacctttcttgcgttgtgcgcaaccgactatacattcgcaatgtaccccccgtcaatgatcgcaaccgggagcatcggcgccgccgtccaaggactcggtgcctgtagcatgtctggagacgagctgactgagcttctcgccggaatcactggaacggaggttgactgccttcgggcgtgtcaggaacagattgaggccgcgctgcgcgagtccctacgagaggcgtcacaaacaagtagctcacctgctcctaaagcaccacgcgggtcctcttctcaagggccatcgcagacttctactccaacagatgtgacagccattcacctgtag

SEQ ID NO: 23706 - DNA, 879 bp, synthetic construct
  misc_feature 1..879: note = Description of Artificial Sequence: Synthetic coding sequence
  source 1..879: mol_type = other DNA
atggagctgctgtgctgcgagggcacccggcacgccccccgggccggccccgaccctcgtctactcggtgaccagcgagttctccagtccctgctgaggctcgaggagaggtacgtccctagggcctcttattttcagtgtgtccaaagggaaataaaacctcatatgcgaaagatgctcgcatactggatgctggaggtctgcgaggagcagcgctgcgaagaggaagtcttcccactcgccatgaattacctggatagatatctgagctgcgtgcccacgagaaaggcccagcttcagttactgggagccgtttgtatgctgcttgcctccaagctgcgagaaacaacacctctgacaattgaaaagctgtgcatctatacggatcatgccgtctccccgaggcaactacgcgattgggaagtgctggttctcggaaaattaaagtgggacttagctgccgtaatcgcacacgatttcctggcatttatcttgcatcggttatctctaccaagggaccgacaggccctagtgaagaagcacgctcagacctttctggccctgtgtgccaccgactatacatttgccatgtacccaccctcaatgattgctaccggaagcatcggtgcagctgtccaagggctaggtgcttgctcaatgtctggagacgagctgactgagttactcgccggtatcactggaacagaagtggactgcctgagggcatgtcaggagcaaatcgaagcagcccttagagagtctctgcgggaggcatctcagacatcctccagtcccgctcccaaggcaccgagaggcagttctagtcagggaccatcacagacatccaccccaacggatgtcaccgccatccacctctag

SEQ ID NO: 23707 - DNA, 663 bp, synthetic construct
  misc_feature 1..663: note = Description of Artificial Sequence: Synthetic coding sequence
  source 1..663: mol_type = other DNA
atggagctgctgtgctgcgagggcacccggcacgccccccgggccgggcccgatcctcgacttttgggtgaccagcgtgtgttgcagagcttactgcgcctggaggagagatacgtgccaagggcttcctatttccagtgtgtccagcgggagattaaaccccacatgaggaaaatgctggcttattggatgttagaggactgggaggttctggtcctgggtaaactcaaatgggacctggccgccgtgattgcccacgacttcctggccttcatcttacataggctatctttgccacgagaccggcaggccttggtgaagaagcacgctcagacctttcttgccctttgcgcgaccgattatacgtttgccatgtacccccccagcatgattgccaccggctctatcggcgctgctgtgcagggcctgggcgcctgttccatgtccggtgatgagctcactgaattgcttgcgggcattaccggaacagaagtggactgccttcgggcttgccaggaacaaattgaggccgctctgagagagtccttgagggaggccagccagacgtccagctcacccgcccccaaagcaccccgtggttcttccagccaaggcccctcccagacctctactccaacggacgtgacagctatccacctctag

SEQ ID NO: 23708 - DNA, 291 bp, synthetic construct
  misc_feature 1..291: note = Description of Artificial Sequence: Synthetic coding sequence
  source 1..291: mol_type = other DNA
atgtacccccccagcatgatcgccaccggcagcatcggcgccgccgtgcagggcctcggcgcctgcagcatgtccggagatgagttgacagagcttcttgccggtataacgggtaccgaggtggattgtttgagggcatgccaggaacagattgaagcagccttgcgcgaaagtctccgtgaggcctcccagacctctagctcccccgctcctaaggctccccgcgggtcttcctcgcaggggccaagccagacctctacccccactgatgtgaccgctatccacttgtag

SEQ ID NO: 23709 - DNA, 132 bp, synthetic construct
  misc_feature 1..132: note = Description of Artificial Sequence: Synthetic coding sequence
  source 1..132: mol_type = other DNA
atgaactacctggaccggtacctgagctgcgtgcccacccggaaggcccagctgcagttgctgggggctgtgtgcatgcttctggccagcaagttacgtgaaaccacaccgttgactatagaaaagctctag

SEQ ID NO: 23710 - DNA, 357 bp, synthetic construct
  misc_feature 1..357: note = Description of Artificial Sequence: Synthetic coding sequence
  source 1..357: mol_type = other DNA
atgaactacctggaccggtacctgagctgcgtgcccacccggaaggcccagctgcagttactgggtgccgtgtgtatgcttctcgcttcaaagctgcgtgagacaacccctctgaccatcgagaagctgtgtatttataccgaccacgctgtttccccccgccagctgagagactgggaggtactggtgctcggcaaactgaaatgggacctcgctgcagtgatcgcgcacgattttctggcatttatactgcacagactaagtttgcctagagataggcaggctctggtgaaaaaacacgctcagactttcctggcactgtgcgcaaccgattacacgttcgcaatgtacccctag

SEQ ID NO: 23711 - DNA, 33 bp, synthetic construct; identical to SEQ ID NO: 10247
  misc_feature 1..33: note = Description of Artificial Sequence: Synthetic coding sequence
  source 1..33: mol_type = other DNA

SEQ ID NO: 23712 - DNA, 636 bp, synthetic construct
  misc_feature 1..636: note = Description of Artificial Sequence: Synthetic coding sequence
  source 1..636: mol_type = other DNA
atgaactacctggaccggtacctgagctgcgtgcccacccggaaggcccagctccagttgcttggagcagtgtgtatgctcctggcttctaagctgagggagacaacccccctcaccatcgagaaactgtgtatctataccgaccatgcagttagtcctcggcaacttagggactgggaggtgttagtgctcggaaaactcaaatgggatttggctgcagtcatcgcgcacgatttcctggcctttatcctgcataggttgagtctgccacgagacagacaggccctcgtgaaaaagcacgcccagactttccttgctctttgtgccaccgactacacatttgccatgtacccgccatccatgatagcaactggatcaatcggagccgctgtgcaggggctgggggcctgttcgatgtctggcgacgagcttaccgagctactggccggtatcaccggtaccgaggtcgactgcctgcgtgcctgccaggaacaaattgaagccgcccttagggagtccctgagagaggcgtctcagaccagctcatctcccgcacctaaagcccctaggggctccagttcccagggccctagtcaaaccagcaccccgaccgacgtgactgcaatccacctgtag

SEQ ID NO: 23713 - DNA, 1233 bp, synthetic construct
  misc_feature 1..1233: note = Description of Artificial Sequence: Synthetic coding sequence
  source 1..1233: mol_type = other DNA
atgccccgggagcggcgggagcgggacgccaaggagcgggacaccatgaaagaggacggcggcgctgagttcagcgctcggtcccgaaaacgcaaagcaaatgtcaccgtgttcctccaggaccccgacgaggaaatggccaagatcgatagaaccgcgagagaccaatgcggtagccagccctgggataacaacgccgtgtgtgctgacccatgttccctgattcctacacccgataaggaggacgacgacagagtgtatccaaactccacgtgtaaaccccgcatcatcgccccatccaggggaagccctttgccggtgctctcatgggcaaaccgagaggaggtgtggaagataatgctgaataaggaaaaaacatatctccgtgatcagcatttcctagaacaacaccctctgctccagcctaagatgagggctatcctcctggattggctgatggaggtgtgtgaagtgtataaactccacagagagacgttttacctggcccaggatttttttgacagatacatggctactcaggagaacgtggtgaagactctgctgcagttgattggcatctctagcctgtttattgctgcaaagctggaggaaatctaccccccgaaactccaccagttcgcatatgtgactgatggagcttgtagcggtgatgagatattgaccatggagctcatgatcatgaaagcactcaagtggagactgtctccattaacgattgtgtcttggctcaacgtatatatgcaggtcgcctatcttaatgacttgcacgaagtgctcctgccacaatacccacagcagattttcatccagatagcagagctcttggatttatgtgttcttgatgtggactgtctggagtttccctatggaatcctggctgccagcgccctttatcacttctcctccagtgagctgatgcaaaaagtttccggataccaatggtgcgatattgagaactgtgtgaaatggatggtcccattcgccatggtgattagagaaacggggtcatccaaacttaagcatttcagaggggttgctgatgaggatgcacacaacattcaaacacatagggactctctggatctcctagacaaggcacgggctaagaaagctatgctgagtgaacaaaaccgggcatctcctctgccatccggccttttgacgccacctcagagtggtaagaagcaaagttccggccccgaaatggcatag

SEQ ID NO: 23714 - DNA, 1104 bp, synthetic construct
  misc_feature 1..1104: note = Description of Artificial Sequence: Synthetic coding sequence
  source 1..1104: mol_type = other DNA
atgccccgggagcggcgggagcgggacgccaaggagcgggacaccatgaaagaagatggaggtgcagaattctccgcccgatccagaaagcgcaaagccaacgtgaccgtgttccttcaggaccccgatgaggagatggccaagattgacagaacagcccgagaccagtgtggatctcagccttgggacaacaatgccgtttgtgcagatccctgttctctcatccctacacccgataaggaggacgacgatagagtctacccaaattcaacatgcaaacccagaatcattgctccaagccgcggttcacccctgccggtcctaagttgggccaatagagaagaggtgtggaagattatgcttaacaaggaaaagacgtacttgcgcgatcaacactttctcgaacagcaccctttattacaacccaaaatgcgcgccatactactggattggctgatggaggtgagtctgtctctgccagagatatatcctcctaagttacaccagtttgcttatgtaacagacggcgcttgcagcggcgatgagatactgacaatggagctgatgatcatgaaggcattgaaatggcggttatcaccattaactatcgtttcttggctgaatgtgtatatgcaggtggcatacctcaacgacctgcacgaggttcttctgcctcagtacccgcagcaaattttcatacagattgccgagctcctcgatctgtgtgtgttggacgttgactgcctggagttcccctatggtatccttgcggcctccgccctgtaccatttcagctcaagcgaactgatgcagaaagtttccggttatcagtggtgcgacattgagaattgtgtgaagtggatggtgcccttcgctatggtgattcgagagaccggatcctccaagttgaagcattttcggggggtggcggatgaggacgcccacaacatccagactcaccgggactccctcgatttgctcgataaggcacgcgctaagaaagccatgctctcagaacaaaaccgggcctctcctctccccagcgggctattgactccaccgcagtcgggcaaaaaacagagttctggtccagagatggcatag

SEQ ID NO: 23715 - DNA, 1188 bp, synthetic construct
  misc_feature 1..1188: note = Description of Artificial Sequence: Synthetic coding sequence
  source 1..1188: mol_type = other DNA
atgaaggaggacggcggcgccgagttcagcgcccggagccggaagaggaaggctaatgttaccgtgttccttcaagaccccgacgaggagatggctaagattgataggacggcgagagaccagtgtggctcccagccttgggataacaatgccgtgtgtgccgatccctgcagcctgataccaacgcccgacaaagaagacgatgacagagtgtaccccaactcaacttgcaaacccaggatcatcgccccaagcagaggctctccactgcccgtgttaagttgggcaaatcgggaagaagtgtggaaaattatgcttaacaaagaaaaaacttacctacgcgatcagcacttcttagagcaacacccccttctgcagcccaaaatgagggccattctcctggattggctgatggaggtgtgcgaagtctacaagcttcatagggaaacattctatctggctcaggacttcttcgaccggtacatggcaacgcaggaaaacgtggtgaagactcttttacaacttattggcatctcatctctcttcatcgccgcaaaactggaggagatatacccaccaaaactccatcaatttgcttacgtcaccgatggagcatgttctggagatgaaattctgacaatggagttaatgattatgaaagcgctgaagtggagattgtctcctctcacgattgtttcctggcttaatgtctacatgcaggtggcctacctcaacgacctacacgaagttctattgccacagtatcctcagcagatcttcattcagatcgcagagcttctcgatttgtgcgtgcttgacgtagattgtctggaatttccgtatggcatactagccgcatctgccttgtatcacttttcatcttcggagctgatgcagaaagtttcaggttaccaatggtgcgacatcgagaactgtgtgaagtggatggtgccattcgccatggtgatcagggagaccggatcttctaagctgaagcatttccgcggtgtggcagatgaggatgctcataatattcagacccacagagacagcctcgaccttctagataaagcacgcgccaagaaggctatgctctcagagcaaaatagagccagtcctttgcctagtggactgctcacacctccgcaatcggggaagaagcagtcgagcggaccggaaatggcttag

SEQ ID NO: 23716 - DNA, 2106 bp, synthetic construct
  misc_feature 1..2106: note = Description of Artificial Sequence: Synthetic coding sequence
  source 1..2106: mol_type = other DNA
cggaccagctggcccagcgagctggccgccgagaagggcaacttcgaagctgctgttaagcttgggattgcatatctgtacaacgaaggactttcagtcagcgatgaggcccgggctgaagtgaacggcctgaaagcaagcaggttcttcagtctggctgaacggttgaatgtgggtgcggccccatttatctggctgtttatccgtccaccatggtccgtgagtggttcatgctgcaaggccgttgtacacgagtctctgcgcgcagagtgtcaactccagaggacacataaagcttctatcctgcactgtctggggcgcgtgctgtctctgtttgaggatgaggagaagcaacagcaggcccacgacctattcgaagaagcagctcatcagggatgcctaacgtcctcgtatcttctatgggaatctgaccgcagaactgacgtgtcagatcccggacgatgcttacattcttttcgcaagctccgtgattatgctgccaagggctgctgggaggcgcagctttcactggccaaggcgtgcgctaatgccaaccagctcggcctagaagtgagagcttctagtgaaattgtttgccaattattccaagcaagtcaggccgtctcaaaacagcaggtgtttagcgtccaaaagggactcaatgacaccatgcgctacattctgattgattggctcgtggaggtcgctactatgaaggacttcacttcgctgtgtctacacctcaccgttgaatgcgtggacagatacttgcgcagaaggctggttcctcggtacagactgcaattactgggtatagcctgtatggttatctgcacccgatttatatctaaagagattttgactatacgggaggccgtgtggcttacagacaacacttacaagtacgaggatcttgtccggatgatgggagagattgtttctgcccttgaaggaaaaataagggtacccaccgtggtagactataaggaagtcttactgactctggtcccggtagaactaagaacccagcacctttgttcattcctatgcgagctctctcttttgcacacctcattgtccgcatacgcaccggctagactcgcggcggctgctctgctgttggccaggctgacccatgggcagactcagccatggacaacccagttatgggacctcacaggtttcagttatgaagacctgattccgtgcgtgctgagtcttcacaaaaagtgcttccatgacgatgcccctaaggactatagacaggtctccctcaccgcggtcaagcaacgcttcgaggataaacgctatggtgagatcagccaggaggaagtgctgtcctatagccaactctgtgctgccttaggcgtaacacaggacagtccagatccgccaaccttcctatctaccggggaaatccacgccttcctgtcgagtccctccggccgccggacaaagcgcaagcgggaaaatagcttgcaggaagacagaggatccttcgtgactaccccaaccgctgagctttccagtcaggaggagaccctgctcggttctttcctagactggtctctggactgttgttctggatacgagggcgaccaggaaagcgagggggagaaggagggggatgtgacggcaccctcaggtattcttgacgtcactgtcgtttatcttaacccagagcagcattgctgtcaggagtcttctgacgaggaggcttgtccagaagataaagggccgcaagatccacaggcattagccctcgacactcaaatccccgctaccccaggccctaagccacttgttcggacctctcgggagcctgggaaggatgttactacttccgggtactccagcgtatccactgcctcaccaacttccagcgtggatggaggtctgggtgctctcccacagccaaccagtgtcctttccttggactcagacagccatacccagccgtgccaccaccaggcccggaaatcttgcctgcaatgccggcctcccagcccgcccgaatcctcagttccccaacaacaggtgaaaagaatcaatctctgtatccactcagaggaggaggacatgaatctgggactagtgcgtctgtag

SEQ ID NO: 23717 - DNA, 2361 bp, synthetic construct
  misc_feature 1..2361: note = Description of Artificial Sequence: Synthetic coding sequence
  source 1..2361: mol_type = other DNA
atgggcagcggcggcgtggtgcactgccggtgcgccaagtgcttctgttaccctacaaagcgcagaattcggaggagaccaaggaaccttacaatcttatctctccccgaggacgtgcttttccacatccttaagtggctctctgtggaggacattcttgccgtgagggccgtgcactcccaactgaaggatctggttgacaaccatgcatccgtctgggcctgcgcttcgttccaagaactgtggcccagccctggcaatctcaagctgttcgagcgcgcagcggagaagggtaacttcgaagcagcggtaaagcttgggatagcatatctgtataatgaggggctcagtgtgtccgatgaggcacgcgccgaggtcaatggtttgaaggcttcccggtttttttccctggccgagcggttgaacgtaggtgccgctccttttatttggctgttcatcagacccccctggagcgtctctggaagctgttgcaaagcagtggtgcatgaatctctacgggcagagtgtcaactgcagagaacccataaggcctctattctgcactgtctgggcagggtcttatcactcttcgaggacgaggaaaagcagcaacaagcgcacgatctttttgaggaggctgcccaccaaggatgtctgacctcaagctacttactgtgggaatctgacaggcgtaccgatgtaagcgaccctggcagatgtctccattcattccgcaaactgagggactacgcagctaaaggttgctgggaggcccagttatccctggcaaaggcatgtgcgaatgctaaccaactgggtctggaagtgagggcgagcagcgaaattgtgtgtcagcttttccaggctagtcaggccgtgtcgaagcagcaagtgttctcggtccaaaaaggcctcaacgacaccatgagatatattctgatagattggctggtggaagtggccaccatgaaggatttcacaagtctgtgtctacatctcaccgtggagtgtgtcgatcggtacctcagacggcgcctcgtgccccgctataggcttcagttgttgggcattgcctgtatggtcatctgtacccgatttatttcaaaggagatcctgactatcagagaagccgtgtggctgacagataatacatacaagtacgaggatttggtgcgcatgatgggcgaaatcgtgagtgctttggagggcaaaattcgcgtcccgacagtggttgattacaaagaggtccttctaacccttgtacctgtggagttgcgaacccagcacttgtgcagttttctttgtgagctgagcctgttgcatacatcattgagtgcttacgccccagcccggctagcggccgcagccctcctgctggcaaggttgactcacggccaaacacagccatggacaacccagctgtgggaccttacaggattttcctacgaagacctgatcccctgtgttctctccttgcacaaaaagtgtttccacgacgatgccccaaaggactatcgccaggtgtccctgactgctgtcaaacagcggttcgaagacaaacgctacggcgaaatctctcaggaggaagtgctgtcgtatagtcaactgtgtgccgctctgggagtgacccaagactccccggacccccccacattcctgtccaccggggagatccacgccttcctgtcaagcccctcaggtagacgtacaaaacgaaagagggaaaattccctgcaggaggatcgcggttctttcgtcacaacacccaccgcggagttgtcaagtcaggaggagaccctgcttggttcttttctggactggagcctggactgctgcagcgggtatgagggagatcaagagtcggagggagaaaaggagggggacgtgacggccccgtccgggatcctggacgtgaccgtagtgtatctgaaccccgagcaacactgttgtcaggaaagctctgatgaagaagcatgcccagaagacaagggccctcaggatccacaggcactcgctttggacacccaaatccctgccactcccggtcctaagcctttggtcagaacctcgcgcgagccaggaaaagatgtgaccacttccggctatagcagtgttagcactgcgagccctactagttctgtagatggagggttaggcgctctacctcaacctacctccgtgctcagcctggattcagattcgcatacacagccctgccaccaccaggcaaggaaatcctgcctccagtgtagaccccctagtccacctgaaagcagtgtgccccagcagcaagtcaagcgcattaacctttgcattcactcagaagaagaagatatgaatctcggtttggtccgactctag

SEQ ID NO: 23718 - DNA, 888 bp, synthetic construct
  misc_feature 1..888: note = Description of Artificial Sequence: Synthetic coding sequence
  source 1..888: mol_type = other DNA
atgatcgaggtgctgaccaccaccgacagccagaagctgctgcaccaactgaatgcgttactggaacaggagagcaggtgccagccaaaggtctgtggtttaagactcattgaatctgcacacgacaatgggcttaggatgacagccaggttgcgcgatttcgaagttaaggacctcctgagcctcacgcaattcttcgggtttgatactgagactttcagcctggctgtcaatctgcttgaccggttcctcagcaagatgaaggtccagcccaagcatctagggtgcgtgggactcagctgtttctatttagccgtgaagtctatcgaggaggaacgaaacgtacctttggccaccgatctgattcggatcagccagtaccggtttactgtgagcgaccttatgcggatggagaaaatcgtccttgagaaggtttgctggaaggtgaaagcaacgaccgctttccaatttttgcagctttactactctttgcttcaggagaacctgcctctggagcggcggaatagcatcaactttgagagactcgaagctcagctcaaagcctgccactgcagaatcatcttcagcaaggcaaagccttctgttctcgccctgagtatcattgcacttgagatccaagcgcagaagtgcgtcgagcttacagagggcatcgaatgtttgcagaagcatagtaagattaacggccgggacctgacattctggcaggagttggtgagtaagtgcctgactgaatactcatctaacaaatgctccaaacctaatgtccagaaactaaaatggatagtgtcgggaagaaccgcaagacagctgaagcacagctattaccggataactcatctccccactataccggagatggtaccttag

SEQ ID NO: 23719 - DNA, 888 bp, synthetic construct
  misc_feature 1..888: note = Description of Artificial Sequence: Synthetic coding sequence
  source 1..888: mol_type = other DNA
atgatcgaggtgctgaccaccaccgacagccagaagctgctgcaccagctgaatgccctgctggaacaggaaagcaggtgtcagcctaaggtgtgtgggcttcgactgatcgaatccgcccacgacaacggtctaagaatgaccgcacggctcagagactttgaagtgaaagaccttctttcacttactcaatttttcggatttgataccgagacgttttctttggcggtaaaccttcttgaccggttcctgagcaaaatgaaggtccagccaaagcatttaggctgtgtggggttatcatgtttttatttggccgttaaaagcattgaagaggagcgcaacgtcccactggctactgacttaatacggattagtcagtatcgttttacagtatctgatctgatgaggatggagaaaattgtcctggagaaagtgtgttggaaggtaaaggccacaactgcttttcaattcctgcagctgtactattcgcttctccaggagaacttgcccctggagagaagaaattctatcaacttcgagagattggaagcccagctgaaagcatgccactgcaggattatcttttccaaagctaagccgtccgtgttagcattgtccatcattgcacttgagattcaggcccaaaagtgcgtggagctgaccgaaggtattgaatgcctccagaaacactctaagataaatggccgagacctgacattttggcaggagctggtgtctaagtgtctcactgagtactcctcaaacaagtgctccaagcccaacgtgcagaagttaaaatggatcgtttccggacgcaccgccagacagctcaaacattcatactaccgcattacacaccttcctacaattcctgaaatggtaccttag

SEQ ID NO: 23720 - DNA, 411 bp, synthetic construct
  misc_feature 1..411: note = Description of Artificial Sequence: Synthetic coding sequence
  source 1..411: mol_type = other DNA
atgatcgaggtgctgaccaccaccgacagccagaagctgctgcaccaactcaacgctctccttgaacaagagtcacgatgccagcccaaggtgtgtggcctccgactgatcgaaagtgcccacgataacgggcttcggatgactgccagactccgtgattttgaagtgaaagatctgctgtcgcttacccagttctttggtttcgatacggagacattttcacttgcggtgaaccttctcgacaggttcttgagtaagatgaaagtgcagcccaaacacctggggtgcgtcggcttgagttgcttttatttagcagtgaagagtatcgaggaggaacgtaacgttcccttggccaccgacctgattagaatatcccagtacagatttacggtgagcgatctgatgagatag

SEQ ID NO: 23721 - DNA, 411 bp, synthetic construct
  misc_feature 1..411: note = Description of Artificial Sequence: Synthetic coding sequence
  source 1..411: mol_type = other DNA
atgatcgaggtgctgaccaccaccgacagccagaagctgctgcaccagttgaatgccttactggaacaggaatctaggtgccaacccaaggtgtgcggactgagattaatcgagagcgcacatgataatggcctgcgcatgaccgcccggctccgggattttgaagtcaaggacttgctaagcttaacccagttcttcggctttgatacagagactttttcattggccgtgaacctcctcgaccgttttctcagtaagatgaaagtacagccaaaacatctgggatgtgtggggctgagttgtttctatctggctgtaaaatccattgaggaggaaaggaacgttccgctcgcgaccgatcttatcagaatctcccagtacaggtttacagtgtccgacctaatgcgatag

SEQ ID NO: 23722 - DNA, 504 bp, synthetic construct
  misc_feature 1..504: note = Description of Artificial Sequence: Synthetic coding sequence
  source 1..504: mol_type = other DNA
atgagcgccaaggacctgatgcggatggagaagatcgtgctggagaaggtttgttggaaggttaaggcaacaacagcttttcagtttctgcagctatactacagcttgctccaggaaaacttacctctggagcggcggaatagtattaattttgaaagactggaagcccagcttaaagcatgtcactgccgcatcatttttagcaaggctaagccgagtgtcctcgctctctcaataattgctctcgagatccaagcccagaagtgtgtggaactcacggaaggaatcgagtgcctgcagaaacacagcaaaattaacggtcgtgatttgaccttttggcaggagctagtatctaagtgcctcaccgagtatagctccaataagtgttccaaacctaatgtgcagaaacttaaatggattgtctcaggacgaactgcaagacaactgaagcactcttattaccgcattacgcacttgccaacgatccccgaaatggtgccttag

SEQ ID NO: 23723 - DNA, 348 bp, synthetic construct
  misc_feature 1..348: note = Description of Artificial Sequence: Synthetic coding sequence
  source 1..348: mol_type = other DNA
atgatcgaggtgctgaccaccaccgacagccagaagctgctgcaccagctcaatgcattgctagaacaggaatctaggtgccagcctaaagtgtgtggactccggttgatagaatcagctcacgacaatggtcttcggatgacagccaggctccgtgatttcgaggtgaaagatctcctctcgctgactcagtttttcggctttgacacagaaacgtttagcttggcagtaaacttgctcgatagatttctcagcaagatgaaggttcaaccaaagcaccttggctgtgtaggacttagctgtttttatctggcggtgaagagtatagaagaggagaggaatgtgtag

SEQ ID NO: 23724 - DNA, 486 bp, synthetic construct
  misc_feature 1..486: note = Description of Artificial Sequence: Synthetic coding sequence
  source 1..486: mol_type = other DNA
atgcggatggagaagatcgtgctggagaaggtgtgctggaaggtgaaagctactaccgccttccaatttctgcagttgtactacagtttattacaggagaatcttcctctggagcgccggaactccatcaactttgaacggctggaagcccagctgaaggcctgtcattgcagaatcatcttctccaaagcaaagccctccgtgctggctttgagcatcatagctctggagatccaggcacagaagtgtgtcgagctgactgaagggattgagtgtctgcagaagcattcaaagatcaacggaagggacctcactttctggcaagagctggtctccaaatgcctcacagagtatagcagcaataaatgctccaagccaaatgtgcagaagctaaaatggattgtgagcgggcgcaccgctcgtcagctgaagcattcgtactaccgcatcacacacttacctacaattcctgagatggtcccttag

SEQ ID NO: 23725 - DNA, 486 bp, synthetic construct
  misc_feature 1..486: note = Description of Artificial Sequence: Synthetic coding sequence
  source 1..486: mol_type = other DNA
atgcggatggagaagatcgtgctggagaaggtgtgctggaaggtgaaggccaccacggctttccaatttctgcagctgtactatagccttcttcaagaaaatctacctttggagagaaggaactcgatcaatttcgagaggctggaggcccaactgaaagcatgccattgcaggatcattttctcaaaagctaagcctagcgtcctggctctgagcatcattgccttggagattcaagcccaaaaatgtgtggagctgacagaaggtatagagtgcctccagaagcactcaaaaatcaacggacgggatcttactttttggcaggaattagtgagcaaatgcctgaccgagtatagcagcaataaatgcagtaagccaaatgtccagaagctgaagtggattgtgtctggccgcacggcgaggcagctgaagcacagctattaccgaattactcacctgccaactatacccgagatggtgccttag

SEQ ID NO: 23726 - DNA, 105 bp, synthetic construct
  misc_feature 1..105: note = Description of Artificial Sequence: Synthetic coding sequence
  source 1..105: mol_type = other DNA
atgatcgaggtgctgaccaccaccgacagccagaagctgctgcaccagctgaatgctcttttagaacaggaatccaggtgtcagcccaagcggcattttttgtag

SEQ ID NO: 23727 - DNA, 1035 bp, synthetic construct
  misc_feature 1..1035: note = Description of Artificial Sequence: Synthetic coding sequence
  source 1..1035: mol_type = other DNA
atgaaggacctgggcgccgagcacctggccggccacgagggcgtgcagctactgggcctgctgaacgtgtacttagagcaggaggagcggttccagcccagagaaaagggattatcgctgatagaggccaccccagagaatgacaatactctgtgtcccgggttaagaaatgccaaggtagaggatttgcgaagtttagccaacttttttggctcatgtactgagacttttgtcctggcagtgaacatactcgacagattcctcgctctgatgaaggttaaacccaagcatctctcctgtatcggcgtgtgctcatttctcctcgctgctcggatcgtggaagaagattgtaacattcccagcacacacgatgtcattcgaatctcccagtgtaagtgtactgcaagtgacatcaagcgaatggagaagatcatcagcgagaaactgcattacgaactggaagccacgaccgccttgaattttttacacttgtaccacacaataatactgtgccacaccagcgaacgaaaggagattctgtctctggacaagctggaggcacagttgaaggcttgcaattgtcggctgatcttttcaaaagcaaagccctccgtgctcgctctgtgcctcctgaatcttgaggtagagaccctcaaatccgtggagctgctggaaattcttctcttagttaagaaacacagtaagattaacgacacggagtttttttactggcgtgaactggtgtccaaatgtctggcggaatattcatcacccgagtgttgcaaaccagatctcaaaaagttggtctggattgtgagtagaagaactgctcagaatctgcacaattcgtattattcggtacctgaactccctactatcccagaaggcgggtgttttgacgagtccgaatctgaggactcgtgtgaggacatgagttgtggagaggagagtctgagttcctctcctcctagcgatcaagaatgcacttttttctttaattttaaggtggcccaaacactctgcttcccttcctag

SEQ ID NO: 23728 - DNA, 1035 bp, synthetic construct
  misc_feature 1..1035: note = Description of Artificial Sequence: Synthetic coding sequence
  source 1..1035: mol_type = other DNA
atgaaggacctgggcgccgagcacctggccggccacgagggcgtgcagctgttaggcttgttgaacgtctacttggaacaagaagaacgttttcaaccccgggaaaagggtctgtccctcatagaggcgactcccgagaacgacaacacactttgtcccggactcaggaatgccaaagttgaagatctccgaagtctcgctaattttttcgggtcatgtactgagacattcgtgctggctgttaatattttggacagatttctggcacttatgaaagttaagccaaaacacctctcctgtatcggcgtctgtagctttctcctcgccgctcggatcgtggaggaggattgtaacataccaagcacccacgacgtaatccggatcagtcagtgtaaatgcacagcatctgatattaaaagaatggagaaaatcatctcggagaagctgcattatgagctggaggctacaactgccttgaacttcctgcatctgtatcacacaattattctgtgccatactagcgaaaggaaagagattctttccctcgacaagctggaggctcaactgaaagcttgtaattgcaggcttattttttccaaggctaagccttcagtgctcgcactctgcttactgaatctagaggtagagactctgaagtccgtggaattgttggagatcttgcttcttgtgaagaaacacagcaagatcaacgacaccgagtttttttactggcgagagctggtgagtaaatgcctggcggagtactcaagcccagagtgttgcaaacctgacttgaaaaaactagtttggattgtgagccgcaggaccgcccagaatctgcataattcgtattacagcgtgcccgagctgccaaccattcctgaaggtggctgcttcgatgaatcagagagctccgtagcccaggcgggtgtgcagtggccagatctttcctcgttccaacccccccccacccggttcaagcggttctcttgtctgagcctacgtagcagttgggactactcttcatggacatag

SEQ ID NO: 23729 - DNA, 1035 bp, synthetic construct
  misc_feature 1..1035: note = Description of Artificial Sequence: Synthetic coding sequence
  source 1..1035: mol_type = other DNA
atgaaggacctgggcgccgagcacctggccggccacgagggcgtgcaattactagggttgctgaacgtgtatctcgagcaagaagagagattccaacctagggaaaaaggcctgtctctcattgaagcaaccccagaaaacgacaacactctgtgccctgggcttcgcaatgccaaagtggaggacctgcggtcccttgccaatttctttgggtcctgcaccgaaacctttgtattagccgtgaatatcctggatcggttcttagcactgatgaaagttaaacccaaacacctatcatgtatcggcgtatgcagctttcttctcgcagcaaggattgtcgaggaggattgcaacattccgagcacccacgatgtaatcaggataagccagtgtaagtgtacggccagtgatattaagcggatggaaaagattatatcggagaaactccactacgagctggaggcgactactgccctcaacttcttgcatctataccacacgatcatcctgtgtcacactagcgaacgcaaggagattctcagccttgacaaactggaggctcagctcaaggcatgcaattgtcgcttaatattcagtaaggcaaagccatctgtcctggctttgtgtctgctaaatctggaagttgaaacacttaaatccgttgaactcctcgagatattgctcttagtgaaaaaacattctaagattaacgataccgaatttttttattggcgtgaattagtttcaaagtgtttagccgagtactcttctcccgagtgttgtaaaccagacctaaagaaattagtgtggatagtttccaggcgcaccgcacagaatctgcataactcctactacagtgttcccgagctgcccaccattccggaagggggctgttttgatgagtcagagtccgaggattcttgtgaggacatgtcttgcggagaagaatccttgagctcatcccctccttctgaccaagagtgtacctttttcttcaattttaaggtggcacagacactttgtttccctagctag

SEQ ID NO: 23730 - DNA, 1035 bp, synthetic construct
  misc_feature 1..1035: note = Description of Artificial Sequence: Synthetic coding sequence
  source 1..1035: mol_type = other DNA
atgaaggacctgggcgccgagcacctggccggccacgagggcgtgcagttactcgggttgctgaatgtttacctcgaacaagaagaacgctttcagcccagggaaaaaggtctgtccctgatcgaggcaacacctgaaaacgacaacaccctttgtcccggtttgcgaaacgcgaaggttgaagaccttcgatccttggcgaacttttttggctcttgtaccgagacattcgttctagcagttaatattcttgaccgctttctggccctcatgaaggtgaaaccaaagcatctcagctgtatcggcgtctgttcctttctcctagccgcccggatcgtggaggaggactgcaacataccatcaactcacgatgtgattagaatcagccaatgtaagtgtaccgcatctgatattaaacgcatggaaaagatcatttctgagaaactgcattacgaattggaggccaccacggctctgaacttcctacacctctatcatactataattctctgccatacctccgagcgtaaggaaatcctgtctctcgataaattggaggctcagctgaaagcctgtaattgtagactgattttcagcaaggcaaagccctcagtcctggctttgtgtctgctgaacctggaagtggagaccctgaagtcggtggaactgctggaaatcctgctgctggtaaagaaacattcaaaaataaatgacacagaattcttctactggcgcgagcttgtgtctaagtgtttggctgagtactcaagtcctgagtgctgcaaacctgacctgaaaaaacttgtttggatcgtttcccgccgtactgcccagaatctccacaattcatattatagcgtgccagagttgccgacaatccctgaaggcggctgctttgacgagagcgaaagcgaagatagctgcgaggatatgtcatgcggcgaggagagtctctccagcagccccccatctgaccaagagtgtaccttcttttttaacttcaaagtggcccagaccctgtgttttccatcctag

SEQ ID NO: 23731 - DNA, 483 bp, synthetic construct
  misc_feature 1..483: note = Description of Artificial Sequence: Synthetic coding sequence
  source 1..483: mol_type = other DNA
atgaaggacctgggcgccgagcacctggccggccacgagggcgtgcagctactcgggctcctgaatgtctacttagagcaggaagagaggtttcaaccacgtgagaagggactgagtctgattgaagcaactcctgagaatgacaacacactttgcccagggctccggaatgccaaggtcgaagaccttcggagcttggcaaacttcttcggcagctgtaccgagacattcgtcctcgctgtgaatatcctggatcggtttttagcactgatgaaagtgaagcccaagcatctgtcttgcattggggtctgttcctttcttctggccgcccgcatcgtagaggaggattgtaatatcccctccacacatgacgtcattaggatcagccagtgcaagtgcaccgcaagcgacatcaaacgtatggagaagatcatctcggaaaaactccattacgagctggaggccaccactgcactaaactag

SEQ ID NO: 23732 - DNA, 972 bp, synthetic construct
  misc_feature 1..972: note = Description of Artificial Sequence: Synthetic coding sequence
  source 1..972: mol_type = other DNA
atgtaccacaacagcagccagaagcggcactggaccttcagcagcgaggaacagctggcccggctgagagcagatgccaatcgtaagtttagatgtaaggctgtggcgaatggcaaggttctgccaaacgacccggtgttcctcgagccccacgaggagatgactctgtgcaagtattacgaaaagcgtctgttagagttctgttccgtcttcaagccggccatgccacgctcagtggtggggaccgcatgtatgtattttaaacggttttatctcaataattcggtgatggaataccacccaagaataattatgctgacctgcgcctttctcgcctgtaaagttgacgagtttaacgttagctcgccacagtttgtaggtaacctgcgagagtcccccctgggtcaggagaaggcattggagcagatcctagaatacgagctgctattgatccaacagcttaattttcacttgattgtgcacaatccttaccggcctttcgagggattcctgatcgatctaaaaacccgataccccatccttgaaaaccccgaaattctccgtaaaacggcagacgactttttgaataggatagcccttaccgacgcttacctgttgtacactcccagccagattgccctaactgcaattctctccagtgcttccagggccggaatcaccatggaaagctacttgtcagagtccctaatgcttaaagaaaacagaacatgtctctctcagctactcgacattatgaagagcatgcggaacctcgtgaaaaagtacgagcctcctaggtccgaggaagtggcggtgttgaagcagaagctggagcgatgtcacagtgccgaactggccctaaatgtcataaccaaaaagcgcaaaggttacgaagacgacgattatgtcagcaagaagtcgaagcatgaagaggaggagtggactgacgacgacctggtggagagcttatag

SEQ ID NO: 23733 - DNA, 768 bp, synthetic construct
  misc_feature 1..768: note = Description of Artificial Sequence: Synthetic coding sequence
  source 1..768: mol_type = other DNA
atgccccggagcgtggtgggcaccgcctgcatgtacttcaagcggttttatctaaacaacagtgtgatggaatatcacccaagaatcataatgctgacttgcgcgttcctggcctgtaaggtagatgagtttaacgtgagcagtcctcaatttgtgggcaacctcagggagtcacctcttggccaggaaaaggccctcgagcagatcctagaatatgagctgctgttgatccagcagctcaactttcatctgatagtacataacccatacaggcctttcgaaggttttcttatcgacctaaagactcgataccccatcctggaaaatccggaaattttacgcaagacagctgatgattttctcaatcgcatagcgttaaccgacgcctatttgttatataccccgagtcagatcgccttgactgctatactgtcatcggcatccagggctgggatcacaatggagtcctatttatcagagtccttgatgctgaaggagaataggacttgcctaagtcagctcttggatatcatgaaatccatgcggaatttagttaaaaaatacgaaccaccgcgcagtgaggaagtggctgtattgaaacaaaagcttgagcggtgccactcggccgagctggcactcaacgtaataaccaagaagagaaagggatatgaggatgatgactatgtgagtaagaaaagcaaacatgaggaggtgtgttttacccccaagatgaactcaaagctgtttctactttacattctggtctag

SEQ ID NO: 23734 - DNA, 750 bp, synthetic construct
  misc_feature 1..750: note = Description of Artificial Sequence: Synthetic coding sequence
  source 1..750: mol_type = other DNA
atgccccggagcgtggtgggcaccgcctgcatgtacttcaagcggttctacctgaacaatagtgtaatggagtaccaccctcgcatcatcatgcttacatgtgctttcctcgcatgcaaggttgatgaattcaacgtctccagcccacagtttgtaggcaacctgagagagagccccctgggacaggaaaaggcccttgaacagatcctggaatacgagctcctgctcattcaacagctcaattttcatctcattgtacacaacccctacaggccgttcgaagggtttttgatcgacctgaaaacgcggtaccctatcctggagaatccagagattttgcggaagaccgccgacgattttctcaaccgcatcgccctgaccgacgcttatctcctttatacacccagccagatcgcactgaccgccattctatcctctgctagtagggccgggatcaccatggaaagttacctgtccgagagtttgatgttgaaagagaaccgcacctgcctgtcccagctcctggatattatgaaatcaatgaggaaccttgtgaagaaatatgaacccccacggtccgaggaggttgcagtgctgaaacagaagctggagcggtgccattccgccgagctggccctcaatgttatcactaaaaagcgaaaaggatatgaggatgacgactatgtgagcaaaaaatcgaaacatgaagaagaggagtggactgacgatgacctcgtggagagcctttag

SEQ ID NO: 23735 - DNA, 1053 bp, synthetic construct
  misc_feature 1..1053: note = Description of Artificial Sequence: Synthetic coding sequence
  source 1..1053: mol_type = other DNA
atggtgaccccctgccccaccagccccagcagccccgccgcccgggctggaaggagagataacgatcagaacctacgggctccagtgaaaaaatcaaggcgaccccgcttgcggcgaaaacagccactgcacccacttaatccttgtcccctgccaggagatagcggcatctgcgacctgtttgagagcccttccagcggttcagacggcgcagaatcaccctctgctgccagaggcggcagccccctgcctggcccggcacaacccgtcgctcagttagacctccaaacgtttcgagactatgggcagagctgctatgcgttcagaaaggcccaagaatctcactttcacccacgagaggcattggcccggcagccccaggtgaccgcagagtccaggtgcaagctcttgagttggttaattccagtccaccggcagttcgggctgtccttcgagtctctttgcctcacagttaacaccttggatcggtttctgaccacgacaccagtcgccgcagattgtttccagctgctgggagtgacaagtctgttgatcgcttgcaaacaggtggaggtccaccctcctcgtgtgaaacagcttctggcactgtgctgtggagccttttcacgccaacagctgtgcaatcttgagtgtatcgtgctgcacaaacttcacttcacgttgggcgcccctaccatctccttctttttggagcattttactcacgcaagagtggaggcaggccaggcagaggcatctgaagctctggaggcccaggccctggccagaggagtcgcggagttgtcactggcagactatgcttttacttcatactccccttcactgctcgcgatctgctgcctggcccttgcagacagaatgcttcgtgtttcaaggcctgtggatctacgcctcggcgaccatcctgaagccgcattggaggattgtatgggtaagcttcagctgctggtggcgatcaattcgacctcattgacccacatgttacctgttcagatttgtgagaaatgctccttacccccctcatcgaaatag

SEQ ID NO: 23736 - DNA, 2181 bp, synthetic construct
  misc_feature 1..2181: note = Description of Artificial Sequence: Synthetic coding sequence
  source 1..2181: mol_type = other DNA
atggagggcgagcggaagaacaacaacaagcggtggtacttcaccagggagcagctggaaaattcaccctcccgacggtttggcgtagatcctgataaggagctgtcctaccggcaacaggctgctaacttgttacaggacatggggcaaaggcttaatgtgagccagcttactatcaatacagccatcgtttacatgcatagattttatatgatccagtctttcactcagtttcctgggaatagcgtagctcccgctgctttattccttgcggcgaaggtcgaagaacaaccgaaaaaattagagcacgttattaaggtggcccacacatgtctacatccgcaggagtctctccccgatacacggtccgaagcctacctccagcaggtgcaggatctggtcatcttggagtccattatcctccagaccttgggcttcgaactcacaatcgaccatccgcacacacacgtagtgaaatgcacccagttggttcgggccagcaaagaccttgcccagacgagttattttatggccacaaacagcctacatttaacgactttctctctgcaatatactccgccagtggtggcgtgcgtctgtatccacttggcctgcaaatggtcgaactgggagatccctgtctctaccgatggcaaacattggtgggaatatgtggacgctacagtaactcttgagctcctggatgagctgacccacgaatttctgcaaatccttgaaaagacccctaatcgtttgaaaaggatttggaactggcgtgcctgtgaagccgcaaaaaaaactaaggccgacgaccgggggactgacgaaaaaacatccgagcaaactatcctgaacatgatcagccagtcttcaagtgacacaacgatagctggcttaatgtcgatgagcacgtcaacaacgtcagccgtgcccagtctccctgtgagcgaagagtccagcagcaatttgacttctgttgagatgttgcccggtaagcgctggctcagctcccagcccagctttaagttggaacccacacaggggcataggacttcagagaacctggccctcacgggagtcgaccactccctgccccaggacgggtcaaacgcattcatctcacagaaacaaaattccaagtcagttccgtctgctaaggttagcctaaaggaatatcgtgcgaaacatgctgaagagctggcagctcagaagcgccagctggaaaacatggaggccaacgtgaaaagccagtatgcttatgcagctcagaatttgctgagccaccatgatagccactcctccgtgattctcaagatgcccattgaaggaagcgagaaccctgagaggccctttcttgagaaggccgacaagaccgccctcaagatgcggattccagtggctggtggggataaggcagcatcgtctaaacccgaagaaattaaaatgaggataaaggtgcacgcggccgctgataagcacaatagcgtggaggactccgtgaccaagtcacgcgagcataaagagaagcacaagacacacccaagcaatcatcaccatcatcacaatcatcacagccacaaacactcacattcccaacttcctgtagggacaggcaacaagagaccgggagacccaaagcatagctcccagacatccaatctcgcccacaaaacctattctcttagcagctccttctcctcctcttcgagtaccagaaagagggggcccagcgaagaaacggggggggctgtgttcgaccacccggcaaagattgccaaatccacaaaatcctctagcttaaatttctcctttcccagtcttcctactatgggccaaatgcccggccactccagcgacaccagcggcctctccttttcccagccctcctgcaagactagagtgccccactccaagcttgataaaggccccaccggggctaacggacacaacactacacagactattgactaccaggataccgtcaacatgctccatagcctcttgtcagcccagggcgtgcagccaacccagccgacagcattcgaattcgtgagaccttactcagattatctcaaccctcgaagcggcggtatcagctctaggtctggcaacactgacaaacctcggcctccccctctgccgagcgagccccctcccccactgcctcctctaccaaaatag

SEQ ID NO: 23737 - DNA, 723 bp, synthetic construct
  misc_feature 1..723: note = Description of Artificial Sequence: Synthetic coding sequence
  source 1..723: mol_type = other DNA
atggaggactacaccaagatcgagaagatcggcgagggcacctacggcgtggtgtataaggggcgtcataagactaccggccaggtagtggcgatgaagaagattcgcctagagtccgaagaagagggcgttccctctacagccattagagaaatcagcctccttaaggagctgaggcaccctaacattgtgtccctgcaggacgtattaatgcaggattctcggttgtatctaattttcgagttcctatcaatggacctgaagaagtatcttgattccattcctccaggccagtacatggacagctcactggtgaaggtggtcacgctctggtaccggagcccagaggtgcttttaggatccgccaggtactcaaccccggtggatatttggtctatcggcactatctttgcagagctcgctacaaaaaagcccctcttccatggcgattcagagatcgaccagcttttccggatttttcgcgcactcggcacccccaacaatgaggtctggccagaggtggagagcttgcaggactataagaatacattcccaaagtggaaaccagggtccctcgccagccacgtgaaaaacctagatgagaacgggctggatctgctgagcaagatgctcatttatgatccagccaaacgcatttcgggaaagatggccctcaatcatccatattttaatgatttggataatcagatcaagaaaatgtag

SEQ ID NO: 23738 - DNA, 723 bp, synthetic construct
  misc_feature 1..723: note = Description of Artificial Sequence: Synthetic coding sequence
  source 1..723: mol_type = other DNA
atggaggactacaccaagatcgagaagatcggcgagggcacctacggcgtagtatataaaggccggcacaagacaactgggcaggtcgtggctatgaagaaaataagactggagtccgaagaggagggggtcccatccacagctatcagggagatctcactgctcaaagaactaagacacccaaatatcgtcagtctgcaggatgtgctgatgcaggattcacgactgtacctcatatttgagtttctcagcatggacctcaaaaaatacctggattcgatccctccaggacagtacatggactcttctctggtgaaagtcgtcaccctctggtacaggagccctgaggtcctgctcggctcagccagatattcgactcctgttgacatttggtctatcggtacaatttttgcagaactggccaccaaaaaaccgttgttccatggagacagcgagattgatcagctttttcggatctttagagcactggggacacccaataatgaagtgtggccagaggtcgaatcccttcaggactataagaacacctttccgaaatggaagcctgggtctctcgctagccacgtgaaaaatctggatgagaacggactggacttgctgtccaagatgctgatttacgaccctgctaagaggatcagtggaaagatggcccttaatcacccatatttcaacgacctcgacaaccagataaaaaaaatgtag

SEQ ID NO: 23739 - DNA, 894 bp, synthetic construct
  misc_feature 1..894: note = Description of Artificial Sequence: Synthetic coding sequence
  source 1..894: mol_type = other DNA
atggaggactacaccaagatcgagaagatcggcgagggcacctacggcgtcgtatataaggggaggcataagactaccggccaggtagttgcaatgaagaagatccgcctggagtctgaggaggaaggcgtaccgtctaccgccatccgagaaatctctctcctgaaggagctaaggcatcccaatatagtgtccctgcaagacgtgttgatgcaggatagtcgtctgtacctaatctttgaattccttagcatggacctgaagaaatacttagactccatccctcctggccagtacatggactcctccctggtcaaatcatacctctaccagatactgcagggcattgtattctgtcacagccggagggtgcttcaccgggatcttaagccacagaatctcctgatagacgacaaaggcacaatcaagttggccgactttggactcgctagagcttttggcatccctatacgcgtctacacccatgaggtggttacactgtggtacagatctccggaggtccttctcggtagtgcgagatattcaacaccagtggatatctggagtattggcactatctttgcggagctggccacaaagaaaccacttttccatggcgactcagagatagaccagctgttccgtattttccgggcactgggcacgcccaacaatgaagtctggcctgaggttgagagcttgcaagattacaagaacaccttccctaaatggaagcccggatccctcgccagtcacgtgaaaaatctcgatgaaaacgggctagatctgctctcgaagatgctgatatacgaccccgccaagcggatttcgggcaaaatggcccttaatcacccttattttaatgacttggacaaccaaatcaagaagatgtag

SEQ ID NO: 23740 - DNA, 894 bp, synthetic construct
  misc_feature 1..894: note = Description of Artificial Sequence: Synthetic coding sequence
  source 1..894: mol_type = other DNA
atggaggactacaccaagatcgagaagatcggcgagggcacctacggggtggtgtataaggggcgacataagacaacggggcaggtggttgcgatgaagaagatccggctcgaaagcgaagaagaaggggtgccgtccaccgccatcagggagatatcccttctcaaagaactcaggcacccaaatatagtctctctgcaggacgtcctaatgcaggactcaagattatatcttatcttcgagttcctctctatggaccttaagaagtacttggattctataccgccaggccagtatatggattccagcttggtaaagtcatacttgtaccagatactccagggaatagtgttctgccatagccgcagggtactgcatcgagatcttaagcctcagaatttattaatcgatgacaagggcactatcaagctcgctgatttcgggctggccagggcgtttggtattccaatccgggtctacacccacgaagccatcactctgtggtatcgcagccccgaagtacttctaggctccgccaggtactccactccagtggatatctggtcaattggaactatttttgccgaactggcgactaagaaaccccttttccatggggactccgagatcgatcaactgttcaggatatttagagcactaggaacgccaaataatgaggtgtggccggaggtggagagtctgcaagactacaagaacaccttcccaaagtggaagcctggaagcctggctagccacgtgaagaaccttgacgagaatggcctcgatctcttaagtaagatgctgatctatgacccggcaaagcggatttccggtaagatggcattgaaccacccatactttaatgacctggacaaccagattaaaaaaatgtag

SEQ ID NO: 23741 - DNA, 570 bp, synthetic construct
  misc_feature 1..570: note = Description of Artificial Sequence: Synthetic coding sequence
  source 1..570: mol_type = other DNA
atggaggactacaccaagatcgagaagatcggcgagggcacctacggagtcgtgtacaagggacggcacaagaccacaggtcaggtcgtagctatgaagaagattcgcttggagtcagaagaggaaggtgtaccctccactgccataagggaaattagtctattgaaggagttacggcaccccaatatcgttagtctgcaggacgttttgatgcaggactcaaggttgtacttaatcttcgagtttcttagtatggacctgaaaaaatatcttgattccattccccctgggcagtatatggactcctctctcgtgaagagttatttataccaaatcctgcaaggtatcgtgttttgccattcaagaagggtgctccatcgcgatctaaagcctcagaacctgcttatcgatgacaagggaactattaaactcgctgatttcggcttggcccgtgcattcgggattcccataagagtatacacacacgaggcaatcaccctctggtatcgatcacccgaggttcttctgggctctgcaagatactctacacccgttgacatctggtcatag

SEQ ID NO: 23742 - DNA, 897 bp, synthetic construct
  misc_feature 1..897: note = Description of Artificial Sequence: Synthetic coding sequence
  source 1..897: mol_type = other DNA
atggagaacttccagaaggtggagaagatcggcgagggcacctacggagtggtgtacaaggcacggaacaagcttaccggagaggtcgtcgccctgaaaaaaatccggttagacaccgaaaccgagggcgtgccctctaccgccatcagggaaataagcctgctcaaagaactgaatcatcctaacattgtaaaactcctggacgtgatccatactgagaataagctctacctagtgtttgagtttctgcaccaggatctcaagaagttcatggacgctagtgccctgaccggaattcctttgcctctcatcaaatcttatctgttccagcttctgcagggtctggcgttttgccactcccaccgcgtactacacagggacctgaagccccagaatctccttattaacaccgaaggcgctatcaagctggccgacttcggactggcaagagcattcggagtccctgtccgcacctatacacacgaagtcgttaccttgtggtacagggcgcccgagatcctactcggatgcaagtactactccaccgccgtagacatttggtctcttggatgcatttttgctgaaatggtgacaaggcgcgcgcttttcccaggggattctgaaattgaccagttgttccgaatcttccggacgttggggaccccagatgaagtggtgtggccaggggtgacatcaatgcccgactataaaccatcatttcctaaatgggcacgccaggactttagcaaggtggtgccccccttggacgaagacggccgaagcctgttgtcccagatgctgcattatgacccaaataagcggataagcgcaaaagccgcattggcgcatcccttctttcaggacgtgaccaaacctgttccacatctccgcctctag

SEQ ID NO: 23743 - DNA, 795 bp, synthetic construct
  misc_feature 1..795: note = Description of Artificial Sequence: Synthetic coding sequence
  source 1..795: mol_type = other DNA
atggagaacttccagaaggtggagaagatcggcgagggcacctacggcgttgtgtataaagcaagaaataagctgaccggtgaagtcgtggcgttgaagaagatccggttggataccgaaaccgagggcgtgccgtccacagccatcagagagatttcactgctgaaggagttaaaccacccgaatatagtcaagctgctagacgtcattcataccgagaacaaattgtatctagtgtttgaatttctgcaccaggacctgaagaaatttatggatgccagcgccttgacgggcatcccactcccgcttattaaatcttacctgtttcaattgctacaggggcttgcattttgtcatagccaccgggttctacaccgggacctgaagccccagaacttactgataaatactgaaggcgctataaagctcgcggacttcggtcttgcgagagccttcggagtccccgtacgaacctatacccatgaggttaccagacgcgctttattccctggcgattctgagattgaccagctgtttcgaatttttcggacactagggacccctgacgaggtggtctggcctggagtcacctctatgccggattataagccatcctttcccaaatgggctagacaggacttcagcaaggtggtgccgcccctggatgaggacggtagatctctgctgtcacaaatgttgcactacgatcctaacaaacgtatcagtgctaaagcggcactagctcaccccttttttcaggatgtgaccaaacccgtcccccatcttcgtctctag

SEQ ID NO: 23744 - DNA, 348 bp, synthetic construct
  misc_feature 1..348: note = Description of Artificial Sequence: Synthetic coding sequence
  source 1..348: mol_type = other DNA
atgagctacaagcccaacctggccgcccacatgcccgccgccgccttgaatgctgcgggatcggtgcactctccatccacgtctatggccacttcttctcagtaccgccagctcctgtctgactatggtcccccaagcttaggatatactcaaggtacaggaaactcccaggttccacagagcaaatatgcagagctgctcgcaattatcgaagaattgggtaaggagatcagacccacatacgccgggtcaaaaagtgctatggagaggctgaagcgagggattatccacgcccgtggtttggtgcgggagtgtttagccgagactgagaggaatgcccgctcctag

SEQ ID NO: 23745 - DNA, 912 bp, synthetic construct
  misc_feature 1..912: note = Description of Artificial Sequence: Synthetic coding sequence
  source 1..912: mol_type = other DNA
atggccaccagccggtacgagcccgtggccgagatcggcgtgggcgcgtatggaactgtgtacaaagcaagggatccacactccgggcacttcgtagccctaaaatccgtgcgggtgcctaacgggggtggtggagggggaggtctccccatctccactgttcgggaggtcgcactgctgcgtagactggaggcattcgaacatccgaatgtggtgaggctgatggatgtgtgtgccacatcacgcacagatcgcgagatcaaggtcacactcgtgtttgaacacgtggatcaggatcttcgcacctatttggacaaggcacctccgccaggcctcccggccgaaactatcaaagacctcatgcgacaatttctgcgcggcctcgactttctgcatgctaactgcatcgtccacagagatctaaagcccgagaatatcctggtgacttccggagggaccgtgaaactggctgacttcggactggcaaggatctactcatatcagatggctctcactccggtggtggtgaccctttggtatcgcgcccctgaggtcctcctgcaatccacttacgccacgcctgtggatatgtggtcagtggggtgtatcttcgccgagatgttcagaagaaagccactattttgtgggaattctgaagccgatcagttgggtaagatttttgacctgattgggctgcctccagaagatgactggccccgcgacgtctctctcccccggggagccttcccgccaagagggccccgcccggtgcagagcgtggtgcccgagatggaggagagcggggcacaactccttcttgaaatgctgactttcaacccccacaagagaatatccgcattccgagcgctccagcatagctaccttcacaaagatgaggggaatcccgagtag

SEQ ID NO: 23746 - DNA, 336 bp, synthetic construct
  misc_feature 1..336: note = Description of Artificial Sequence: Synthetic coding sequence
  source 1..336: mol_type = other DNA
atggccaccagccggtacgagcccgtggccgagatcggcgtgggcgcttatggcaccgtctacaaggcaagagacccccatagcggccatttcgtggcactaaaaagcgtgagagtccccaacggaggcggaggaggcggtgggctacccatctccaccgttagagaggttgcactcctcaggcggttagaggccttcgaacaccccaatgtggttcgtttgatggatgtctgcgccacctccaggacggatcgcgaaatcaagagatgttttgtagaaagcttaagctccgttgaaacacttaagccaaccagttgggcaaagtcgttaacttag

SEQ ID NO: 23747 - DNA, 552 bp, synthetic construct
  misc_feature 1..552: note = Description of Artificial Sequence: Synthetic coding sequence
  source 1..552: mol_type = other DNA
atgcggcagttcctgcggggcctggacttcctgcacgccaactgcatcgtgcaccgcgaccttaaaccagaaaatattctggtcacctcaggcgggactgtgaaacttgctgattttggcctggcccgcatctatagctatcagatggccctgacccccgtggtagtgaccctctggtacagggctcctgaagtgctgctccaaagcacatacgccactcccgtggatatgtggagtgtgggttgcatttttgcggagatgtttcgcagaaagcctctgttctgtgggaactccgaggctgatcagcttgggaaaatcttcgacctcatcggtctgccgcctgaggacgactggccacgggacgtctctcttccccgcggagcattccccccccgcggccctagacccgtccagtcagtcgttccggaaatggaagagagcggagcacagcttttgctggaaatgctgacgttcaatccgcataaacgcatctcagcctttagggccctacagcatagctatctgcacaaagatgagggaaatcccgagtag

SEQ ID NO: 23748 - skipped

SEQ ID NO: 23749 - DNA, 612 bp, synthetic construct
  misc_feature 1..612: note = Description of Artificial Sequence: Synthetic coding sequence
  source 1..612: mol_type = other DNA
atggccaccagccggtacgagcccgtggccgagatcggcgtgggcgcctacgggaccgtctataaagcccgcgatccccattcgggccattttgtggcattgaagtccgtgcgcgtccctaatggtggcggcggaggagggggactgcctatttcaacagtgcgtgaggtcgcactgttacggaggcttgaggcgtttgaacatccaaacgtggtccgactgatggatgtgtgtgcaaccagccgaacagacagagagatcaaagttacactcgtgtttgaacacgtagaccaagatttacgtacatatctggacaaggcacctcctcctggtttgcccgcagaaaccatcaaagacctgatgaggcaattcttaagagggctggattttctccacgcaaattgtatcgtacatcgtgacctgaaacctgaaaatattttagtgacctccggaggaacggtgaaattggctgacttcggcctggcccggatatattcctaccagatggccctaaccccagtggtcgtcaccctctggtatagggctcccgaggttctgctgcaaagtacctacgccactcccgtcgatatgtggagcgttggctgtatctag

SEQ ID NO: 23750 - DNA, 513 bp, synthetic construct
  misc_feature 1..513: note = Description of Artificial Sequence: Synthetic coding sequence
  source 1..513: mol_type = other DNA
atggccaccagccggtacgagcccgtggccgagatcggcgtgggcgcctatggaacagtgtacaaggctcgcgatccacattcaggacattttgtggcactgaagtccgtgcgggttcccaatggtggaggcggcggtggtggcctgccaatttccacggtgagagaggtagccctgcttagaagacttgaggcttttgaacatcccaacgtggtaagactaatggatgtctgcgctacttcccggaccgatagggagattaaagtcactctcgtctttgagcacgtggaccaggatctgcgcacctatttagataaagcccccccgccaggcctacccgccgaaaccatcaaagatcttatgcgtcaattcctccgcggattggattttcttcacgcaaactgcatagtgcatagagatctaaagcctgaaaatatccttgtaacctctggcggcaccgtgaaactggccgatttcgggctagcccgaatttattcttatcaaatggcatag

SEQ ID NO: 23751 - DNA, 348 bp, synthetic construct
  misc_feature 1..348: note = Description of Artificial Sequence: Synthetic coding sequence
  source 1..348: mol_type = other DNA
atggccaccagccggtacgagcccgtggccgagatcggcgtgggcgcttatggcaccgtttataaagcgcgggacccacactccggtcactttgtggctctcaagagcgtgagggtaccaaatggcggggggggaggcgggggccttcctatctctactgtgagggaagtagcgcttctgcggcggcttgaggctttcgaacacccaaacgttgtgcgactcatggatgtatgcgccacttctcggacggacagagaaattaaagttacactggtgttcgaacatgttgaccaggatctcaggacctatctggacaaggcccctccacctggtttgccggcagagtag

SEQ ID NO: 23752 - DNA, 924 bp, synthetic construct
  misc_feature 1..924: note = Description of Artificial Sequence: Synthetic coding sequence
  source 1..924: mol_type = other DNA
atgggcaccgtgctgagcctgagccccagctaccggaaggccaccctctttgaagatggagcagccacagtgggccactatactgctgtgcagaacagcaagaatgcaaaagacaaaaacttgaagagacatagcatcatctcggtgttaccatggaaaagaatcgtggccgtgtctgctaagaaaaagaactctaaaaaggtccagcctaattccagttatcagaataatattacccacctgaataatgaaaacttaaaaaagagcttgtcttgtgcaaaccttagtacttttgcccagcctccacctgcccagccacctgccccccctgcatcacagctgtcgggatcccagacaggagggagttcttccgtgaagaaggcgccccaccccgcagttacttcggctgggacgcctaaaagagtcattgtgcaggcgtccacctcagagttgctgcgctgccttggtgagttcctgtgtagaagatgttaccgactgaaacacctctccccaacagatccagtgctgtggttgaggtctgtggatagatcgctgctgcttcaaggctggcaggaccagggattcattacccctgctaatgtggttttcctgtacatgttgtgtcgcgacgtgatatcttctgaggtcggtagcgatcacgaattacaggccgttctcctcacctgtttgtatctgagctactcctacatgggcaatgaaattagttaccccctgaagccgtttctggtcgaatcctgtaaggaggctttctgggaccgctgcctgtccgttattaatctgatgtcatctaagatgctgcagataaatgcggatccccattacttcacgcaggtgttttctgatctgaagaatgagtctggccaagaagacaagaagcgtctcttgttgggcctggatcggtag

SEQ ID NO: 23753 - DNA, 981 bp, synthetic construct
  misc_feature 1..981: note = Description of Artificial Sequence: Synthetic coding sequence
  source 1..981: mol_type = other DNA
atggagaaggacggcctgtgccgggccgaccagcagtacgagtgcgtagctgagatcggggaaggcgcatacgggaaagttttcaaagcccgtgatctaaagaatggcggacgattcgtcgcgttgaagagggttagggtgcagaccggtgaagaggggatgccactcagtactatacgggaagtggccgtgctgcgacacctggagacatttgagcacccgaacgtggttagactgttcgacgtttgtaccgtgtcccgcaccgatcgagagactaaattgacccttgtctttgaacacgtcgatcaagatctgacaacatacttggataaagtccccgagccgggtgtgccaactgagacgatcaaggacatgatgttccagctgctcaggggtctggactttctgcacagccatagagtagtccatcgggacctgaaacctcagaacatcttagttacaagctccggacagattaagctagcagattttggcctggcaagaatttattcatttcaaatggcgttgacatctgtcgtcgtcacattatggtatagagccccagaagttctcctgcagtcttcgtatgccactccagttgatttgtggtccgtgggctgcatcttcgcagagatgtttagaagaaagcctctgttccgcggctcctctgacgtagatcagctaggtaaaatcctcgatgtaatcggactgcctggtgaggaagactggccccgagacgttgctctccctcgacaggcatttcacagcaaatccgcccagccaatcgagaagttcgtgaccgacattgatgagttgggcaaagacctcctgcttaagtgcctcacattcaaccctgcaaaacggatcagcgcttactctgctctgtcacatccatatttccaggacctcgagcgctgcaaggaaaatttagacagtcatttaccaccatctcagaatacatcagaacttaacactgcttag

SEQ ID NO: 23754 - DNA, 981 bp, synthetic construct
  misc_feature 1..981: note = Description of Artificial Sequence: Synthetic coding sequence
  source 1..981: mol_type = other DNA
atggagaaggacggcctgtgccgggccgaccagcagtacgagtgcgtcgccgaaatcggcgaaggggcgtacggaaaggtttttaaagcgcgagatctgaagaacggtggacggtttgttgcgctgaagcgtgtgagggtccaaacaggggaagaggggatgcccctgagcacaatcagggaagtcgctgttctgagacacctcgaaacttttgagcaccctaacgtggtaaggctctttgatgtttgtaccgtgtcgaggactgatcgcgagactaagcttaccctcgtgttcgagcacgtggatcaagacctcactacttacctcgacaaggtaccagaacccggcgtgcccactgagaccatcaaggacatgatgttccagctccttagaggattggactttctgcactcccatcgtgtggtgcaccgcgacttgaagccccaaaatatcctagttaccagtagtggccagattaagctggccgatttcggcttggcaaggatatactctttccagatggccctgacctcagtcgttgttaccctctggtatcgcgcccccgaagtgttgcttcagtcatcttatgctacgccggtggacttgtggtcagtgggttgtatctttgctgagatgtttagaaggaagcccctgtttcgcggttccagcgatgttgaccagctagggaaaattctcgacgtcattggcctccccggcgaagaagactggcctagggatgttgcccttcccaggcaagccttccatagcaaatctgcccaacccatcgagaaatttgtgacggacatcgacgagctaggtaaagatcttctgctgaaatgcctcacctttaatcccgcgaagcgcataagtgcatatagtgctctgtcgcatccctattttcaggaccttgagcgctgtaaggagaatctggactcccacttgccacccagccagaatacctcagagctgaatacagcctag

SEQ ID NO: 23755 - DNA, 1041 bp, synthetic construct
  misc_feature 1..1041: note = Description of Artificial Sequence: Synthetic coding sequence
  source 1..1041: mol_type = other DNA
atggccctggacgtgaagagccgggccaagcggtacgagaagctggactttctgggagaagggcagttcgctacagtctataaagcacgcgacaagaacacgaatcagattgtggctataaagaagatcaagctgggtcatagatctgaagccaaagacggcataaacagaacagcgctgcgggaaatcaaactccttcaggagttgtctcatcccaacattataggtctgctggatgcatttgggcataagagtaacatttccctcgtattcgacttcatggaaaccgacctcgaagtgatcattaaggataactccctggtcctgaccccgtcccatatcaaggcatacatgctgatgacgctccagggtttagagtatcttcatcagcactggatcctgcatcgggacttgaaacccaacaatctgctacttgatgaaaacggcgttctgaaattggcagactttggcctggctaaatcattcggctcccccaaccgggcctacacgcaccaggttgttacgaggtggtaccgagcccctgagcttctttttggtgccagaatgtatggcgttggtgtcgacatgtgggccgtgggctgtatcctggccgagttactgctccgagtcccgtttctgccaggcgacagtgacctggatcaactgacccgcatattcgaaaccctgggaaccccaacagaagagcagtggcccgacatgtgttcgttgcctgactatgtgacgtttaagtccttccccggtatccccttgcaccacatcttctccgccgcgggggatgatctgttagacctgatccagggcttgttcctttttaacccttgcgcacgcattaccgcgactcaggcactgaaaatgaaatacttttccaataggcccggtcccactcctgggtgtcagctgccgagaccaaattgccccgtggaaaccttaaaggaacagagcaaccctgcccttgcaattaaaaggaaaaggactgaagcactcgagcagggcggactgccaaaaaagttgattttctag

SEQ ID NO: 23756 - DNA, 1395 bp, synthetic construct
  misc_feature 1..1395: note = Description of Artificial Sequence: Synthetic coding sequence
  source 1..1395: mol_type = other DNA
atggactacgacttcaaggtgaagctgagcagcgagcgggagcgggtagaagacctgtttgagtacgagggatgtaaggtcggtcgcgggacatatggccacgtatacaaagccaaacggaaggacggtaaagatgacaaggattatgccttaaagcagattgagggaaccggcatctctatgagcgcgtgtagggagatcgcactattacgagaactgaaacaccctaacgttatcagtctgcagaaagtctttctctcacacgccgatagaaaagtttggctgctcttcgactacgccgagcatgacctttggcacattatcaaatttcacagagcctcaaaggctaacaagaagcctgtgcagctcccaaggggtatggttaaatccctcttgtatcaaatcctggatgggatccactatctgcacgctaattgggtcttgcacagagacctcaagccggcgaacattctcgtgatgggagagggccccgaacggggaagagttaaaattgccgatatgggtttcgccaggcttttcaactctcctctcaaaccccttgctgacttagatcccgtggttgtaacattttggtacagagcacccgaattactacttggagcacgacattacactaaggcgatcgatatttgggcaatcggctgtatttttgccgagctgctcacttccgagccaatctttcactgccgtcaggaggacatcaagacatccaatccctaccatcatgatcagctggataggatttttaatgtgatgggcttccctgccgacaaggactgggaagacatcaagaagatgcctgagcactccacattaatgaaggactttagaaggaatacgtacaccaattgttccctgatcaaatatatggagaaacacaaggtcaaaccggactctaaggctttccatctgttacaaaagctcttgaccatggacccaattaaacgcataacatcggaacaggccatgcaggatccttatttcctcgaggaccccctccccactagcgatgttttcgctgggtgtcagatcccctatcccaagagggagtttttgactgaggaggaacctgatgacaaaggcgataagaaaaaccagcagcaacagcaaggaaacaaccacaccaacggaactggacaccctggaaaccaagactcatcccacactcagggtccgccccttaaaaaggtacgtgtcgtccctcccacaactactagtgggggactcattatgacgtctgactatcagagatcaaaccctcatgccgcctaccctaaccctggccccagcacaagccagcctcaatcttctatgggttacagcgctacttctcagcagcctcctcaatattcacatcagacacatcggtattag

SEQ ID NO: 23757 - DNA, 495 bp, synthetic construct
  misc_feature 1..495: note = Description of Artificial Sequence: Synthetic coding sequence
  source 1..495: mol_type = other DNA
atggactacgacttcaaggtgaagctgagcagcgagcgggagcgggtggaggatctttttgagtacgaggggtgcaaggttggtagaggcacgtacgggcatgtgtacaaagccaaacgcaaggacggcaaagacgacaaagattatgccctaaagcaaatcgagggcacgggtatatccatgtcagcttgccgggaaatcgcactgttgcgggagttgaaacatcccaatgttataagcttacagaaggtgttcctttcccatgccgatcgtaaagtctggttactatttgactacgcagaacacgatctgtggcatataattaaatttcaccgagccagtaaagctaacaagaagcccgttcagcttccgcgtgggatggtgaaatctctcctttaccagattttggacggcattcattacttacacgcaaattgggttctccatagggatctactgacatgggcgttaccagattatctaatacacctctag

SEQ ID NO: 23758 - DNA, 1119 bp, synthetic construct
  misc_feature 1..1119: note = Description of Artificial Sequence: Synthetic coding sequence
  source 1..1119: mol_type = other DNA
atggccaagcagtacgacagcgtggagtgccccttctgcgacgaggtgtctaagtacgaaaaactggccaaaatcggccagggcacttttggcgaagttttcaaggccaggcaccgaaaaaccggccaaaaagtggccctaaaaaaagtgctgatggaaaatgaaaaagagggctttccaatcactgctctgagagagattaagatcttgcaattgctgaagcacgaaaacgtggtgaacttgatcgagatctgtaggacgaaggcctccccatacaatcgttgtaaaggctccatctacttagtctttgacttttgcgagcacgacctcgccgggctcctaagcaatgtgctcgtgaagtttacgctctcagagatcaaaagagtgatgcagatgctgctcaatggcctttactacatccataggaacaagatactgcaccgagacatgaaggctgccaacgtcctgattaccagggacggcgtactcaaacttgccgatttcggattagctagggcattcagcctggccaagaatagccagcctaatcgctacaccaaccgggtcgtgaccctctggtatcggcctccagagctcctgctgggagagcgggattacggacctcccatagacctgtggggcgcgggatgtattatggcagagatgtggacacggtctcctattatgcaggggaacacagaacagcaccagctcgccctaatctcgcagctctgtggaagcataacccctgaagtgtggcccaacgtggacaattacgaattatacgaaaaattggagctcgtaaaggggcagaagcgtaaggtcaaggatcgccttaaagcctacgtcagagacccttatgcccttgacttgattgacaaactcctggtacttgatccagcccagagaatcgatagcgatgatgccttaaatcatgacttcttctggtcggatcccatgccaagcgatctgaagggaatgctcagcacacacctcacatcaatgtttgaatacctggcccctcctaggcggaaggggtctcaaattacacagcagagcactaatcaatcaagaaaccccgccaccactaaccagactgagtttgaaagggtgttctag

SEQ ID NO: 23759 - DNA, 1470 bp, synthetic construct
  misc_feature 1..1470: note = Description of Artificial Sequence: Synthetic coding sequence
  source 1..1470: mol_type = other DNA
atgcagcgggacgcccccccccgggcccccgcccccgccccccggttgccagccccgcctatcggcgccgcagcctccagtgggggtggcgggggcggaggaagcggggggggaggaggcggggcgtccgccgcgcccgctccgccgggtctgtctggcaccactagtccccgcggtcctgggggcgggcgcagagctgaagaagctgggagtgcaccaagaggtcgcaagtggccatggaggagaaaatggcgtggaagaggcggcgcatggagtgccgccgccgctggcccaggagcaggcgcagccgctgctgcaactgggggtggcggaggcgcccttgaggccgccatggccaagcagtacgacagtgtggagtgtcccttctgcgacgaagtcagcaaatacgaaaaacttgccaagataggacaagggactttcggggaggttttcaaggcacgccatcggaaaaccggccaaaaagtagcgctcaagaaggtgctcatggaaaacgagaaagaagggtttcccatcaccgcgctgcgggagatcaaaattcttcagcttttgaaacatgagaacgtggttaatcttatcgagatttgtaggaccaaagccagcccgtataataggtgcaagggtagcatctacttggtgtttgatttttgtgaacacgacctcgccggactcctgagcaacgtgctggttaagtttacactgagtgagatcaagcgcgtcatgcagatgttgctcaatgggctgtattatatccaccgcaataaaattctacatagagatatgaaggccgctaacgtgcttatcacccgggatggcgtgctaaaactggctgattttgggctggcgagggctttcagcttggcaaagaacagccagcccaaccggtacaccaaccgggtggtgacactctggtacaggccacccgagctactgctcggggaaagagattatgggccaccaatcgacctttggggtgcagggtgcatcatggccgagatgtggaccagatctcctattatgcaggggaataccgagcagcaccagctggccctgatctcccagctgtgcggcagcataacgccagaggtgtggcccaatgtggacaactatgaactgtacgaaaagttggagctcgtgaagggacaaaagcgcaaggtcaaggatagacttaaggcgtacgtgcgtgacccttatgcgctggatctgattgataagctattggttctcgaccctgcccaacgaatcgactcggatgatgcattgaaccacgattttttttggagtgacccgatgccctccgacctaaagggaatgctgtcaacacacctcacgtccatgtttgaataccttgcccctcctcgcaggaagggctcacagattacccagcagtcaaccaaccagtctcgtaaccccgctaccaccaaccaaaccgagttcgaaagagtattctag

SEQ ID NO: 23760 - DNA, 585 bp, synthetic construct
  misc_feature 1..585: note = Description of Artificial Sequence: Synthetic coding sequence
  source 1..585: mol_type = other DNA
atgcagcgggacgcccccccccgggcccccgcccccgccccccggcttccggccccccccatcggtgccgctgcatccagtgggggcgggggcggcggaggatcgggaggcgggggaggcggcgccagtgcagctccagcccctcccggtctttcagggacaacaagccctaggggtcctggcggggggcggagggccgaggaagccgggagtgccccaagaggaaggaagtggccgtggcgtagaaaatggagaggccgcggcggggcttggtccgctgcggccgctggccccggtgccggggcagctgccgccgccacaggcggtggcgggggtgctctcgaagctgcgatggcgaaacagtacgattcagtagagtgccctttctgcgatgaggtctccaaatacgaaaaactggctaagatcggtcagggtaccttcggtgaggtatttaaagcccgtcatcgtaagaccgggcaaaaggttgccctgaagaaagtgcttatggaaaatgaaaaagagggcttccctataactgctctgagggaaataaagatcttgcagctcctgaaacatgagaattag

SEQ ID NO: 23761 - DNA, 495 bp, synthetic construct
  misc_feature 1..495: note = Description of Artificial Sequence: Synthetic coding sequence
  source 1..495: mol_type = other DNA
atgagcgagcccgccggcgacgtgcggcagaacccctgcggcagcaaagcttgtcgtcgtctgtttggccctgtggatagcgaacagctgagtagggattgtgacgcactgatggccggttgcattcaagaagcgcgagagcggtggaactttgactttgtcactgaaactccactggagggtgacttcgcgtgggagcgcgtcagagggctcggactgccaaagctctacctaccgacaggaccaaggagagggcgggatgaattgggtggcggccgcaggccgggaacttctccagccctattgcagggcaccgcagaagaagaccatgtggatcttagcctgagttgtacacttgtgcctcgatcaggcgagcaggctgaagggtccccaggcggacccggcgactcccagggtcgtaagcgtcgtcagacctcgatgactgacttctaccattctaaaagacggcttatcttctctaagcgcaagccatag

SEQ ID NO: 23762 - DNA, 495 bp, synthetic construct
  misc_feature 1..495: note = Description of Artificial Sequence: Synthetic coding sequence
  source 1..495: mol_type = other DNA
atgagcgagcccgccggcgacgtgcggcagaacccctgcggcagcaaagcctgccgccgcctgtttggtcctgtcgatagcgagcagttatcacgcgactgcgatgccttgatggctggctgcattcaggaggcaagggagcgctggaattttgatttcgttaccgaaacgccattggaaggcgatttcgcttgggaacgcgtgcgcggccttggactgccaaagctgtatctccccaccgggccacggcgcggcagagacgagctgggagggggaagaaggccggggactagccctgctctgctgcaagggaccgctgaggaggaccacgtcgatctcagtctgagctgcacccttgtgccccgatcgggcgagcaagcagaagggagcccaggcgggcccggggacagccagggtcgcaagcgtagacaaactagcatgacagatttctaccacagtaagcgtcgactcatcttctctaaacgaaaaccttag

SEQ ID NO: 23763 - DNA, 495 bp, synthetic construct
  misc_feature 1..495: note = Description of Artificial Sequence: Synthetic coding sequence
  source 1..495: mol_type = other DNA
atgagcgagcccgccggcgacgtgcggcagaacccctgcggcagcaaagcatgcagacgcctgtttgggccagtcgacagcgagcagctgtcaagagactgcgatgcactgatggcagggtgtatacaggaggctcgtgagcgatggaattttgattttgttaccgagacacctctcgagggggacttcgcctgggagcgggtgcggggccttgggcttccgaagttgtacctcccaactggtcctcgacgagggcgagacgaactaggaggagggcgaagaccaggtacatcacctgcactacttcagggcacagcagaagaggaccacgttgacctgagcctgtcatgtacactggtgcccagatctggcgagcaagccgaaggctctccgggcggaccaggagactcacagggacgcaagcgacgacagacatccatgacggatttctatcactctaagaggcggctgatctttagcaagcggaagccctag

SEQ ID NO: 23764 - DNA, 597 bp, synthetic construct
  misc_feature 1..597: note = Description of Artificial Sequence: Synthetic coding sequence
  source 1..597: mol_type = other DNA
atgtggggcgtgttccggcggcagaccacccacagcagcaacccccccctacctggacaacaaagttgctgcaatcaccgagattttttctgttcaggtgcaatgagcgaacccgccggtgacgtccgccaaaacccgtgtgggtccaaagcatgtcgtcgactgttcggtcccgtagactccgaacagctctccagagactgtgatgccttgatggccggatgcattcaggaggctcgtgagaggtggaattttgatttcgtgacagagacccccctggaaggggatttcgcctgggaaagagtccggggtctgggattgccaaaactctatctccccaccggcccccggagaggcagggatgaacttggtggcggccgcaggcccggaacatccccagcacttctgcaaggcaccgcagaagaggaccatgtggacctgtccctgtcgtgtaccctcgtgccaagaagcggggagcaggcggagggttctcctggcggtcctggcgacagccagggcagaaagcggagacagacatccatgactgatttttaccacagtaaaagacggctgatcttttccaaaaggaagccatag

SEQ ID NO: 23765 - DNA, 363 bp, synthetic construct
  misc_feature 1..363: note = Description of Artificial Sequence: Synthetic coding sequence
  source 1..363: mol_type = other DNA
atggacgacagcaaggtggtgggcggcaaggtgaagaagcccggcaaaagaggaagaaaacctgcgaagattgacttaaaagcaaagctcgaaagatcccgccagtctgcacgggagtgccgagccagaaagaaacttagataccaatatctcgaggagctagtcagcagccgtgaacgggcaatatgcgctctgcgggaagaactggaaatgtacaaacagtggtgtatggccatggatcagggaaagatcccctcagagattaaggccctgctcactggagaggagcagaacaagtcacagcaaaacagtagccgtcacacgaaggccgggaagactgatgccaactcgaactcctggtag

SEQ ID NO: 23766 - DNA, 444 bp, synthetic construct
  misc_feature 1..444: note = Description of Artificial Sequence: Synthetic coding sequence
  source 1..444: mol_type = other DNA
atggaggaggccagccagcggaagtggaacttcgacttccagaaccataagcctctcgaagggaagtacgaatggcaggaggtggaaaagggctccctcccagagttctattaccgcccacctaggccccccaagggagcgtgtaaggtgcccgcacaggaaagccaggacgtaagtggctcccggccggcagctcctctcattggagctcccgccaattcagaagatactcatctcgtcgatccaaagactgatccgtccgactctcagactggccttgcagagcagtgcgcaggtattcgaaagcgtccggcaacagacgattcatccacacagaataaaagagccaacagaaccgaagaaaacgttagtgacggatccccgaacgccggatccgtcgaacagacccccaagaagccaggcctgaggagaagacagacttag

SEQ ID NO: 23767 - DNA, 918 bp, synthetic construct
  misc_feature 1..918: note = Description of Artificial Sequence: Synthetic coding sequence
  source 1..918: mol_type = other DNA
atggagcggctggtggcccggggcaccttccccgtgctggtgcggacctcggcatgcagatctctattcggaccagtcgaccacgaagaactgagtcgcgaactccaggcccgtcttgccgaactgaacgccgaagatcagaaccgatgggactacgatttccagcaggacatgcctctgagaggcccgggacgtctccaatggaccgaggtggattcggatagcgtgcctgccttttaccgggagaccgtccaggtgggtcgatgtcgcttgcttttagccccgaggcctgttgcggtcgcagtggccgtttccccacccttggagcccgccgcagagtcactagatggactggaagaggccccagagcagttaccctccgtgcccgtccccgcacccgcttcaacccccccacctgttcccgttctcgccccggcccctgcccccgccccagcacctgtcgccgcgcccgtcgctgcacccgtggccgttgctgtcctggcacctgcgccagctccagccccagccccagcccctgccccggcacccgtggccgcccccgcacccgcccccgcgccagcacctgcacctgccccggcaccagcgccagcccccgatgcggcaccacaggagagtgcagagcagggcgcaaaccagggccagcgcgggcaggagcctttagccgatcagctgcatagtggcatatctggccggccagccgcaggaactgcggcagctagcgcaaacggagcagcgatcaaaaagctgtcaggaccgttgatctccgactttttcgccaaaaggaagaggagtgctcctgagaagtcgtctggagacgtaccagcaccctgcccatctcccagcgcagcacccggggtggggtccgtcgagcaaacgcctaggaaaagactgcgctag

SEQ ID NO: 23768 - DNA, 951 bp, synthetic construct
  misc_feature 1..951: note = Description of Artificial Sequence: Synthetic coding sequence
  source 1..951: mol_type = other DNA
atgagcgacgccagcctgcggagcaccagcaccatggagcggctggtggctcgcggcacattccccgtgcttgtgagaacttccgcctgccgaagcctctttgggcctgttgatcatgaagaactgagccgtgagctgcaggcccgtctagcagaactaaatgccgaagaccagaatcgatgggactacgacttccagcaggacatgcccttgcggggtcccgggcggctccaatggaccgaggtagacagcgactccgtgcccgcattctaccgggaaactgtgcaagtgggcaggtgtcggctcctcctcgcgcccaggcccgtggcggtggcagtagccgtttccccgccactggagcccgcagcggaaagtctggatggactggaagaggctccagagcagctgccctctgtgcctgtgcctgccccagcctctaccccacccccagtaccagtgctcgctccagcgcctgcccctgccccagcaccggttgccgctcctgtcgccgcaccggtggctgtggccgttctggcacctgcccctgcccccgctcctgcgccggccccggcgcctgcgccagtggctgctccagcccccgctccagctcccgcgcctgcgcctgctccagccccggctcccgctccagatgcagccccacaggagagcgccgaacagggagccaaccaggggcagcgggggcaggaaccactggctgaccagctccatagtgggatctctggcagacccgctgcgggaaccgcggctgcgagtgctaatggtgccgccatcaagaagctcagtggacctctgatttcagacttttttgcaaagcgaaaaaggagcgcccccgagaagagctcaggcgatgtgcctgccccatgtccatcgccatccgccgcccccggggtagggagcgtcgaacaaaccccaaggaagcgattgcgctag

SEQ ID NO: 23769 - DNA, 951 bp, synthetic construct
  misc_feature 1..951: note = Description of Artificial Sequence: Synthetic coding sequence
  source 1..951: mol_type = other DNA
atgagcgacgccagcctgcggagcaccagcaccatggagcggctggttgcccgcggcactttccccgtgctggtaaggacctctgcttgccgaagtcttttcgggcccgttgaccatgaggaactcagtagggagctgcaggcgagacttgcagagctcaacgccgaggatcagaatcgctgggactacgactttcagcaggatatgccattaagaggtccaggacgcctccagtggacagaagtggactccgacagcgtcccggctttttatcgcgaaaccgtgcaagtgggacggtgtcggctgctgctggctcctaggccggtggccgtcgccgtagccgtgtctcccccactggaacccgcagccgagtccctggatggattggaagaggcgcccgagcagttaccttccgtgcctgtgccagcaccagcaagtactcctccgccggtgcctgtcctggcacccgcaccagcccccgcacccgctccggtagcagctcctgtggccgctcccgttgccgtagcagtactcgctccggctcccgctcctgctcccgcaccagcccccgcgccggcacctgtggctgcacctgccccagcccccgcacccgcccctgcccccgccccagctcctgcccccgctccagacgccgcgccacaggaatccgccgaacaaggggcaaaccagggacagagagggcaggaaccactcgcagatcaactgcattccggaattagtggccgccccgccgccggaactgcagccgcaagtgccaatggggccgccattaaaaagctgtccgggccactgatctcagatttcttcgcaaagagaaaacggtctgcacctgagaagtcctctggcgatgtcccggccccctgcccatctcccagtgccgcccctggcgtgggtagcgttgagcaaactcctaggaagcgactacgatag

SEQ ID NO: 23770 - DNA, 918 bp, synthetic construct
  misc_feature 1..918: note = Description of Artificial Sequence: Synthetic coding sequence
  source 1..918: mol_type = other DNA
atggagcggctggtggcccggggcaccttccccgtgctggtgcggacgtcagcctgtagatctctgtttgggcctgtagatcacgaggaactctccagggaattacaagcccggctagctgagttaaatgcggaagatcagaatcggtgggattatgatttccagcaagatatgcccctccgaggcccggggcgacttcagtggaccgaagttgacagtgattccgtgcctgccttttaccgcgaaactgttcaggtgggaaggtgccggcttttgctggcacctaggccggtggcagtggccgtggcagtgtccccacctttggaacctgctgccgagagtctggacgggcttgaagaggctcctgagcaactgccaagcgtaccagttcccgcccctgccagcacacctccgcctgtcccagtcctggccccagctcctgccccggctccagcgcccgtggccgctccagtggctgcacctgttgcagttgctgtgctcgccccggccccagcccccgctcccgcccctgctcctgccccggcacccgtggccgcaccggcccctgccccagcgcctgcccctgctcccgcccccgcgcccgcccctgctccagacgccgcaccacaggagtctgcggagcagggagcgaatcagggacagcgagggcaggaaccgcttgctgaccaactgcatagtggcatctcgggtcgacctgctgctggcacagcagccgcctctgctaatggagctgccatcaagaagctgtctggtcctctgatctctgatttctttgctaaacgaaaacggtctgcccccgaaaagtcatctggggacgtaccggccccgtgcccctccccttctgccgctccgggagtggggtccgtcgagcagactccaagaaagaggctgcgctag

SEQ ID NO: 23771 - DNA, 504 bp, synthetic construct
  misc_feature 1..504: note = Description of Artificial Sequence: Synthetic coding sequence
  source 1..504: mol_type = other DNA
atggagcccgccgccggcagcagcatggagcccagcgccgactggttagctactgctgccgctagaggcagggttgaggaagttagagcactgctggaggccggcgcactgccaaacgccccaaattcttatggtaggcgtcccattcaagtgatgatgatgggttcggcgagagtcgctgaactgcttctgctgcacggagccgaaccaaactgcgctgatccagccacactgaccagaccagtgcatgacgcagcgagagaggggttcctggatactctggtggtgctccaccgagccggcgctcgactagacgtgcgagacgcgtggggccgcctccctgtggatctcgccgaggaactcgggcatcgcgacgtggctagatacctgcgagccgccgcaggtggtacccggggcagtaaccacgcccggatcgacgccgctgaggggccctcagagatgatcgggaaccacctatgggtttgtcggtcaagacatgcatag

SEQ ID NO: 23772 - DNA, 471 bp, synthetic construct
  misc_feature 1..471: note = Description of Artificial Sequence: Synthetic coding sequence
  source 1..471: mol_type = other DNA
atggagcccgccgccggcagcagcatggagcccagcgccgactggttggctaccgctgcagccaggggtagagtcgaagaggtccgggccctgctagaggccggtgctttgccaaacgcaccaaattcctacggtcgaaggcctattcaagtgatgatgatgggttcggccagggtggccgagctgctgcttctacacggcgcagagcccaactgcgccgatccagcaacactgacaagacctgtgcatgatgctgccagggaggggttcctggatacactggtggtcttgcaccgagccggcgctcggctggatgtcagggatgcatggggcagattacccgttgacctggccgaggaactggggcacagggatgtcgcccggtacctaagggcagccgcgggtggcaccagggggagcaaccacgcacgaattgacgcagcagagggaccaagtgatatacccgactag

SEQ ID NO: 23773 - DNA, 522 bp, synthetic construct
  misc_feature 1..522: note = Description of Artificial Sequence: Synthetic coding sequence
  source 1..522: mol_type = other DNA
atgggccggggccggtgcgtgggccccagcctgcagctgcggggccaggaatggcggtgttcccccctggtccccaagggcggtgctgccgctgccgagctgggtcccggagggggcgagaatatggtgaggaggttcttggttaccttaagaatccgccgagcttgtggtccaccgcgagtcagggtgttcgtagtccacatccctcgcttgacgggggagtgggcagctccaggggctcccgccgcggtcgccctggtgcttatgcttctgcgatcgcagagactggggcagcagcctctcccacggcgacctggtcatgacgacgggcaaaggccttcaggaggggcggctgccgctccccgtcgaggagcacagctacggcgtcctcgacattcccaccctacccgcgcccgccgctgccccggcggccttcccgggcacgctggcggcgcagcccccggcagaggggccgctggtcgcgcacgctgccttggtcccagcgcacgcgggcccggctag

SEQ ID NO: 23774 - DNA, 504 bp, synthetic construct
  misc_feature 1..504: note = Description of Artificial Sequence: Synthetic coding sequence
  source 1..504: mol_type = other DNA
atggagcccgccgccggcagcagcatggagcccagcgccgactggctggccactgctgcagctcgaggtcgtgtagaggaagtccgcgccctcctggaggccggagctttgcccaatgctcccaactcctatggcaggcgccctattcaggtgatgatgatgggttcggctagggtagcggagctgcttttgttgcacggcgccgagccaaactgcgctgatccagcaacacttactcgacctgttcacgatgctgcgcgcgagggattcctcgataccctggtggtgctgcatagggccggcgccaggctcgacgtcagggatgcctggggcagactccccgtggatctggctgaggagctgggacatcgggacgtcgcacgctatctaagagcagctgccggtggcacaaggggctcaaaccatgcaagaatcgatgcagctgaaggtccctcggagatgatcggaaaccacctctgggtgtgtaggagtcggcacgcatag

SEQ ID NO: 23775 - DNA, 399 bp, synthetic construct
  misc_feature 1..399: note = Description of Artificial Sequence: Synthetic coding sequence
  source 1..399: mol_type = other DNA
atggtgcggcggttcctggtgaccctgcggatccggcgggcctgcggaccaccccgcgtacgggtatttgtcgtacatatcccccggctcactggcgaatgggccgcccctggcgccccagccgccgtggcacttgtcctcatgctgctgcggagtcagcgcctggggcaacaaccattgcctaggcgtccgggacacgacgacggacagcgaccctcgggcggcgccgcggccgcaccacggagaggggcccaactgcgacggccccggcatagccaccccacgcgtgctaggcggtgcccaggagggctacctggccatgctgggggagccgcccctgggagaggcgccgcgggccgggcacggtgtcttgggccgtccgcaaggggtccaggctag

SEQ ID NO: 23776 - DNA, 417 bp, synthetic construct
  misc_feature 1..417: note = Description of Artificial Sequence: Synthetic coding sequence
  source 1..417: mol_type = other DNA
atgcgggaggagaacaagggcatgcccagcggcggcggcagcgacgagggactggcatctgccgccgcccgcggtcttgtcgaaaaagtccggcaattactggaggccggcgctgacccaaacggagtgaacagattcggtaggagagccatccaagtaatgatgatgggttctgctcgggtggctgagctgttattgctgcacggagccgagccaaattgcgcagatccagctacactgacgcgccctgtgcacgacgctgcaagagaaggctttctcgatactttggtggtgctacacagagctggggcgcggctggatgtgcgcgatgcttggggaagactgccagttgatcttgctgaggagaggggccatagggacgtggctgggtacctgaggactgcaacaggggactag

SEQ ID NO: 23777 - DNA, 237 bp, synthetic construct
  misc_feature 1..237: note = Description of Artificial Sequence: Synthetic coding sequence
  source 1..237: mol_type = other DNA
atgcgggaggagaacaagggcatgcccagcggcggcggcagcgacgagggcttggcctccgcagccgcccgcggcctcgtggagaaggttcgtcagctgctggaagccggcgctgatccaaatggcgttaaccgctttggtagacgcgccatccaggtggcgggcgctccaggccctcggcgccagggcgcccgagagagaggcgcccgtccgagacggattggtgccggcacatag

SEQ ID NO: 23778 - DNA, 237 bp, synthetic construct
  misc_feature 1..237: note = Description of Artificial Sequence: Synthetic coding sequence
  source 1..237: mol_type = other DNA
atgcgggaggagaacaagggcatgcccagcggcggcggcagcgacgaggggttagcttcagcggccgccaggggtctggtcgaaaaagtccgtcaactgctggaggctggtgccgacccaaatggagtgaatcggtttggcaggcgggctattcaggtggcaggagcgcccggccctaggagacagggcgctcgagaacggggggccagacccagacgcatcggtgcaggaacatag

SEQ ID NO: 23779 - DNA, 507 bp, synthetic construct
  misc_feature 1..507: note = Description of Artificial Sequence: Synthetic coding sequence
  source 1..507: mol_type = other DNA
atggccgagccctggggcaacgagctggccagcgccgccgcccggggggacctcgagcagctaacttccctgctgcagaacaacgtcaatgtcaacgctcagaatggtttcggccgcaccgccttgcaggttatgaaactgggtaaccccgagattgcccgacgccttcttctccggggagctaacccagatctaaaagatcgaacaggcttcgccgtgatccacgacgccgccagggcaggattcctcgacactctgcagacccttctcgagttccaagcggatgtcaatatcgaggacaatgaaggaaatttacccctgcacctcgccgccaaagagggccacctgcgagtggtagagtttttagtgaagcatacggcctctaacgtcggccaccgaaatcacaaaggagataccgcatgtgatctagccagactgtatggaagaaacgaggttgtgtccctgatgcaagctaatggtgctggaggggccacgaacctccaatag

SEQ ID NO: 23780 - DNA, 507 bp, synthetic construct
  misc_feature 1..507: note = Description of Artificial Sequence: Synthetic coding sequence
  source 1..507: mol_type = other DNA
atggccgagccctggggcaacgagctggccagcgccgccgcccggggggacttggagcaactgaccagcctgcttcagaacaacgtcaatgttaatgcccagaacggtttcggaaggaccgccctccaagtgatgaaactcggcaacccagaaattgctaggaggctgttgcttagaggagctaatccagatctgaaggacaggactggcttcgccgtcatacacgacgctgctcgtgctggttttctggacaccctgcagacactcctcgaatttcaggccgacgtcaatatcgaggacaacgaaggcaacttaccactgcatttggccgcaaaggaaggccacctgagggtggtggaattccttgtgaaacatactgccagcaacgtgggccaccgcaatcacaaaggcgataccgcctgcgatctagctcgcctctatggcagaaacgaggttgtgtccctgatgcaagccaacggcgctggtggcgccaccaatctgcagtag

SEQ ID NO: 23781 - DNA, 507 bp, synthetic construct
  misc_feature 1..507: note = Description of Artificial Sequence: Synthetic coding sequence
  source 1..507: mol_type = other DNA
atggccgagccctggggcaacgagctggccagcgccgccgcccggggagacctggaacaactgacatctcttcttcaaaacaacgtcaacgtcaatgcacagaatggttttggtcgaacagcactgcaggttatgaagctgggcaatcccgagattgctaggagacttctgctgcgaggagccaatccagacctcaaagatcggaccggctttgcagtcatacatgacgcggcgcgggccggcttcctcgatacccttcagactctcttagagttccaagccgacgtgaatatcgaagacaacgagggcaacttgcctctgcatctggctgctaaggagggccacctgagagtggtggagtttctggtcaagcacactgcgtctaatgtgggccacagaaatcacaaaggcgacactgcttgtgatctggcgcgcctctacggtcgcaatgaggtagtgtccctgatgcaagccaacggcgcaggtggagccactaaccttcaatag

SEQ ID NO: 23782 - DNA, 501 bp, synthetic construct
  misc_feature 1..501: note = Description of Artificial Sequence: Synthetic coding sequence
  source 1..501: mol_type = other DNA
atgctgctggaggaggtgcgggccggcgaccggctgagcggcgccgcagcacgaggtgatgttcaggaagtccggagactgctacacagagaactggttcatcctgacgcattaaaccgcttcggaaagaccgcgctgcaggtgatgatgttcgggagtactgctatcgccctggagctgttgaagcaaggtgctagcccaaacgttcaggacaccagtggcacaagtccggtgcatgacgctgccaggacagggttcctagatacactgaaagttttagtagaacacggggccgacgtcaacgtacctgatgggacaggggcccttcctatccacctggctgttcaagagggccatactgccgtggttagcttcctggctgcagagagtgatctccaccgaagggatgcccgtggactaacacctctcgagttagccctgcagcgcggtgctcaggacttggtggacatcctgcagggccacatggtagctcctctttag

SEQ ID NO: 23783 - DNA, 501 bp, synthetic construct
  misc_feature 1..501: note = Description of Artificial Sequence: Synthetic coding sequence
  source 1..501: mol_type = other DNA
atgctgctggaggaggtgcgggccggcgaccggctgagcggcgccgccgctcgaggggacgtacaggaggtgcgcaggctcctgcatagggagctggtccacccagacgctttaaatcggtttggaaagaccgccctgcaggtgatgatgttcgggtcaacagctatcgccctggaacttctgaaacagggcgccagtccgaatgtacaggacacaagtggtacctcccccgttcatgacgccgctaggacaggcttcctcgacacattaaaggtactggtggagcatggggcggatgtgaacgtgccagatggcaccggagcgttgcctatccaccttgccgtccaggaggggcacactgccgtggtgagcttcctggccgccgagtctgacttgcatagacgagatgcacgtggcctcacccccctcgagttagcgctgcagaggggagctcaagacctcgtcgacatcctgcagggtcacatggtggcacctctttag

SEQ ID NO: 23784 - DNA, 639 bp, synthetic construct
  misc_feature 1..639: note = Description of Artificial Sequence: Synthetic coding sequence
  source 1..639: mol_type = other DNA
atgaagccccccagcagcatccagaccagcgagttcgacagcagcgacgaagaaccaattgaagatgaacagaccccgattcacattagctggctgtctttaagtcgtgtgaattgcagccagtttctgggcttatgcgcactccccggctgcaagtttaaggatgttagacgtaacgtccaaaaggacaccgaagaactaaagtcctgtggtatccaggatattttcgtgttttgtaccaggggagaacttagtaaatatagagtgccgaacctgctcgatctttaccagcagtgtggcattataactcatcatcaccctatagcagacggtggtacgccggacatcgcgtcgtgctgcgaaattatggaggaactcactacatgcctgaagaattaccggaagacactcatccactgctatgggggactggggcggtcttgtctggtggcagcctgtctattgctttacctgtccgacacaatcagcccagagcaagcaatcgatagccttagagacctgaggggctcaggagccatccagacaatcaaacagtataattatctccacgaattccgtgacaaactcgccgcccatctatccagcagagactcacaaagcagatcagtgagtcggtag

SEQ ID NO: 23785 - DNA, 501 bp, synthetic construct
  misc_feature 1..501: note = Description of Artificial Sequence: Synthetic coding sequence
  source 1..501: mol_type = other DNA
atgaacccctgctgcaagttcaaggacgtgcggcggaacgtgcagaaagacacggaggagctgaagtcatgtggcatccaggacatatttgtattctgtaccaggggtgagctgtcaaagtacagggtaccaaacctgttggacctctatcagcagtgtggaatcattacgcatcaccatcccatcgccgatggaggcacccccgatatcgccagttgctgtgagattatggaggagttaactacctgcctcaaaaactatagaaaaacccttattcactgttacggtggcctgggccgaagctgtctagtcgcagcgtgccttctgttatacctgagtgacaccattagtccagaacaggccatcgattctttgcgagacttgaggggcagcggggccatccaaactattaagcaatacaattacctacatgaatttcgagacaagctggcagcccatcttagctcccgggactcccagtctcggagcgtttccaggtag

SEQ ID NO: 23786 - DNA, 210 bp, synthetic construct
  misc_feature 1..210: note = Description of Artificial Sequence: Synthetic coding sequence
  source 1..210: mol_type = other DNA
atgaagccccccagcagcatccagaccagcgagttcgacagcagcgatgaggagcctattgaagacgaacagacccccatacatatcagttggctgtccctctcgcgagtaaactgtagccagttcctgggcctatgcgctctgccaggttgcaagttcaaagatgtccgaaggaacgtgcagaaagaaaagaaaaagaaaaagaaatag

SEQ ID NO: 23787 - DNA, 624 bp, synthetic construct
  misc_feature 1..624: note = Description of Artificial Sequence: Synthetic coding sequence
  source 1..624: mol_type = other DNA
atgaagccccccagcagcatccagaccagcgagttcgacagcagcgacgaagagccgattgaggacgagcagactccaatccatatttcttggctatcgctgagtagggtgaattgctctcagttccttgggctctgtgctcttccaggctgcaaatttaaggacgttcggcggaatgtgcagaaggacactgaggaactaaaatcctgcggcatccaggacatttttgtgttctgcacacgtggggagttgtcaaagtatagagtccccaatctcctggatctgtatcagcagtgcggcattattacccatcaccaccccatcgcagacggtgggactccagatatcgcctcctgttgcgaaataatggaggagttgaccacctgccttaaaaatcttttttgctatgggggcttgggcagaagttgtttggttgctgcctgtctcctgctttatctttccgacaccatttctcccgagcaggctatagactccctccgcgacctgcggggctctggagctatccagacaataaagcagtacaactacctgcacgaatttagggataagctagccgcacatttaagcagtagggatagccagagtcgcagcgttagcagatag

SEQ ID NO: 23788 - DNA, 519 bp, synthetic construct
  misc_feature 1..519: note = Description of Artificial Sequence: Synthetic coding sequence
  source 1..519: mol_type = other DNA
atgaagccccccagcagcatccagaccagctgcaagttcaaggacgtgagacgcaacgtccagaaagatacagaggagctgaagtcatgcggtattcaagatatatttgtgttctgcactagaggcgagctatccaaataccgggttcccaaccttttggacctgtaccaacagtgtggcataatcacacaccatcatccaattgcagacgggggaacccctgatatagcgtcctgctgcgaaatcatggaggaactgaccacatgtctgaaaaattataggaagactctgatccattgctatgggggacttggccgttcctgtctggtggctgcctgcctccttctgtacctaagcgacactatttccccagaacaggccattgactcactccgggatctgcgggggtcgggagccattcagacaatcaaacagtataattaccttcacgaatttcgggacaagttggccgcacatctctctagcagagattctcagtcgcggtctgtctctaggtag

SEQ ID NO: 23789 - DNA, 2871 bp, synthetic construct
  misc_feature 1..2871: note = Description of Artificial Sequence: Synthetic coding sequence
  source 1..2871: mol_type = other DNA
atgagcagcggcctgtggagccaggagaaggtgaccagcccctactgggaagaaaggattttttacctgctgctgcaagaatgctctgtcacagataagcagactcagaagttgttgaaggtaccaaagggaagcatcggtcagtacattcaggacaggagtgtgggacatagtcgcatcccatcggccaagggcaagaagaatcaaatcggattaaagatcctcgagcagccccacgctgttttgtttgtcgatgagaaggatgtagtagagataaacgaaaagtttacggaactgctgttggcgattacgaactgtgaggagagattctccctcttcaaaaacagaaaccgcctgagtaaagggctgcagattgacgttgggtgtccagtaaaggttcaactgagaagcggcgaggaaaaatttccaggagtggtacggttccggggccctctgctagccgaacggacagtaagcggaatcttctttggcgtggaactacttgaggaaggtaggggccagggatttaccgatggcgtctaccagggtaaacaactgtttcagtgcgatgaagactgcggagtgttcgttgcactggataaacttgagttgattgaggatgacgatactgccttggagtctgattacgcagggccaggggacacaatgcaggtggaactgccccctctcgagattaatagccgcgtgagcctaaaggttggcgaaacgatcgagagtggcacggtgattttttgtgacgtcctgccgggcaaggaatccctgggttattttgttggggtcgatatggataatcctatagggaactgggatggaaggttcgatggcgtgcagctgtgtagtttcgcatgcgtcgaaagcaccatcctgctgcatataaacgacatcattcctgccctgtcggagagtgtgactcaggaaaggcgccctcctaagttggcctttatgagccgaggagtaggtgataaaggaagctcctctcataataaacccaaagccaccggtagcaccagtgatcctggtaataggaatagatcagaactgttctacacactgaacggctcctctgtggattctcagccccagtctaaatctaaaaacacatggtacattgatgaggtggccgaagatcccgccaaaagcctcaccgagatatccactgatttcgatcgctccagcccacccctccagcctccacctgtgaatagcttaactactgaaaatcggtttcactccctgccattctcactgaccaaaatgcccaacactaatggaagcattgggcactcaccactgagtcttagtgcccagtcagtgatggaggagctgaatacagcacctgtgcaggagagcccaccccttgccatgccaccaggaaattcccacggcttagaggtcggcagcctggccgaggtgaaggagaatcctcctttctacggggtaattcgttggatcgggcagcctcctgggctgaatgaagtcctggccggactggaactggaagacgaatgcgcaggctgtaccgatgggacattcaggggaacccggtatttcacttgcgctctaaaaaaggcactcttcgtgaaactgaaaagctgtcggcctgactctaggtttgcctccctgcagcccgtgtcgaatcagattgaacgctgcaattcactggctttcgggggatacctgtctgaagtggttgaggagaatactccacccaagatggagaaagaaggcttggagatcatgattggaaagaagaaaggcatccaagggcactataatagctgttacctggacagcacactcttttgtctcttcgcctttagcagcgtgctggacacggtgctactccgccccaaggaaaaaaatgacgtcgagtactatagcgaaactcaggagcttcttcggacggagatcgtaaatcccctgcgaatctatgggtacgtgtgcgccacaaagattatgaagctgcgaaaaatactggagaaggtcgaggccgccagcgggtttacaagtgaagaaaaggaccccgaggagttcttaaatatcttgttccatcacatcttgagggttgaaccactcctgaagatcagatccgcaggccaaaaagttcaggattgttatttttatcagatcttcatggaaaaaaatgagaaggtgggtgtgccaacaatccagcagctgctcgagtggtcgttcattaactcaaatctaaagttcgcggaggcacctagttgcctgatcatacagatgccccggtttgggaaagattttaagctcttcaagaaaatctttcctagtctggaacttaatatcacagaccttcttgaagacacccctcggcagtgcaggatttgtggtggactggctatgtatgaatgcagggaatgctacgacgatcctgacatcagcgctggtaagataaaacagttttgcaagacctgtaatactcaggtgcaccttcacccgaaacgcctcaaccacaagtataacccagtctccctgccaaaggacttacccgactgggactggcgacatggttgtataccatgccagaatatggaattattcgctgtgttgtgcattgaaacctcccactacgtggcctttgtgaagtatggtaaggacgattccgcttggctgttcttcgattctatggccgatcgcgatggaggacaaaatggattcaacattccgcaggtgaccccgtgtcccgaggtgggcgagtacctcaagatgagcctggaggatctgcactctcttgactctagaagaatccagggctgtgcaagaagactgttgtgcgacgcctacatgtgtatgtaccagtcccccacaatgtctctgtacaagtag

SEQ ID NO: 23790 - DNA, 2862 bp, synthetic construct
  misc_feature 1..2862: note = Description of Artificial Sequence: Synthetic coding sequence
  source 1..2862: mol_type = other DNA
atgagcagcggcctgtggagccaggagaaggtgaccagcccctactgggaagagcgcatcttttatctactcctgcaggaatgttctgtaacagacaagcagacgcagaagctgctgaaagtacctaagggtagcatcggccagtatatccaggacaggagcgtgggccatagccggatcccctctgccaagggcaaaaaaaatcaaataggtctcaagatacttgagcagccacatgctgtgcttttcgttgacgagaaagatgtggtggagattaacgagaagttcacggaattactgctagcgatcaccaactgcgaagaacgattttctctgttcaagaatcgaaatagactaagcaaaggccttcagatcgacgttgggtgcccggtgaaagttcagctgagatccggcgaggagaagttccccggagtggttcgatttcgtggccctctcctcgccgagaggacggtcagtggcatcttttttggtgttgagctcctggaggagggaagaggccagggctttactgacggtgtgtatcaaggcaagcagttgttccaatgtgacgaggactgcggagtgttcgtcgccctggacaagctggaattaatcgaagatgacgacacagctctggagtcagactatgctgggcccggggacacgatgcaggtagagctgccgcctcttgagatcaattccagagtgtctctcaaagtcggcgagaccatcgagtctggtactgtaatcttttgcgacgtgctgccaggcaaggagtccctcgggtattttgtaggtgtcgacatggacaaccccattgggaactgggatgggcggtttgacggcgttcagctatgctccttcgcctgtgtcgaatcaactattcttctacacatcaatgacattatacccgaaagcgttactcaggagcggaggccccccaagttggcttttatgtcccgaggcgtgggcgataaaggctcctcctctcacaacaagccgaaagcaacaggatctacctccgatcctggtaaccgcaatcggtccgagttgttctacacattgaacgggtcttcggtggattcacagccacagtctaagtcgaaaaatacatggtacatcgacgaagttgccgaggaccctgccaaatctctcactgaaattagcaccgatttcgatcgctcatcacctcctctgcagcccccgcccgtcaactcgctgaccacagaaaacagattccattccctaccgttctcattaactaagatgccaaatacgaatggtagcattgggcacagccccctgtcactttccgcccaatcagttatggaagaactgaacactgctccagtgcaggagagcccaccactcgctatgcctccaggaaattcacacggactggaggttggcagcctcgccgaagtgaaagagaatcctcccttctatggcgttattcggtggatcgggcagcctccaggactgaacgaggtgctggcaggattagaactggaagatgagtgtgcagggtgtactgatggcaccttccgcggaacaaggtacttcacctgtgcactgaaaaaggctctctttgtgaagttgaaaagctgccgaccagactcccgctttgcctcccttcagcccgtgagcaatcagatagagaggtgcaacagcttggcatttggaggttacctctctgaggtggtagaggagaacactccacctaaaatggagaaggagggattagagattatgataggtaagaagaagggaatccaggggcactacaatagttgctatctagattcaacgctcttttgtctgttcgctttttcctctgttctggacacagttcttcttcggcccaaggagaagaacgacgtggagtattactctgagacccaggaactgttgaggaccgagatcgtgaatcctttaaggatatatggttacgtatgcgccaccaagattatgaagctgagaaaaatccttgagaaagtcgaagccgccagcggcttcaccagcgaggaaaaggaccccgaggagtttcttaatatcctattccaccatattcttcgcgtcgagcccctgctgaagatccgctctgccggccagaaggtgcaggattgttatttctaccagatcttcatggaaaagaacgaaaaagtcggggtgcctaccattcagcagctcctagagtggtcatttataaactccaaccttaaatttgccgaagcaccatcatgcctgatcatccagatgccaagattcggaaaagatttcaaacttttcaagaagatcttcccatctctcgaactgaatattactgatcttctggaggatacacccaggcagtgccgcatctgcggcggcctcgccatgtacgaatgccgggagtgttatgacgaccccgatatttccgccgggaagataaagcaattttgtaagacctgcaatacacaggttcacctccatcccaaacggctgaaccataaatacaaccctgtcagcctgcccaaggacttgccagattgggactggagacacggctgcatcccatgtcaaaacatggagctcttcgccgtgctgtgtatcgagacctcccactatgtcgccttcgttaagtacgggaaagacgatagtgcctggctgttttttgacagtatggccgatagagatggggggcagaacggttttaatattcctcaggtgacaccatgtccagaggttggggaatacctgaaaatgtcgctggaggacttgcactccctggattcccggagaatccaggggtgcgcgcggcggttactttgtgatgcctacatgtgcatgtaccagagtccgactatgagcctgtacaagtag

SEQ ID NO: 23791 - DNA, 2862 bp, synthetic construct
  misc_feature 1..2862: note = Description of Artificial Sequence: Synthetic coding sequence
  source 1..2862: mol_type = other DNA
atgagcagcggcctgtggagccaggagaaggtgaccagcccctactgggaggaaaggatcttttacctcttactgcaggaatgtagcgtgacagataaacagacccagaagctgctgaaagtgcctaaaggcagtataggccaatatattcaggataggtccgtgggccactcccgaataccatctgcaaaaggcaagaagaatcagattggactgaagatacttgaacagcctcacgcagtgttgttcgtggatgaaaaagatgtggtcgagattaacgagaagtttaccgagttgctgcttgcaatcactaattgtgaggagagatttagtttgtttaagaacagaaataggctgagtaagggccttcagatcgatgtcggctgtccagtaaaggtgcaattgcgtagtggtgaggagaagtttcctggcgtggtcaggtttcgaggtcctcttctcgccgagaggactgtgtctggtattttctttggcgtcgagctcctggaagagggacggggacaggggttcaccgacggcgtgtaccaggggaaacagttgttccagtgcgatgaggattgcggcgtcttcgtagctctggataaactggaactgatcgaagacgacgatactgctctcgaatccgattacgcgggccccggggacactatgcaggtagaactcccaccgctcgagattaactcccgagtatccttgaaggttggagagaccattgagtcaggtaccgtgatattttgcgacgtgcttcctggcaaggagtccctcggatacttcgtaggagtggatatggacaatccaatcggcaattgggacggccgtttcgatggcgttcagctttgttcttttgcatgcgtcgaatcaacaattctcctccacattaacgacatcatccccgaatctgtgactcaggagaggaggccaccaaagcttgcctttatgtcacggggcgtaggcgacaaaggaagcagttcacacaacaagcctaaggcaaccggctcaacgtccgatcccgggaatcgaaacaggagcgaactgttttacacattgaatggcagttctgtcgatagccagccacagtccaaaagcaaaaatacttggtatattgacgaggtggccgaggaccccgctaaaagcttaaccgagatcagtaccgacttcgaccgttcgtcacccccactccagcccccaccagtgaatagtctgactactgaaaatcgttttcatagcctccccttcagcctgaccaagatgccgaacacaaacggaagtatcggtcacagtcctttgtctctgtctgctcaaagcgtaatggaagaactcaatacagcccctgttcaagagtctccacctctggcaatgcccccgggaaatagccacgggctggaggtgggttcactggctgaggtcaaagagaatcctcctttctacggagtaatcagatggattggccagccccccgggctaaatgaggtgttagctggtctggagctcgaggacgaatgcgccggctgcacagacggaacttttaggggaactcgatacttcacttgtgcactgaaaaaggccctctttgtaaaactgaaatcttgtaggccagattccagatttgcaagtctgcaaccagtgagcaaccagattgaaagatgtaactcccttgcattcggaggctacctctccgaagtggtagaagagaacacgcctcccaagatggagaaggagggcctggaaattatgattgggaagaaaaaaggaatccaggggcattataattcttgctatctcgacagcaccctgttttgcctgtttgcttttagtagcgttttggatactgtactccttaggccgaaagagaaaaacgatgtggagtattactcagaaacccaagaactgctgaggaccgagatagtgaatccccttaggatttatggatacgtctgcgcaacaaagattatgaagctgagaaaaatcttagagaaggtggaagccgcctcaggatttacctctgaggaaaaggaccccgaggagttccttaatatactgtttcatcatattttgcgtgtggagcctttgctgaagattcggtcagcgggacagaaagtccaggattgttatttttaccagatctttatggaaaagaatgaaaaggtcggggtacccaccatccagcagctcttagaatggtctttcattaactccaacctcaagtttgccgaagcaccatcttgccttatcattcagatgccacgatttgggaaggacttcaagctgttcaagaaaatattcccctcgctcgaactcaacatcacagaccttctggaggacacgccgaggcagtgtcgaatctgtgggggcctggcgatgtacgaatgcagggagtgctacgatgatcccgacatctcagccggtaagatcaagcagttttgtaagacctgtaatacccaagtacacctgcacccaaagcgcctaaaccacaaatacaaccccgtatccctgcctaaggatctgccggactgggattggcgccatggatgcatcccttgccaaaatatggagctcttcgcggtgctctgtattgaaacatcccactacgtcgccttcgttaaatatggcaaggatgattcagcttggctctttttcgactccatggccgaccgggatggaggacagaacgggttcaatatccctcaagtgactccctgccctgaagtgggggagtacttaaagatgagtctcgaggacctacattccttggactcccggagaattcagggttgcgccaggcggctgctgtgcgacgcttatatgtgcatgtaccaatctcctacaatgtcattgtacaagtag

SEQ ID NO: 23792 - DNA, 2871 bp, synthetic construct
  misc_feature 1..2871: note = Description of Artificial Sequence: Synthetic coding sequence
  source 1..2871: mol_type = other DNA
atgagcagcggcctgtggagccaggagaaggtgaccagcccctactgggaggagcgtatcttctatctactgttacaggagtgttcggttacggacaagcaaacccagaagctcttaaaggtgcctaaagggtcgatcggacaatatatccaagacagaagtgtgggacactctcgcatcccgtctgcaaaggggaaaaagaaccagattggacttaagatcctcgagcagccacacgccgtccttttcgtagatgagaaggacgtggtcgaaataaatgagaagtttactgagttacttctagccatcaccaattgcgaagaacgcttctccctgtttaagaataggaatcgcctaagcaagggacttcaaatcgacgtagggtgcccagtgaaggtccagctcaggagcggcgaggagaagttccctggcgtagtgcgctttcgtggcccactacttgcagagcgtaccgttagtggcatcttctttggagttgaattgctggaggaaggccgtggccaggggtttacagatggcgtgtaccaaggaaagcagctctttcagtgtgacgaggattgcggtgtatttgtggctctcgataaacttgagctcatcgaggacgatgacactgctctagaatcggactacgccggtccaggtgacacaatgcaggttgagctgccacccctggaaattaactctcgtgtctccttaaaggtgggggagaccattgagtctggtaccgttattttttgtgatgtactcccaggcaaggagagtctgggatactttgtcggcgttgatatggacaaccccattgggaattgggatgggagattcgacggagtccagctctgttccttcgcttgtgtcgaaagcaccattctcctgcacattaacgacatcattccagccgtcagtgaatcggtgacgcaggagcgtcgcccccccaaactcgcattcatgtccagaggggttggtgacaaaggcagcagctcccacaacaagcccaaagcaaccggctccacgagtgatccgggcaaccgaaatagatcagagttattctacaccctaaacgggagctcggtggactcccagccgcaatcgaagtctaagaatacatggtatatagatgaagtagcagaagatcctgcaaagagtctcactgaaataagcacagatttcgatcgaagttctcctccactacagccacctcccgttaattcgctgactacagaaaacaggtttcacagcctgccattttctttgacaaaaatgcccaataccaacggcagcattggccatagccctcttagccttagcgcccagtcagtgatggaagaactgaacaccgctcccgtgcaggaatcgccaccgcttgctatgccaccagggaatagccacgggttggaagtgggctcactcgcagaggtcaaggaaaatccgccattttacggagtaatcagatggataggtcagcccccgggtttgaacgaggtactagccggcttggagctcgaggacgaatgcgcaggttgtaccgacggaacatttagaggtacccggtatttcacgtgtgcgctgaagaaagcactgttcgtcaagcttaaaagctgccggcccgacagccgctttgcgagcctccaacctgtcagtaaccagatagaacggtgcaactcactggcgtttggggggtatctctctgaggtggttgaagaaaatacgcctccgaaaatggagaaggaaggcctggaaatcatgataggcaaaaagaaagggatccaaggtcattataactcatgctatcttgactctactctgttttgcttgttcgcctttagctccgtgcttgatacagtgcttctgaggcctaaggaaaagaatgacgtcgaatactactccgaaacgcaggagttgctgcggaccgagatagttaacccccttagaatatatgggtacgtgtgtgcgactaagattatgaagctgcggaaaattctagagaaagttgaggccgcaagtggttttacctccgaagaaaaagacccagaggaatttttgaatatcctatttcaccacatcttgcgggttgaacctttgctgaaaatccggtctgccggccaaaaggtgcaggactgttacttttatcagatttttatggaaaagaatgagaaagttggggtgccgacaatccagcagctcctcgagtggtccttcatcaattctaacttgaagtttgccgaagccccaagctgcctgatcattcagatgccaagattcggcaaagattttaaactgttcaagaagatcttcccctctctggagctaaacatcactgacttattggaagataccccccggcaatgcaggatctgtggcggcttagctatgtatgaatgtcgcgagtgctatgacgacccagacatttccgccggaaagattaaacagttctgtaaaacatgcaacactcaagtgcacctgcatcctaaaaggcttaatcataagtataacccagtatcactaccaaaggatctgccggactgggattggcggcatggttgcattccgtgtcagaacatggagctattcgccgttctttgcattgaaaccagccattatgtggcgttcgtcaagtacggaaaggatgacagcgcctggctgttttttgacagtatggcagatagggacggggggcagaacggttttaatatcccacaggtgaccccttgtcctgaagtcggtgagtatctgaagatgagtctggaagatctgcatagcctcgatagcagaagaatacaaggctgcgctagaagacttctgtgtgacgcttacatgtgtatgtaccagtctcctaccatgagcttatacaaatag

SEQ ID NO: 23793 - DNA, 450 bp, synthetic construct
  misc_feature 1..450: note = Description of Artificial Sequence: Synthetic coding sequence
  source 1..450: mol_type = other DNA
atggcccggagcaacctgcccctggccctgggcctggccctggtggccttctgtctgttggccctccctagagatgctcgagcccggccacaggagagaatggtgggggaacttagggatctgtctccagatgatccccaagtgcagaaggccgcccaggctgccgtagctagctacaatatggggtcaaatagcatttactatttcagagatactcacattatcaaagcccagtcccagctggtcgcgggaattaaatattttttaactatggagatgggatctaccgactgtcggaaaacccgggtaacaggagatcatgtggacctaactacttgccccctggcagctggtgcccagcaggagaagctcagatgcgattttgaggtgctggtagtcccctggcagaattcgtcccagctgctaaagcacaactgcgtccaaatgtag

SEQ ID NO: 23794 - DNA, 504 bp, synthetic construct
  misc_feature 1..504: note = Description of Artificial Sequence: Synthetic coding sequence
  source 1..504: mol_type = other DNA
atgctgcccgagaaggccctgcacggccacccccagctgccccggacagtcccgacccgggccgcaatgcgggcggccggaacgctccttgccttttgctgccttgtgttaagtactactggggggccttcacccgacacatgttctcaggacctgaacagtcgagtcaagcctggattccccaagacaatcaaaacaaatgatccaggagtgcttcaggctgccaggtactcagttgagaaattcaacaactgtacgaatgacatgttcctgttcaaggaatctcgcatcactcgcgctttggtacagattgtgaaaggtctgaagtatatgctcgaagtcgagatcggccgcactacttgcaaaaaaaaccagcacctgcggctggatgattgtgactttcagaccaaccataccttaaagcagacactttcttgttacagcgaagtgtgggtagtgccgtggttacagcacttcgaagttccagtgcttcgctgccactag

SEQ ID NO: 23795 - DNA, 438 bp, synthetic construct
  misc_feature 1..438: note = Description of Artificial Sequence: Synthetic coding sequence
  source 1..438: mol_type = other DNA
atgcgggccgccggcaccctgctggccttctgctgcctggtgctgtccactaccgggggtccatcgccagatacctgcagtcaggatctcaactcccgcgtgaagccgggcttccccaaaaccatcaagacaaatgatccaggcgttttgcaggctgctagatactccgtggagaaatttaacaattgcacaaacgacatgtttctgtttaaagagtctaggattactagggccctagtgcagattgtcaagggcctaaaatacatgctggaggtggaaatcggcaggaccacctgcaaaaaaaaccaacacctgcggctagacgattgtgacttccaaacaaatcacaccttgaaacagactttgtcttgctactccgaagtgtgggtagtgccttggctgcaacacttcgaagtcccagtgctccggtgccactag

SEQ ID NO: 23796 - DNA, 453 bp, synthetic construct
  misc_feature 1..453: note = Description of Artificial Sequence: Synthetic coding sequence
  source 1..453: mol_type = other DNA
atgctgggcgccgccctgcggcggtgcgccgtggccgccaccacccgcgctgatcctagaggcctgttacactccgcaaggacgccggggcccgcagttgctatacagtcagtacggtgctacagccacggatcccaggagacagacgaggagttcgacgcgagatgggtgacctacttcaataagcccgatattgacgcctgggagctccgcaaaggaataaatacactagtcacctatgacatggtgccagaacctaaaatcattgacgctgctcttcgggcttgtagacggctgaatgactttgcaagtacagtcagaatcctggaagttgttaaggacaaggcgggcccacacaaagaaatctatccttatgtgatccaggagcttaggccaactctgaatgagctggggatcagcaccccagaagaattaggtttggataaggtctag

SEQ ID NO: 23797 - DNA, 318 bp, synthetic construct
  misc_feature 1..318: note = Description of Artificial Sequence: Synthetic coding sequence
  source 1..318: mol_type = other DNA
atgggcgacgtggagaagggcaagaagatcttcatcatgaagtgcagccagtgccatacagtggagaaaggcggaaagcacaaaaccgggccaaacttgcatggtctgttcgggcgaaagactgggcaggcccctggttactcctatacagcggctaacaaaaacaaaggaattatatggggcgaggatacgcttatggagtatcttgagaacccgaaaaagtacatcccaggcacaaaaatgatatttgtgggaatcaagaagaaagaggaaagagcggaccttatcgcctatctgaagaaggccacgaacgagtag

SEQ ID NO: 23798 - DNA, 318 bp, synthetic construct
  misc_feature 1..318: note = Description of Artificial Sequence: Synthetic coding sequence
  source 1..318: mol_type = other DNA
atgggcgacgtggagaagggcaagaagatcttcatcatgaagtgctcacagtgtcacacagttgaaaagggcgggaagcataaaaccggcccgaatttgcacggcttgtttggacgtaagacagggcaagccccaggttactcttatacagctgccaacaagaacaaagggattatttggggagaggatacactcatggagtacctcgagaatcccaaaaaatatattcccggaacaaagatgatttttgtagggataaaaaaaaaagaggaaagagcagacctcattgcctacctaaaaaaggccactaacgagtag

SEQ ID NO: 23799 - DNA, 318 bp, synthetic construct
  misc_feature 1..318: note = Description of Artificial Sequence: Synthetic coding sequence
  source 1..318: mol_type = other DNA
atgggcgacgtggagaagggcaagaagatcttcatcatgaagtgcagccagtgtcacacggtggagaagggtggcaagcacaagacaggacccaatctgcacggtttgtttggtagaaaaacaggtcaggcacccggctactcttatacagcagccaataagaataaagggatcatctggggcgaggatactctaatggaatacctagagaatcccaaaaaatatattccagggactaagatgatcttcgtaggtatcaaaaaaaaggaggaacgggccgacctcatcgcttaccttaaaaaggccactaacgagtag

SEQ ID NO: 23800 - DNA, 306 bp, synthetic construct
  misc_feature 1..306: note = Description of Artificial Sequence: Synthetic coding sequence
  source 1..306: mol_type = other DNA
atgggcgacgtggagaagggcaagaagatcttcatcatgaagtgctctcagtgccacaccgtggagaagggaggcaaacacaaaacggggccaaatctgcacggactcttcggcagaaaaacaggccaggctcccggctactcatacactgctgccaacaaaaataaagggattatttggggcgaggatactctgatggagtaccttgaaaatcctaagaaatatatcccgggcactaagatgatattcgttgggataaaaaagaaagaagaaagggcggacctgattgcttacttaaaaaagtag

SEQ ID NO: 23801 - DNA, 1632 bp, synthetic construct
  misc_feature 1..1632: note = Description of Artificial Sequence: Synthetic coding sequence
  source 1..1632: mol_type = other DNA
atgggcaccagcctgagccccaacgacccctggcccctgaaccccttgtccatccaacagaccacacttctgcttctgctttccgtccttgcaaccgttcatgtggggcagcgtctgttgcggcagagacgccgccagctgcggtccgctcctcctggcccttttgcctggccgctgatcggaaacgcagcagctgtaggtcaggcagcccatctgtctttcgcgagattagcccggagatacggagatgttttccagattcggctcggctcctgcccaatcgtggtgctgaatggcgagcgagccatccatcaagccctggttcagcaaggatccgccttcgccgatagacctgcattcgcctcctttagagtggtgagcggcggtaggtccatggccttcggccactatagcgagcattggaaagtacagcgccgcgccgctcattcgatgatgcgaaattttttcacaaggcagccgcggagcaggcaggtcctggaaggacatgttctgtccgaggcccgcgaattagtggccctgctagttagagggagcgccgacggggcctttctggatccaaggccactgactgtcgtggcagtggcaaatgtgatgtccgctgtgtgtttcgggtgtcgctatagtcacgacgatccagagtttcgggagctgttgtcacacaatgaagaattcggccgtactgtgggagctggtagtctggtggatgtaatgccatggttgcagtacttccctaaccctgttaggaccgttttcagggaattcgagcagcttaacagaaacttttccaattttatcctggacaaatttctgcgccattgtgaatctctgagacccggcgccgcccctcgcgacatgatggacgcatttatactttctgccgaaaaaaaagcagctggcgactcacacggcggaggcgcgcgcctggacttagaaaatgtaccggcgacaattacagacatcttcggcgcgagccaggacaccctcagcaccgctttgcagtggctcttattgctttttactagatacccggacgtacagacccgcgtccaggctgagttagaccaggtcgtgggcagagacagattaccgtgcatgggcgaccagcctaatctgccctacgtgctggctttcctatatgaagcgatgaggttttcctccttcgtgcctgtgaccatccctcatgccactaccgccaacaccagcgtgcttggatatcacatcccaaaggacacggtcgtattcgtgaatcagtggagtgtcaatcatgacccagtgaagtggccgaatccagagaacttcgacccggccaggtttctggacaaggatgggctaataaacaaagacctgacgagtcgcgtgatgatcttttctgtgggcaagcgtcgctgtatcggcgaagagctgagtaagatgcagctgtttctcttcatctccattctggcccaccaatgtgatttccgggcaaatccaaacgaacccgctaagatgaatttttcgtacgggcttactatcaaaccaaagtcgtttaaggtcaacgtgacgttgcgagagagcatggaactactggatagcgctgtccagaaccttcaggcaaaggagacatgccagtag

SEQ ID NO: 23802 - DNA, 1632 bp, synthetic construct
  misc_feature 1..1632: note = Description of Artificial Sequence: Synthetic coding sequence
  source 1..1632: mol_type = other DNA
atgggcaccagcctgagccccaacgacccctggcccctgaaccccctgagcatccagcagaccaccctgctattgttgctgtccgtcctggctacagtgcacgtgggccagcgcctgttacgccagcggagaaggcagcttaggagcgccccaccaggacccttcgcttggcctctgatcggtaatgcagcagcagtcggacaggctgcccatctgagctttgctaggctggcccgcagatatggcgacgtctttcaaatccgactgggttcatgccccatagttgtgctgaacggagagcgcgccatacatcaagctctcgtgcagcagggcagtgcatttgcagatcgaccagcctttgccagtttcagggttgtgtcaggcggcagatccatggcctttgggcattactccgaacactggaaggtgcagcgtagggccgcccacagcatgatgcgaaactttttcacacgccaaccacggagccgccaggtcttggaaggacatgtgttgagcgaagcacgagagctggttgccctcctggttcgtgggagcgcagatggcgccttcctggaccctcgtccactcacagttgttgctgtcgccaacgtgatgtccgccgtatgtttcggatgtaggtacagtcacgacgacccagagtttcgcgagttgctgtcacacaatgaagaatttggtagaactgttggggccgggtcactggttgatgtgatgccatggctccaatacttccctaacccggtacgtacagttttcagagaatttgagcagttaaacaggaatttctccaatttcatcctcgacaagtttttacgacattgtgagtccctgcgaccaggcgccgcccctagagacatgatggatgctttcattcttagtgcggaaaaaaaagcagccggcgatagtcacgggggtggcgctaggttagaccttgaaaacgtgcccgccacaatcacagacatcttcggcgcctcacaggacacactctccaccgctctacagtggctcctgctcttatttacacggtaccccgacgttcaaactagggtgcaggcagaattagaccaggttgtgggtcgggacaggctgccctgcatgggggaccaacccaatttgccgtatgtgctcgccttcctgtacgaggcgatgcgattttcatctttcgtcccggtgacaatcccacacgcgactaccgctaatacttccgtgttgggatatcatatacctaaggatactgtagtattcgttaaccagtggtcagtgaaccatgatccggtgaagtggccaaaccccgagaattttgacccagcccggtttttggacaaagacgggctgatcaataaggacctgacgtcccgagtaatgatttttagcgtgggcaagagaagatgtatcggtgaagaattgtctaaaatgcagcttttcctctttatcagcatcctggcacaccagtgcgattttcgagctaatcccaatgagcccgccaaaatgaactttagctacggcctgacaataaaaccaaaatcctttaaagtcaatgtgacgctgagagagtccatggagcttcttgactctgccgtccaaaacttgcaggcaaaggaaacatgtcagtag

SEQ ID NO: 23803 - DNA, 3399 bp, synthetic construct
  misc_feature 1..3399: note = Description of Artificial Sequence: Synthetic coding sequence
  source 1..3399: mol_type = other DNA
atggagcccgacagcctgctggaccaggacgacagctacgagagccctcaggagcggcccggatctcgccgaagcttgcctggaagcctgtctgagaagagcccaagcatggagccctcagcagccacaccctttcgggtgactgggttcctgagcagaaggcttaaggggtctatcaaacgaactaagagtcaaccaaagctagacagaaatcactcattcaggcacatccttccaggcttccgctcggctgctgctgctgcggctgacaacgagcgaagtcacctgatgccacggctgaaggagagtcggagtcacgaaagtttgttatcaccatcttccgcagtggaagcgctggatctcagcatggaagaggaggtggtcatcaaacctgtgcattccagcatcctcgggcaggattattgctttgaagtgaccactagttctggttctaaatgcttctcctgcaggagcgccgcagagcgcgataagtggatggagaacctgcggcgcgctgtgcaccctaataaagacaattcccggcgggtggagcacatcttaaaactgtgggtgatcgaagcaaaagatcttccggccaagaaaaagtacctgtgcgagctctgcctggatgatgtgctatatgcgagaaccaccgggaagctgaaaactgataacgtgttttggggggagcatttcgagttccacaatctaccacctctgcgaacggtgacagtgcatctctaccgggaaaccgacaagaaaaagaagaaggagcgtaatagctacctcggccttgtgtccttgcccgccgccagcgtcgccggacgtcagttcgtggagaagtggtatcccgtcgttacacctaatccgaagggaggcaaaggccccggacctatgataaggataaaagctcgctatcagacaatcaccatcctgccaatggagatgtacaaggagtttgccgaacacataactaaccactacctgggattgtgtgctgcactggaaccgattctgagcgccaaaactaaagaagaaatggcaagtgctctcgttcatatacttcagagtacaggcaaagtgaaagacttccttaccgatctcatgatgagtgaagttgatcgctgcggcgacaacgaacacttgatcttccgtgagaatacacttgcgacgaaggcgattgaggagtacctgaagctggtcggacagaagtacctgcaggatgctctgggggaatttattaaggcgctttatgaatctgacgagaactgcgaagtggacccgagcaaatgttctgccgccgatttacccgaacaccagggtaacctcaaaatgtgttgcgaactcgctttttgtaagatcatcaacagctattgcgtgttcccaagagaactgaaggaagtgttcgcctcttggaggcaagaatgttcaagcagaggacgacccgatatttccgaacggttaatttctgccagcctgttcctgcggttcctgtgccccgcaattatgagtccaagcctgttcaatctgctccaggaatatccagatgacagaaccgcccgcactctcacactgatagcgaaggtaacccagaatctggccaatttcgcgaagtttggctccaaggaagaatacatgtctttcatgaatcagttcctggaacatgagtggacgaatatgcaacggttcctgctggagatttccaatccggagacccttagcaataccgcaggttttgaaggatacatcgatctcggcagggagctctcctcactgcacagcttgctgtgggaggccgtgtcccagctggagcaaagtatcgtcagcaagctcgggccgcttccgagaattttgagagacgtgcatactgcccttagtacccccggaagcggacagctgcctggaacgaatgacctcgcctcaacccccggatctggctcttcctctatcagcgccggcctgcagaagatggtgattgagaatgacctttcaggtctaatagactttacaaggctcccaagccctactcctgagaacaaggatctgtttttcgtgactcgttcttctggggtccaaccttctccagctagaagctcctcttacagtgaggcaaacgaaccagatctacagatggctaatggcggcaaatcactgtccatggtcgacctgcaagatgcgaggactctcgacggggaagccgggtccccagccggaccagatgtcctacctaccgatggacaggccgctgctgctcagctagttgctggttggcccgctcgagcaacccctgtgaaccttgctggacttgccacagtgcgccgcgcaggtcaaacccctactacaccgggcacctctgaaggtgcccctggccggccgcagctgctggcccctctgtctttccagaatccggtgtaccaaatggctgccggactgcctttgagccctagaggcttgggggacagcgggagtgaggggcattctagtctgtcctcacacagcaacagtgaggagctagccgctgctgccaagctcggaagtttctccacagccgcagaggagctcgcgagacgccccggggagctcgcgaggaggcagatgagcctgacagagaagggtggacagcctacagtcccccgtcagaattctgctggccctcagcgcagaatcgaccagccaccccccccaccccccccacctcccccagccccacgcggccggactcccccaaacctgctttccactttgcaataccctcgccccagttccggaacgttagccagcgcctcccccgactgggtagggcccagcacaaggcttagacagcagtcatcttctagtaagggggattctcccgaacttaaacctcgggccgtccataagcaaggcccgtccccggtctcccccaatgccctcgacagaacagctgcctggctgctgaccatgaacgcacagctgcttgaagacgagggtcttggacccgacccacctcaccgcgataggttgcgctctaaggatgagctttcacaggctgagaaagacctggctgttctccaggataagcttcgcattagcaccaagaaactggaggagtatgaaaccctgtttaaatgccaggaggagacaacccagaagttagtcctggagtaccaagccagactcgaagaaggggaggagaggctgcgacggcaacaggaggacaaggatatacagatgaaggggatcatctctcggctgatgtcagttgaggaagagctcaaaaaagatcacgccgagatgcaggccgccgttgattccaaacagaaaattattgatgcacaggagaagcgcatagcctctctggatgccgccaatgcacgacttatgtctgccctcacccagctaaaggaatccatgcactag

SEQ ID NO: 23804 - DNA, 3198 bp, synthetic construct
  misc_feature 1..3198: note = Description of Artificial Sequence: Synthetic coding sequence
  source 1..3198: mol_type = other DNA
atgccccggctgaaggagagccggagccacgagagcctgctgagccccagcagcgccgttgaggccctcgatctttctatggaagaagaggttgtcattaagcccgtccattcctccatcctaggccaagattattgcttcgaagtgacgacctcttctggaagtaagtgcttctcctgcaggagcgcagccgagcgcgacaagtggatggagaatctaaggagggctgtccacccaaataaggacaattctagacgagttgaacacatcctcaaactctgggtgattgaagccaaggacttgccagccaagaagaaatatctctgcgagctctgtctcgatgacgtcctgtacgctaggactaccggcaaactgaaaactgacaacgtgttttggggggaacatttcgaattccacaatttgccgcccctacgcaccgttacagtgcatttatatagggagacagacaagaagaaaaagaaggagcgcaattcctatctagggttagtgtcactgccagccgccagtgtagctggacgtcaatttgtagaaaagtggtaccccgttgtaaccccgaacccaaaggggggaaagggcccaggccctatgatcagaattaaagcaagataccaaactatcacaattctcccgatggagatgtataaggaattcgctgagcacatcactaaccattatctgggattatgtgccgctcttgagccaatcctctccgctaagaccaaggaggagatggccagcgccttggtccatattctgcagtctacaggaaaggtgaaggacttcctcactgatctgatgatgagtgaagttgatcgatgtggggataatgagcacttgatcttccgcgaaaataccctggcaacaaaggcgatcgaggagtacctaaagctcgttggccagaagtaccttcaggacgcccttggcgaatttatcaaagctctatatgaatcggacgagaactgcgaggtagatccctctaaatgcagcgcagccgatctgcctgaacatcaaggtaatcttaagatgtgctgtgagctcgccttctgcaagattatcaacagttactgcgtctttccacgagagctgaaggaagtcttcgcctcctggcgtcaggagtgtagtagcaggggccggccagatatctctgaacgcctcatttccgcctccctcttcctgcgtttcttgtgccccgccatcatgagcccctctcttttcaacctgttgcaggaatatccagacgaccgcactgctcgcaccttaacactgatcgccaaggtgacccaaaacctcgctaacttcgccaaatttggatccaaggaagaatatatgagtttcatgaaccagttcttggaacacgaatggacgaatatgcagagattcttgttggaaatctccaatccagaaacattgagtaataccgccggtttcgaagggtacattgacttgggccgagagttgagctccttgcactccctgctatgggaagctgtcagccagctcgaacaatccatcgtcagtaagctgggtccgcttccccgaatcctgcgggatgtccatacagccttgtctacacccggctcggggcagcttccagggaccaatgatttagctagtacccccgggtccggcagcagttcaatttctgccgggcttcagaagatggtgattgaaaatgatctctccggcttaattgacttcactcggctgcccagccctactccagagaataaagacctgtttttcgtcaccagatcttcaggagtgcaaccttctcccgctagatcatcgagctactcggaggcgaacgagcccgacctgcagatggcaaatggcggcaagtcactctctatggttgacttgcaggacgcccgcacgctggacggtgaggcggggtcccctgccggacccgatgtgcttcccacagatggccaagccgccgctgcgcagctggtcgccggctggcccgccagggccactcctgtgaacctcgcgggactggcaacggtcaggagggctggacaaacacccacgacccccgggaccagtgagggagcaccagggaggccccaactactggctcctctgtccttccaaaatcccgtgtaccaaatggctgccgggctgcccctgtctcccagaggcctcggtgatagcggctccgagggccacagcagcctatctagtcattccaatagcgaggaacttgctgcagccgcgaaactcggcagtttttccaccgcggccgaggaactagcaagacgcccgggggagctggccaggcggcagatgtctctgactgagaaaggaggtcaacccactgtgcctcgccagaatagcgccggtccccagagacggatagatcagcctccaccgcctcctcctccgccccccccggccccccgcggtcgcacaccccccaatctcctgtctacgctgcagtaccctcgcccgtcctcaggtactctcgcctccgcatcgccagactgggtaggcccatcaacccgcctgagacagcagagtagctcgagcaaaggagactctcctgagttaaaaccccgggccgtgcacaaacagggcccatctccagtgtcacccaacgcgctggacaggaccgccgcgtggctactgaccatgaatgcccaacttctcgaggatgaaggactgggccccgacccaccacaccgggatcgactgaggagtaaggatgagctctcccaggctgagaaggatctggccgtgttacaggacaagctccggatttccacaaaaaaacttgaggagtacgagaccctgttcaaatgtcaggaggagacaacacagaaactagtgctagagtatcaggcgcggctggaggaaggcgaagaacgtcttcgacgacaacaagaagacaaagatatccaaatgaaaggaattattagtagactgatgagcgtcgaggaggagcttaagaaggaccacgcagagatgcaggctgccgtggattcaaaacagaaaattatcgatgctcaagagaaacgaattgcgagcctcgacgcagccaatgcccggcttatgagcgctctcactcagttaaaggagaggtattccatgcaagcgcggaatggtattagccctactaacccaacaaagttgcagataactgagaacggggaattccggaactcgtccaattgctag

SEQ ID NO: 23805 - DNA, 3210 bp, synthetic construct
  misc_feature 1..3210: note = Description of Artificial Sequence: Synthetic coding sequence
  source 1..3210: mol_type = other DNA
agccagcccaagctggaccggaaccacagcttccggcacatcctgcctggttttcggtcagccgctgctgccgccgcagataacgaaaggagccatctgatgccccgactcaaggagtcccgttcccacgagtccctgttgagcccctcaagcgctgtggaagctctcgacctgtcaatggaggaggaggtggtgattaagcccgttcattctagtatcctcggccaagactactgtttcgaagtgacaacgtccagcggcagcaaatgcttcagttgcaggtccgctgctgaaagggataagtggatggagaacctgcgtagagcggttcatcctaacaaggacaattctcgaagagttgaacatattctaaaactctgggtgattgaggcgaaggacctccccgcaaaaaagaaatatttgtgtgaactctgtctggacgatgtgttgtacgcacggacaacaggaaagcttaagactgataacgtgttctggggagagcacttcgagttccacaacttgcctcccctccgcacggtcaccgtgcacctgtaccgggagactgacaagaaaaagaaaaaggagagaaactcctacctgggcctggtgagtcttcccgccgcttccgtcgctggaagacaattcgtcgagaaatggtaccctgtcgttaccccaaatcccaaaggcggaaaggggccaggccctatgatacggattaaggctcgctaccaaaccattactattctcccaatggaaatgtacaaagagtttgctgaacatattaccaatcactatctgggtctgtgcgccgcattggagccgattcttagcgcaaagacaaaagaggagatggcctcagcgctggttcacatcctacagtctacaggcaaagttaaagatttcctcaccgacctgatgatgtctgaggtggatcggtgcggcgacaacgaacacctgattttccgagaaaacactctggccacgaaggccattgaagagtatctgaagttggtgggacagaaatacctacaggacgctcttggcgagtttattaaagccctgtacgaatctgatgaaaattgcgaagttgatcctagcaagtgttcagccgcagaccttccagaacatcagggcaacctgaagatgtgctgcgagcttgcattctgcaagatcatcaatagttattgcgtgtttccacgcgagcttaaagaggtcttcgccagttggagacaggagtgttcttccaggggccgacccgatataagtgagagactgatctccgccagcctcttccttcgattcctttgccctgccatcatgtccccgtccctgttcaatctccttcaggagtacccggacgaccgcacagccaggacactgactctgatcgccaaggtgactcagaacctcgccaactttgccaagttcggatctaaggaggaatacatgtcgttcatgaaccagtttcttgaacacgagtggactaatatgcagagattccttctggagatatctaaccctgagactctctcaaacaccgcggggttcgaagggtatattgacctcggtagagaactctcctcactgcactcactcctctgggaggcagtttctcaattggagcagtcaatcgtgtcaaagcttggacccctacccagaattctgcgtgacgtccacactgctctctcaacacccggcagcggtcagctgccaggaaccaatgacctagctagcactcctggcagcggcagctcaagcataagcgccggcttacagaagatggtgattgagaacgacctgtcaggtcttattgatttcactaggctgccaagccccacccccgaaaacaaggacctgttttttgtaacaaggagctcaggtgtccaaccatcccctgccagatcctcttcttacagcgaagctaacgaaccagacctgcagatggccaacgggggaaaatccctgtcaatggttgacctccaggatgctcggactctggatggcgaggcagggtcaccagccggacccgatgtactcccaacagacggacaggccgctgctgcacagttagtggccggctggcccgcccgcgcaaccccagtgaatctcgccggtctcgccacagtccgccgggctggccagacccccacaacccctggcacctcagagggcgctcccggccgcccccagctgctagctcccctgtccttccagaaccctgtgtaccaaatggcggctggtctgccactgtccccaaggggcctcggagattcaggctctgaggggcattcctccctctcttctcacagcaacagtgaagagctggcagcggcagctaaactgggcagcttttccaccgctgccgaagagctcgcgcgaagacctggtgaacttgccaggcgacagatgtctctcaccgaaaaaggtgggcagcccactgttccgcggcagaactctgcaggtccccaaagaaggatagaccagcctccccctcccccgccaccccccccaccagctcctcgtggacgcaccccccctaacctgctgagcaccctgcagtaccctcggccttcttcaggtactctcgccagcgcctctccggactgggtaggaccatcaacccgactgcggcagcagtcctcttccagtaagggagactccccagagctgaaacctcgggctgtgcataagcagggcccaagccctgtctcaccaaacgccctcgatagaacagctgcatggttattaacaatgaacgcgcagctgctcgaggatgagggactcggcccagacccacctcaccgagatcgtctgcgaagcaaggacgagctgagtcaggcagaaaaggacctggctgttctgcaggacaaactgaggatctctacgaagaaacttgaggaatatgaaaccctctttaagtgccaagaagaaacaacgcagaaactcgtgctcgagtatcaggcacggctggaagagggagaggaacgactcagaagacagcaggaggataaagacatacagatgaaagggattatcagccggctgatgagcgtggaagaagaactgaagaaggaccatgctgagatgcaggccgcagtggattccaagcagaagataatagatgcccaagagaaaaggatcgcctctctggatgccgccaacgcccgactgatgtccgcactgactcagctgaaggaaagcatgcactag

SEQ ID NO: 23806 - DNA, 876 bp, synthetic construct
  misc_feature 1..876: note = Description of Artificial Sequence: Synthetic coding sequence
  source 1..876: mol_type = other DNA
atggagcccgacagcctgctggaccaggacgacagctacgagagcccccaggagcgccctggatctaggcggagcctgcccggatccctttccgaaaaatcccccagcatggaaccatccgccgccaccccctttagagtcactggattcctgtcccggcggttgaagggctcaatcaaaaggacaaagagccagcccaagctcgatagaaaccactcatttagacacattctccccggattcagatccgccgctgcggccgctgcggacaacgaaagatctcacctgatgcctcggttgaaggaaagtcggtcccatgaaagcctgttgtcaccttctagcgccgtagaagcgctcgacctgagcatggaggaagaggtggtaattaagcctgtgcactctagtattctgggacaggactactgttttgaagttaccacaagttcgggtagcaaatgcttctcatgccgctccgcagcagaacgcgacaagtggatggagaatctgcggagagccgtgcaccccaataaagacaacagcagacgtgttgaacatatcctcaagttgtgggtgatagaggccaaagacctgcctgcaaagaagaaatatttgtgtgagctgtgcctggacgacgtgctgtacgcgcggaccacaggcaagctgaagaccgacaacgtcttctggggcgaacactttgagttccataacctgccacccttgcggacagtgaccgtgcatctgtaccgggaaactgacaaaaaaaaaaagaaggaaagaaacagttatttggggttagtgagccttcctgctgcaagcgtggcaggacgccagtttgtggagaagtggtaccccgtggtcacacccaaccctaaatag

SEQ ID NO: 23807 - DNA, 3570 bp, synthetic construct
  misc_feature 1..3570: note = Description of Artificial Sequence: Synthetic coding sequence
  source 1..3570: mol_type = other DNA
atgagcgccggcggcagcgcccggaagagcaccggccggagcagctattactaccgcctactgcgcagaccgcgtctccagcggcaacgcagccggagccgttcccgcacacgcccagccagagagtctccccaggagaggccaggaagcaggagaagcctccccggaagtctgtcagaaaaatccccgagcatggaaccttccgccgcaaccccattcagagttacagggttcctctccagaaggctcaaagggtccattaagcggacgaagagccagcctaagctcgatcgaaatcattcctttcgccatattctgccagggtttcgctcagctgcggccgccgccgcagataacgagcgtagccatttgatgcctcgactaaaggaatctcggtcccacgagtcgctcctcagcccctcctcagccgtggaggcgttggatttgagcatggaagaagaggttgtgataaagccagtgcacagcagcattctgggccaagactactgctttgaggtcactaccagctccggcagtaagtgtttctcttgccgttcagcagctgagcgcgacaagtggatggagaatctgagacgtgctgtccacccaaataaagacaactcacgcagggtggaacatattctgaagttatgggtcatcgaagccaaagatctgccagcaaagaagaagtatttgtgtgaactctgcctggatgatgtgctgtacgcccgaactacaggaaagctcaagacggataacgttttctggggagagcacttcgagtttcacaacctcccgccgctccggaccgtcacagtgcatctgtatagggaaacagacaagaaaaaaaaaaaggaacggaatagctacctgggtctcgtttctctgcctgcggcgagcgtggccggacgacaattcgtggagaaatggtaccccgtggtgactccaaaccctaagggcgggaaaggccccggtcctatgatcagaatcaaggcccggtatcagactatcactattctccctatggagatgtacaaggagttcgccgagcatattaccaaccattacttgggtctatgcgccgcgcttgaaccaattttatccgctaagactaaggaagagatggcctccgctttagttcacatcctgcagagcacggggaaggtgaaagatttcctgacagacctcatgatgtccgaagttgaccggtgcggtgataatgagcacctaatttttcgcgagaacacattggctactaaagctatagaagagtacctgaagctcgtgggacaaaagtacctccaagacgcactgggcgagttcataaaagccctgtacgagagtgatgaaaactgcgaagtcgatccctctaaatgctcggcagcagatcttcctgagcaccaggggaaccttaagatgtgttgtgagctcgcattttgtaagatcattaactcctactgtgtgttcccacgcgaactgaaagaggtcttcgccagctggcggcaggagtgctcttcccgagggcggcctgatatatcagagcgactcattagcgcaagtctgtttctgagattcttatgcccagcaatcatgagcccttccctctttaatcttctgcaggagtaccccgatgacaggacagcacgcactctcaccctcattgccaaagttacacagaatctcgccaattttgccaaattcggatccaaggaggaatacatgtcttttatgaatcagttccttgagcatgaatggactaacatgcagcgcttccttctagagatctcgaaccctgaaacgttgagcaataccgctgggtttgaggggtatattgacctgggcagagagctctcgtcgcttcactccctgctttgggaggctgtgtcacaactggagcagtcaatcgtgagcaagttgggcccgctgccccgaattctgagggatgtgcataccgctctgtctacaccggggtcaggccagttacccggcaccaacgacctggcttccacaccaggcagcggatcctctagcatcagtgcaggcttgcagaaaatggtcatcgagaatgatctgtccggtctaatagatttcactagactgccaagcccaacgcccgaaaacaaggatctgttttttgtgactagaagtagtggcgtacaaccatcacctgccaggtccagctcatactccgaggcgaatgaaccagatctccagatggcaaatggaggaaaatctctgagcatggtagatctgcaggacgctcgcaccctggatggagaggccgggtccccagccggccctgatgtgcttcccaccgatgggcaggccgctgccgcacaactggttgccggctggccagccagagctactccagtgaatttggccggcctggctactgtaagaagggctggccaaaccccgaccacccctggtactagcgaaggcgctccaggtcgtccacagttgctggcccctttgtcgtttcaaaaccctgtttatcagatggcagccggactgcctctctcccctcggggactgggcgatagtggatctgaaggccattcaagcctcagctcccattccaacagcgaggaattggcagccgccgccaaattagggtcattttccacagctgctgaggaacttgcccgtagacctggcgaactggctcgcagacaaatgagcctgacagagaagggaggacagcccacagtcccccggcagaattccgctggtcctcagcgcagaatagaccaacctcctcctccccccccccccccccctccagcacctcggggacgcacgcctcctaacttgctgagtaccttgcagtaccccagaccgagtagtggtacccttgccagtgcttctcccgattgggtagggcccagtacaaggcttaggcaacaatcgagctcgagcaagggggatagcccagagctaaaaccacgggccgtgcacaaacagggtcctagtccggtctcacctaacgcactggatcggaccgctgcttggctattaaccatgaatgcacagttgttagaggacgaaggccttgggcctgaccccccgcaccgggatcgcctgagaagcaaggatgagctgtcacaagccgaaaaggatttggctgtcttacaagacaaactccgcatctccactaagaagctggaagagtatgaaactttgttcaagtgtcaagaggaaactacacagaaactggtgttagagtatcaagccagactcgaagagggagaagagaggcttcggcggcagcaggaggataaagacatacagatgaagggcatcatttcacgactgatgagcgtggaggaggaactcaagaaagaccatgcagaaatgcaagccgcagtggacagtaagcagaagatcattgacgcccaagagaaaaggattgccagcttggatgccgcgaatgccaggcttatgagcgcactgacacaactcaaagagaggtattctatgcaagcacgcaatggtattagtcctactaaccccaccaagttgcaaatcacagagaacggcgagttcagaaactccagcaattgctag

SEQ ID NO: 23808 - DNA, 690 bp, synthetic construct
  misc_feature 1..690: note = Description of Artificial Sequence: Synthetic coding sequence
  source 1..690: mol_type = other DNA
atgccccggctgaaggagagccggagccacgagagcctgctgagcccttcgagcgcagttgaagccctggacctgtccatggaggaggaggtggtgatcaagccggtgcactcaagcatcttaggacaggactattgctttgaagttaccacctccagcggaagtaaatgtttctcttgtaggtccgccgcagaaagggacaaatggatggagaacttaagaagagcagtgcacccaaacaaggacaattctcgtagggtcgagcatattctgaaattgtgggtaattgaggccaaagatcttccggcaaaaaagaaatacctctgtgaactgtgtttggatgacgttctgtacgccagaacaaccggtaaactcaaaaccgataatgttttttggggtgaacattttgaatttcataacctcccccctcttcgcactgttacggtccatctgtatagagagacagacaaaaagaagaagaaggagcggaactcctacctcggcctggtctccctgccagccgcctctgttgcggggcgccaatttgtggagaagtggtatcccgtcgtaaccccaaatccaaaagggggaaaaggccctggacctatgatacgaatcaaggcgcgctatcaaacaataaccatcctgcccatggagatgtacaaggagtttgccgagcatattacatag

SEQ ID NO: 23809 - DNA, 3423 bp, synthetic construct
  misc_feature 1..3423: note = Description of Artificial Sequence: Synthetic coding sequence
  source 1..3423: mol_type = other DNA
atgagctacaactacgtggtgaccgcccagaagcccaccgccgtgaacggctgtgtcactgggcactttacgtcggcagaggacctgaatttactcattgcaaaaaacacccggctggaaatttacgtagttactgccgaagggttgagacctgtaaaggaggtgggcatgtacggaaaaatcgccgtgatggagcttttccgacccaagggcgaaagcaaagacctcctcttcatcctgaccgctaagtacaacgcttgcatcctcgagtacaagcagagtggggagtctatagacataattacgagggcccacggcaacgtacaggacaggattgggaggccttccgagaccgggatcatcggcattatcgatcccgagtgcagaatgattggcctgaggctttacgatggactgttcaaggtgatacctttggacagagacaacaaagagttgaaggcctttaacatccgattagaagaactacacgttatagacgtgaaattcctctacggttgtcaggcaccaactatctgctttgtgtatcaggacccacagggtcgccatgtgaagacctatgaggtttcccttcgtgagaaagaattcaacaaagggccatggaagcaagaaaatgtcgaagctgaggccagcatggtgatcgccgtgcccgaaccttttgggggtgcaataatcattggtcaagagagtatcacatatcacaatggggacaagtacttggcaatcgccccaccaatcatcaaacaatccacgattgtgtgccataaccgggttgaccccaacggcagtaggtacctgttaggtgacatggaggggagactgtttatgctgctgctggagaaggaagaacagatggacggcacggtaaccttgaaagacctgagagttgaacttcttggggagacctcaatcgctgaatgcctgacgtatttggataacggagtcgtattcgttggaagccgcttgggtgactcacaacttgtaaagctcaatgttgactcaaacgaacagggaagctacgtagtagctatggaaacatttacgaatctgggccctattgtagacatgtgcgtggtcgaccttgagaggcaaggacagggacagctcgtcacttgctcgggggcttttaaagaaggctctctgagaatcattagaaatggaatcggaatccacgagcacgcttctatcgacttgcccggaattaaaggcctgtggccactgcgtagtgacccaaaccgcgagaccgacgacaccctggtgctaagtttcgtcggacagacacgggtactgatgctgaatggggaagaggtggaagaaactgagctcatgggctttgttgatgatcaacagacattcttttgcggtaatgtcgcccatcaacagctgatacaaattacctcagcctctgtcagactcgtaagtcaggagccaaaagcgttagtctcagagtggaaagagccccaagcaaagaacatatctgtagctagctgtaatagtagtcaggtggttgttgcagtcgggagggccctgtattaccttcagatccacccccaggaactcaggcagatttcccacaccgagatggagcacgaagtggcttgcctggatatcactccgcttggggactccaacgggctgtccccattgtgcgcaatcggactctggactgatatatctgcacgcatcctcaagctgccttcttttgagttgttgcataaggaaatgctcggcggtgagatcatcccacgctccatattgatgaccacgttcgagtcctcgcactacctcctgtgtgctttgggggacggtgcactgttttatttcggactgaacatcgaaaccggacttctgtccgatcgtaaaaaggtcactctcggtacccagcccactgtgctgcggacattcaggtcactatccacaaccaacgtgttcgcctgctcagataggcctactgtaatctatagttctaaccataagctggtgttcagtaatgttaatttaaaggaggtgaactatatgtgcccgctgaactccgacgggtatccagactcactggccttggcgaacaattcaacacttacaatcggaacaatcgatgaaatccagaaactacacattcggaccgtgcccttgtacgagtctccgcgaaagatctgctaccaggaggtgtctcagtgcttcggagttctctcatctcgcattgaggtccaggatacttctggcgggactacagcactgaggccatcggcaagtactcaggccctcagttcttcggtgagcagctcgaagctgttctccagtagcaccgcccctcatgaaacatctttcggcgaagaggtggaagtgcataatttgctgataatcgatcaacacaccttcgaagtccttcacgctcatcagtttctgcagaacgagtatgccctaagcctcgtgagctgcaaacttgggaaggaccccaatacttacttcattgtcggtacagccatggtgtaccccgaggaggcagaacccaagcaggggagaatagtcgtgttccaatacagcgacggtaaactgcagaccgtggctgagaaagaggtcaagggtgccgtttactccatggtcgagtttaatgggaagctgctcgcatcaatcaatagcacagtacgactgtatgaatggactaccgaaaaggagctgcgaaccgagtgcaatcactacaataatataatggccttgtacctgaagaccaaaggggactttatcctggtgggggatctcatgaggagtgtcttactcctggcttataaaccgatggaaggcaacttcgaagaaattgctagggacttcaacccgaactggatgagtgctgtcgagatcttagacgacgataacttcctaggggctgaaaatgccttcaacctctttgtttgccagaaagattctgccgccactaccgacgaggaacgtcaacacttgcaggaggtgggactgtttcaccttggcgagtttgtgaacgtgttctgtcacggatctctggtaatgcaaaatttgggcgagacctccacacctacccagggaagtgtattgtttggaaccgtgaacggaatgatcggcctcgtgacgagcctgtccgaaagctggtacaacctgctactggacatgcagaatagactgaacaaggttattaagtccgtaggtaagatagagcactccttttggagatctttccatactgagcgcaaaaccgagccagctacgggatttatagatggtgacctcattgaatccttcttggacatcagtagacccaagatgcaagaggttgtggcaaacctgcagtatgatgacggcagtggaatgaaacgtgaggctacagcagatgatctcattaaggtggtagaggaactgacgcggattcactag

SEQ ID NO: 23810 - DNA, 1356 bp, synthetic construct
  misc_feature 1..1356: note = Description of Artificial Sequence: Synthetic coding sequence
  source 1..1356: mol_type = other DNA
atgagctacaactacgtggtgaccgcccagaagcccaccgccgtgaacggttgcgttactggccattttacaagcgcagaagaccttaacctcttgattgccaaaaatacccgtttagagatttacgtagttaccgccgaaggcctgaggcccgttaaggaggtgggaatgtacggaaagatcgccgtgatggaattattccggcctaaagctctgagttcctcagtcagttctagcaagttgttttcttcctcaacagcaccccacgaaacatcatttggggaggaggtcgaggtgcacaatctcctgataatcgaccagcacacattcgaggttctacatgcccaccagttcctgcagaatgagtacgcactgtccctggttagttgcaagctgggtaaggaccctaacacatacttcatcgtgggtacggccatggtgtatccagaagaggcagagcccaagcaggggcgtattgtggtttttcagtattccgacggcaagctacaaacagtggccgagaaggaggtgaaaggggcggtgtattccatggtggagttcaatgggaaattgctggcctccatcaattctaccgtgaggctatacgagtggaccacagagaaggaattgagaactgagtgtaaccattacaacaatatcatggccctgtacctgaaaactaagggggattttatcctagtcggagacctgatgagatctgttctcctactggcctataaaccaatggaaggcaacttcgaagagatcgcccgcgatttcaaccccaattggatgtccgctgtcgaaatcctggatgacgacaacttcctcggcgccgaaaacgctttcaacctgtttgtctgtcagaaggattccgcagcaaccaccgatgaggagcggcaacacctccaggaagtgggcttgttccacctgggcgaatttgtaaatgtattttgccacggttcactcgtaatgcagaacctgggggagactagcaccccaacccaaggatctgtactattcggcacagtcaacggcatgatcgggttggttactagcttgagtgagtcatggtacaacctcctactagatatgcaaaatagacttaacaaagtcatcaagtccgtgggtaagattgagcactctttttggcggtcattccatacggaaaggaagaccgagcctgccaccggatttattgacggagatctgattgaaagctttctggacatttctcgacccaagatgcaggaggtggtcgctaatctccaatatgacgacgggtccggtatgaagcgtgaggccacggctgatgacctgattaaagtggtggaggaattgacgcgcattcactag

SEQ ID NO: 23811 - DNA, 441 bp, synthetic construct
  misc_feature 1..441: note = Description of Artificial Sequence: Synthetic coding sequence
  source 1..441: mol_type = other DNA
atgagctacaactacgtggtgaccgcccagaagcccaccgccgtgaatgggtgcgtgacaggccatttcacgagcgcagaggatttaaacttgctgattgcaaaaaacacgcgcctagaaatttacgtcgttaccgccgaaggactcagaccagtgaaagaggtgggtatgtacggcaaaatcgccgtgatggagcttttcagacccaagggggaaagcaaagacctgctgttcattctcactgcgaagtataatgcctgtattctggaatacaaacaaagcggcgagagcatcgacataattactcgcgctcatggaaacgtgcaagaccgcattggtcggccatcagagactggcatcattgggatcattgaccctgagtgccggatgatcgggctcaggctctatgatggactgtttaaggttatccctctggattag

SEQ ID NO: 23812 - DNA, 330 bp, synthetic construct
  misc_feature 1..330: note = Description of Artificial Sequence: Synthetic coding sequence
  source 1..330: mol_type = other DNA
atgagctacaactacgtggtgaccgcccagaagcccaccgccgtgaacggctgtgtgaccggccactttacaagcgcagaggacttaaatttgctcattgctaaaaatactcgcctggagatctacgtggttacggcagaaggcctgcgcccggtgaaagaggtcggcatgtacgggaaaatcgcggtgatggaattatttaggcccaaaggagagtcgaaggacctgctttttatccttacggcgaagtacaatgcctgcattctggagtacaagcagtctggcgaatcaatcgacatcattactagggcccacggcaacgtgcaatag

SEQ ID NO: 23813 - DNA, 1284 bp, synthetic construct
  misc_feature 1..1284: note = Description of Artificial Sequence: Synthetic coding sequence
  source 1..1284: mol_type = other DNA
atggcccccaagaagcggcccgagacccagaagaccagcgagatcgtgttgagacccagaaataagaggtctcgtagcccactagaattggagcccgaagctaaaaaattgtgcgccaaaggatctggcccttcgcggagatgcgactccgattgcttatgggtgggtttagcaggaccccaaattttacctccttgtcgcagcatcgttcgaacgcttcaccagcacaaactcggacgcgccagctggcccagcgtacagcaggggctccagcagtcattcttacacactctcgactcctatcgcattctccagaaggctgcacccttcgatcggcgagctaccagtctcgcgtggcaccccactcacccaagcactgtggcggttggcagcaagggcggcgatataatgctatggaatttcggtataaaggataaacccacgtttatcaaaggaatcggtgcgggcgggagcatcaccggtctcaaatttaatccgctgaatacaaaccagttctatgccagtagcatggaaggtaccacccggcttcaggacttcaagggtaacatcctgagagtgtttgccagttctgacaccataaacatctggttctgtagcctggatgtttcagccagctctcgcatggtggtcaccggtgataacgttgggaatgtgattctgctaaacatggacggcaaggagctctggaatctccgtatgcataagaaaaaagtgacacacgtagctctgaacccctgctgcgattggttcctggccaccgctagcgtggatcaaacagttaaaatttgggatctgaggcaggtgcgcggcaaggcctcctttctgtatagcctccctcatcgacacccggttaacgcggcgtgtttcagtcccgacggagctcgcctcctaaccaccgaccagaagagcgaaattcgggtgtacagcgcctctcagtgggattgtcccttgggactgattccccaccctcaccgacatttccagcacctcacccccatcaaagctgcttggcatccccggtacaacctgattgtggttggcagatatcccgacccaaatttcaaatcctgcaccccttacgaactgcgcaccattgatgtgttcgatggaaactctgggaagatgatgtgccagctctacgatccagaaagctccggtatctccagcttgaacgaattcaaccctatgggagacacactcgcatctgctatgggataccacatcctaatttggtcccaagaggaagcccggactcggaagtag

SEQ ID NO: 23814 - DNA, 717 bp, synthetic construct
  misc_feature 1..717: note = Description of Artificial Sequence: Synthetic coding sequence
  source 1..717: mol_type = other DNA
atggcccccaagaagcggcccgagacccagaagaccagcgagatcgtgttgaggccgcgaaacaaacggtcacgctccccactggaactcgaacccgaggccaagaagctatgtgctaagggctccggaccatctagaagatgtgatagcgattgcctgtgggtgggtctagcggggccccagatcctgccgccatgtcgctccattgtaaggaccttgcatcagcataaactcgggcgtgcatcttggccctcagtgcagcagggcctgcagcagtcttttttacacaccctggactcgtaccgaatactgcagaaggctgccccatttgaccgacgggctacatcactggcctggcacccgactcatccttccaccgttgccgttggatcaaaagggggcgatattatgctttggaactttggaatcaaggacaaacccacgtttatcaagggggcagcatggcatccgcggtacaatcttatcgtggttggcaggtatcctgatcccaactttaaatcatgcactccttatgaattgcgtaccatcgatgtgttcgacggcaatagtggcaaaatgatgtgccagctttacgaccccgaatcctcgggaattagctcactcaatgagtttaaccccatgggtgatacattggcgtcggccatgggctaccacatcctcatttggagtcaagaggaagcacggaccagaaaatag

SEQ ID NO: 23815 - DNA, 735 bp, synthetic construct
  misc_feature 1..735: note = Description of Artificial Sequence: Synthetic coding sequence
  source 1..735: mol_type = other DNA
atggcccccaagaagcggcccgagacccagaagaccagcgagatcgtattgcgtccacgtaataagagaagtaggtctcctcttgagctggagccagaggctaagaagctgtgcgccaaaggatctggcccatctcgtcgatgcgacagcgattgcctatgggttggtctggctggcccacaaattctccctccatgcagatcaatcgtgagaacgcttcaccaacacaagttaggaagagccagttggcctagcgttcaacagggcctccaacagtccttccttcacacactggattcgtataggattctccagaaggcggccccctttgatcgccgtgccacaagtctcgcctggcacccgacccaccccagtacagtggctgtcggatccaagggaggggacattatgctgtggaacttcggcataaaagataagccaaccttcatcaaaggaataggcgccggtggaagcataacagggcttaagttcaaccctttgaacactaaccaattttacgcctcatcaatggagggaacaactaggctgcaggattttaagggcaatatcctgcgcgtgttcgccagttcagatactattaatatatggttctgctcccttgatgtatccgcctcgagtagaatggtggtcacgggtgataacgttggcaacgtgatcttactgaacatggacgggaaggaactagtttctgtccccatggagcctgggtcctag

SEQ ID NO: 23816 - DNA, 1092 bp, synthetic construct
  misc_feature 1..1092: note = Description of Artificial Sequence: Synthetic coding sequence
  source 1..1092: mol_type = other DNA
atggcccccaagaagcggcccgagacccagaagaccagcgagatcgtgctgagaccacggaacaagaggagccgctctccactggagctggagcccgaagccaaaaaactctgcgcaaaaggcagtggcccttcacggcgctgcgattcggattgtctctgggtcggcttggctggtccacagatcctacctccgtgcaggtccatcgtccgaaccctccaccagcataagctggggagagcttcttggccgagcgttcagcaaatcggagccgggggcagcatcaccggactgaaatttaaccctctcaatacaaatcagttctatgcatcatcaatggaaggcacaaccagacttcaggactttaaggggaatattcttagggttttcgccagcagtgatacaattaacatttggttttgttccctcgacgtgagcgcttcatctagaatggttgtgacaggggacaatgtggggaatgtgatccttctgaacatggacggtaaggagctgtggaaccttcgaatgcacaagaagaaggtgacgcacgttgctctcaatccctgttgcgattggttcttggcaacggccagtgtagaccagaccgtgaaaatatgggacctccggcaagtgagggggaaggctagtttcctgtattcactgccacatcgacatcctgtgaatgcagcctgcttctcccccgatggggcccggcttcttaccactgatcagaagagcgaaattcgggtttattccgccagccagtgggactgccctctgggactcattcctcacccacaccgccacttccagcaccttacacccataaaggccgcatggcacccacgatacaatctgattgtggtaggcaggtaccctgacccaaacttcaagagctgtaccccgtatgagctgcggaccatagatgtttttgatggcaactcagggaagatgatgtgtcagctctacgaccctgaatcgagtggtatttccagtctcaacgaattcaatccaatgggagacaccctagcatctgctatggggtatcatattctgatatggtctcaggaggaagctagaacccgtaagtag

SEQ ID NO: 23817 - DNA, 1119 bp, synthetic construct
  misc_feature 1..1119: note = Description of Artificial Sequence: Synthetic coding sequence
  source 1..1119: mol_type = other DNA
atgagcgaggccggcgaggccaccaccaccaccaccaccaccctgccccaggcacccaccgaagctgcagccgccgccccccaagatcccgccccaaaaagcccagtagggagcggtgcaccccaggcagctgccccagcccccgccgcccacgtggcaggtaatccagggggggacgctgccccagctgcaacaggcactgcggccgccgccagtctggcaaccgctgctggctccgaagatgcggagaaaaaagtactcgccacgaaggtcttgggcaccgtgaagtggttcaacgtgcgtaatggatatggattcattaacagaaacgataccaaggaagatgtgtttgtccaccaaactgcaatcaaaaagaataaccctcgcaagtatctccgcagcgtgggggacggggaaacagtggaatttgacgtggttgagggtgaaaagggagccgaggctgccaacgtgaccgggcctgatggcgtccctgtagagggcagtaggtatgctgcagaccgtcgaagataccgtagagggtactacggccggcgtaggggtccccctagaaattatgccggcgaagaggaagaagaagggtcgggttcatcggagggttttgatcccccagccacagatcgtcagttcagcggggcgaggaaccagctaaggcggcctcaatacaggccccagtatcgacagcgacgcttcccaccttaccacgtcggccagacttttgataggcggagccgcgtcctgccccaccccaataggattcaagccggagaaatcggagagatgaaggatggggttccagaaggcgcccagctgcaggggccagttcaccgtaatccaacatatcgaccccgttatcgaagtaggggtccaccccgcccaagacccgccccagccgtgggagaggcagaggacaaagagaaccagcaagctaccagtgggccaaaccagcctagtgttaggaggggctaccgtcgaccctacaactacagacgaagacctcggcctcccaacgcaccctcacaggatggcaaagaggccaaagcgggggaagcacccaccgagaaccccgctcctcccacccagcaaagttccgccgaatag

SEQ ID NO: 23818 - DNA, 867 bp, synthetic construct
  misc_feature 1..867: note = Description of Artificial Sequence: Synthetic coding sequence
  source 1..867: mol_type = other DNA
atggccaacgagacccagaaggtgggcgccatccacttccccttccctttcaccccgtacagcattcaggaggacttcatggcggaactttacagagtcttggaggccggaaagataggtatctttgagagccccaccggcacggggaaatctttgtccctgatctgcggcgcgttgagctggctcagagattttgaacagaagaaaagagaggaagaggctcggttgctggaaacgggaactggacccctgcacgatgagaaagacgagtctctctgtttgtcgtcaagttgcgaaggggccgcaggcaccccccgtcccgccggcgagccggcctgggtgacccagttcgtgcaaaaaaaggaggagcgagatctggttgaccgtttgaaagcagagcaagcccgtcgcaagcagagagaggaaagactccaacagcttcagcatagagtgcagcttaagtacgccgccaagagactgaggcaagaggaggaagaaagagaaaatctccttcgactaagtcgagagatgctagaaactggacccgaagccgaacgcctcgaacagctcgaatcaggcgaggaggaacttgtgcttgccgagtacgaatccgacgaagaaaagaaagtggcctcacgggcgcccagcgatgcgacgtcgtctcggcaccctccggacgcgtcttttcctgctgcgcttaatttcctgcagaggaccaggccttcttcagtgctctcagaggacttactgatgcagagggcggttgccaagcaccccgctctgcttccctggcagatgagctcctcacccctgcggcctggctccgaatggatgcgtatgagaatgacctggcggaaaaacacatag

SEQ ID NO: 23819 - DNA, 2571 bp, synthetic construct
  misc_feature 1..2571: note = Description of Artificial Sequence: Synthetic coding sequence
  source 1..2571: mol_type = other DNA
atggccaacgagacccagaaggtgggcgccatccacttccccttccctttcacaccatactcgatccaggaggactttatggccgagctgtatagggtcctagaagctggaaagattggaatttttgaatcacccaccggaacaggaaagtctctcagcctgatctgcggcgccctctcctggctgagagattttgagcagaaaaagcgcgaagaagaggccaggctgttagagaccggaactggcccactgcacgatgagaaagatgagtctttgtgcctatccagcagctgcgaaggcgctgcagggacccctcggccagcaggggaacccgcctgggttacgcaatttgtgcagaagaaggaggaaagagacctggtggatcggcttaaggcagaacaggctcgtcgcaagcagcgggaggaacgccttcagcaactgcagcatagagtccagctgaaatacgcagccaagaggctgcggcaggaagaagaagagagggagaatctgctgaggctgtctcgggagatgcttgaaaccggacctgaggccgaaagactagagcagttagagagcggagaggaggagcttgttctggctgaatatgaatcagatgaagagaagaaggtggctagtcgtgtggacgaggatgaagacgatctggaagaggaacacattaccaagatctactactgctcgagaacccactcccaattggcccagttcgtacatgaagtgaagaaaagtccttttggaaaggacgtgcgtctggtttcgctgggctcccgccagaacctctgtgtgaacgaggatgtcaaatctctcggctcagtgcagctgataaacgacagatgtgtcgacatgcaacgtagtagacacgagaaaaaaaagggggctgaggaagagaagcccaagaggaggaggcaagagaagcaggccgcttgtcctttttacaaccatgagcagatgggactgctgcgtgacgaggccctcgcggaggtgaaagatatggagcagctccttgccctaggtaaagaggccagagcctgtccgtattacggatcgcggctggccattccagctgcccagctggtcgtcctcccttatcagatgcttctgcatgccgctacccgccaggccgccggcatcaggctgcaggatcaagtggtgattatagacgaggctcacaacctgatagatactattactggcatgcattccgtcgaagtgtctggaagccagctgtgtcaagctcacagccaactcttacagtatgtggagagatatggaaagcggttaaaggctaaaaacctgatgtatttgaaacagatactgtatttgctcgaaaaatttgttgccgttctcggtggcaatatcaaacagaatccaaacacccagtcgttaagccagactggcaccgagctgaaaaccattaatgatttccttttccaatcccagatcgataacatcaatttattcaaagttcagcgatattgcgagaagtctatgatctctcggaagttgttcggatttactgaaagatatggcgccgttttctcatcccgtgaacaacctaagctagctggatttcagcaattcctgcagagtttgcagccccgtacaacagaagcattggcagctccggccgacgaatcccaggctagcactctgcgtcctgccagccccctgatgcatatccagggatttctggccgcactgacaacagctaatcaggatggccgggtgatattgtcccggcaggggagtctttcgcagagcaccttgaagtttttattgctaaatccagctgtgcactttgctcaggtcgttaaagaatgtagggctgtcgtgatcgcaggaggaaccatgcagccagtgtctgattttcgccagcaactgctggcctgtgctggtgttgaagctgaacgagtggtagagttctcctgcggacatgtgatccctcccgacaacattttgcctttggttatctgttcaggaatatctaatcagccactggaatttacctttcaaaagcgggaattgccgcagatgatctttcaggagcccaaaagcgcccatcaggtcgaacaggtcttgctcgcatattccaggtgtattcaggcctgtggccaggaaagagggcaagtaactggcgccctgctgctgtccgtcgtgggtgggaagatgtcagagggcataaacttctccgataatctcggcaggtgtgtggtgatggtcggtatgccctttcccaacattaggtcagccgagcttcaggaaaaaatggcctacctcgatcaaaccctcccgcgggcacccgggcaggcaccaccagggaaagctttggttgagaacctatgcatgaaggctgtcaatcagagtataggacgagcaatccgacatcagaaggacttcgcaagtgttgtcctgttggatcagcggtatgctcggcccccagtgcttgccaaactgccagcctggattcgcgccagagttgaggttaaggcaacttttggccctgctattgccgcagtccagaaattccatcgggagaaatccgcatccagctag

SEQ ID NO: 23820 - DNA, 1671 bp, synthetic construct
  misc_feature 1..1671: note = Description of Artificial Sequence: Synthetic coding sequence
  source 1..1671: mol_type = other DNA
gaggaggagcccctgtggcagggctgcagcgccggcctgccctggttgccagccgagaaaaagaagggcgcagaagaagagaaaccgaaacggcggcgacaggaaaagcaagcagcttgtccattctacaaccacgagcagatgggtctactgagagatgaggcactcgctgaagtcaaagatatggaacaactcctggcactgggcaaggaagccagggcttgcccatactatggctcgaggctggccatacctgccgcccaactcgtggttctgccctatcagatgctcctgcatgccgctacacgacaggccgcgggaatcagactccaggaccaggtcgtcatcattgacgaagctcataatttgatcgatacgatcaccgggatgcactccgttgaagtgtctggaagccagctatgtcaggcccatagtcagttgctgcaatatgttgagcgctacggcaaaagactgaaagccaagaaccttatgtatttaaagcaaatcctgtacttgttagaaaagtttgtggctgtccttggcggaaacatcaagcagaaccccaatacgcagagcctgagccagactggcacggagctcaagactattaacgacttcctgttccaatcacagatagacaacataaatctctttaaggtacaacgctattgtgagaagagcatgatatctaggaagctgtttggtttcacagaacgatatggtgctgtgttctccagccgggagcagccaaagctcgcaggattccagcagtttctgcagtcactccagcctcgaaccacggaagccctggccgcgcccgctgatgaatctcaggcttccactctcaggccggcctctccattaatgcacattcagggcttcttagccgcgcttaccacagcaaaccaggacgggagagtgatcctctctcgtcaaggttcactgtcccagtcaactctaaaatttttactactgaatccagctgtgcacttcgcacaagtggttaaagagtgtcgggcagttgtgattgccggcggcaccatgcagccagtctctgattttaggcagcagctcctcgcctgcgcaggcgtggaggccgaacgtgttgtggagttctcatgtggacatgtcatccccccagacaacatcctccccctcgtgatttgctcaggcatcagtaatcaaccattggagtttacctttcagaaaagagagctgcctcagatgatggatgaggtagggaggatcctgtgcaacctgtgcggggtggtgcccggcggcgtggtctgttttttcccttcatatgagtatctcaggcaagttcacgctcactgggaaaaaggaggactgctggggagactggcagcccgaaaaaaaatctttcaggaaccaaaatcagcacatcaggtggagcaagtgctgcttgcctacagtcgctgcatccaagcttgcggtcaggagcgaggtcaggttacaggcgcgttactgttgagcgtcgttggcgggaaaatgtcagagggtattaacttctcagataacctggggcgttgcgtggttatggtaggaatgccattcccaaacattagatcagcagagctgcaagaaaagatggcctacctggaccaaactctggctggcccaagtggtacacggcggatccttccggcttag

SEQ ID NO: 23821 - DNA, 2913 bp, synthetic construct
  misc_feature 1..2913: note = Description of Artificial Sequence: Synthetic coding sequence
  source 1..2913: mol_type = other DNA
atggccaacgagacccagaaggtgggcgccatccacttccccttcccattcaccccgtactcaattcaggaggacttcatggcggaattatacagggtacttgaggcaggaaaaattggaattttcgaatcccccacagggacaggtaaatctctctcattgatttgcggcgctttatcatggttgcgcgattttgagcaaaagaaacgggaagaagaggcccgcctgctggagactggtacaggacctctccatgatgagaaggacgagtccctgtgtctgtctagcagttgtgagggcgcggccgggactccaagacctgctggtgaacctgcctgggtgacccagttcgtacaaaagaaggaagaacgcgatctggtggatcgccttaaagcggagcaagcacgccggaagcagcgagaagaacggctccagcagctccaacacagggtccagctgaagtatgccgctaaacgcctccgccaggaagaggaggaacgtgaaaacttgctgagactttcgcgtgagatgctggaaaccggccccgaagcggagagactggaacagcttgagtccggcgaggaagaattggtcctggcagagtacgaatctgacgaggagaagaaggtggccagcagagtcgacgaggatgaggatgacctggaagaggaacatatcaccaagatatactactgtagtcgcactcactcacagctcgctcagtttgtgcatgaagtgaagaaatcccccttcggcaaggacgtccggcttgtgagtttagggtccagacagaatctgtgtgttaatgaggatgtcaagtctctggggagtgtgcagttgatcaatgataggtgtgtggatatgcagcgctccagacatgaaaagaaaaagggcgccgaggaggagaaacccaagcgacgccgccaggagaagcaggcggcttgcccgttctataaccacgagcagatgggtctgcttagggacgaggcactggctgaggtcaaagatatggagcagctcctggcgttgggcaaggaggccagagcctgtccttattacggatctcggctcgctatcccagccgctcagctcgtcgtgctcccgtaccagatgctcctgcacgcagcaacacgccaggcggccgggatccggcttcaagatcaggttgttatcatagacgaggcgcataatctcatcgacaccattaccggcatgcactccgtggaagtgagtggctctcagctgtgccaggcccactcccagttgcttcagtatgtagagaggtacggtaaaaggcttaaagccaagaatctgatgtacctcaagcaaatactgtaccttttagagaagttcgtggcagtcctcggcggcaacattaagcaaaatcctaacacgcagtcactgtcacagaccggcactgagctgaagaccattaacgacttcctgtttcagagccaaatagacaacatcaacctctttaaggtgcagcggtactgtgagaaatcaatgatcagccgtaagctcttcggatttactgagagatacggagctgtcttctcttcaagggagcaaccgaagctcgctggatttcaacagttcctgcaatcactgcaaccacgcaccactgaggcactggccgcacccgccgacgaaagccaggcgagcacactgagacctgccagcccactcatgcatatccagggctttctggccgcgctcacgactgcaaatcaggatgggcgtgtcattctcagccgccagggctcactgtcacagagcactctaaagttcctgttgcttaaccccgcggtacacttcgctcaggtggtgaaagagtgtcgagcagttgtgatcgccggggggactatgcagcccgtgtctgattttcgacagcagttgcttgcttgtgctggtgtcgaggccgagagggtagtggagttctcttgtgggcacgttatccctccggacaacattctccccctcgtgatttgcagcggaattagtaatcaaccgttggagtttactttccagaaaagggagctgccccaaatgatggacgaggtaggtcggatactctgtaatctctgtggcgtcgtgcccggcggcgtagtttgctttttcccgagttatgagtatcttcggcaggtccacgcccattgggaaaagggcggcctcctcggaagactagctgcacggaagaaaatattccaggaacctaagagtgctcaccaagtggaacaagtcctcctcgcgtattcccggtgcatccaagcctgtggacaggagagagggcaagttactggtgccctgctgctgagtgtggtcgggggcaagatgtctgagggcatcaatttttctgataacttgggcaggtgtgttgtcatggtgggcatgcctttcccaaacattcggtcagcggaacttcaagagaagatggcctacctggatcagaccctcagtccccgccctggcactcctagggaaggctctggaggagagcctgtacatgagggtcgccaacccgtgcacaggcagggccaccaggcccccgagggtttttgccaaagatctgcccccggacccgccatttgccctgccccttgccctggccaggccgccggcctggacccttccccttgcggcgggcagtcgtacctctggccacgccattgttgctgcgctgaagtgtctcctggcgaggtgggcctctttctcatgggaaatcatactacagcgtggcgtcgggctctgcccctgtcgtgtcccttggaaactgtctttgttgttggagtggtgtgcggcgaccccgtgactaaggtgaagccgcggaggagggtctggagcccagagtgctgtcaagaccccggaactggcgtgagcagccgcaggcgaaagtggggcaaccctgagtag

SEQ ID NO: 23822 - DNA, 675 bp, synthetic construct
  misc_feature 1..675: note = Description of Artificial Sequence: Synthetic coding sequence
  source 1..675: mol_type = other DNA
atggccgagctgtaccgggtgctggaggccggcaagatcggcatctttgagtctcccactggaacgggcaaatccctatcacttatctgtggggctctgagttggttacgggacttcgaacagaaaaagagagaagaggaagctcgactgcttgagactggaactggccccttgcatgatgagaaggacgaaagcttatgtctttcatcctcctgtgaaggcgccgcaggcaccccacggcccgcgggcgagccagcctgggtgacccaatttgtccaaaagaaagaggagagagacctcgtggatcgactgaaggcagaacaagccagaagaaagcagcgggaagaacgactacagcaactacagcatcgcgtgcagctgaagtacgccgcgaagcgcttacggcaggaggaggaggaacgggaaaacctgttgcgtctgagcagggagatgctggagaccggacctgaggcagagagactcgagcagctggaatcaggggaagaagagctagtactggcggagtacgagagtgatgaagagaaaaaagtggcatctcgggtggatgaagacgaagatgatctggaggaagagcatatcacaaagatctattactgttccaggactcattctcagctcgcccagttcgtgcatgaggtgaagaaatctccttag

SEQ ID NO: 23823 - DNA, 2721 bp, synthetic construct
  misc_feature 1..2721: note = Description of Artificial Sequence: Synthetic coding sequence
  source 1..2721: mol_type = other DNA
atggccaacgagacccagaaggtgggcgccatccacttccccttcccattcacaccgtacagcattcaggaggattttatggctgaattgtatagagtgttggaagccggtaaaattgggattttcgaatcacctaccgggaccggaaagagtctttcactgatttgcggggccctgtcttggctaagagacttcgaacaaaagaagcgtgaggaagaggccaggctgttggagaccgggactggaccactacatgatgagaaggatgaatctctttgtctgtcaagcagctgtgagggagccgccggaacccctaggcccgctggggagcctgcatgggtgactcagttcgtgcagaaaaaggaggagcgagatttggtggatcggctgaaggccgagcaggctagacggaagcaacgtgaagagaggctgcagcagctgcaacatcgcgtgcagttaaagtacgccgcaaagcgactgagacaggaagaagaggagcgcgagaacctactgcgactcagcagggagatgctcgaaacagggccggaagcggaacggctcgagcagctggaaagtggagaagaagaactcgtgttagctgaatatgagagcgacgaggaaaagaaggtggctagccgagtggatgaagacgaggacgacctggaggaagaacacatcaccaagatctattactgctctcggacccacagccaactagcccaattcgtgcacgaggttaaaaaatccccctttgggaaggatgtccgacttgtttctctcggttcaagacagaacttatgcgtgaacgaggatgtgaagagtttgggatctgtccaactgatcaacgaccgctgtgtagacatgcagagatcaagacacgagaaaaaaaagggagccgaggaggagaagccgaagcggcggcggcaggagaagcaggcagcttgcccattctacaatcatgagcagatgggcctccttcgagatgaggccctggccgaagtaaaagacatggagcagttactagcactgggtaaagaggcccgggcgtgcccttactatggcagtagactggctatacctgctgcccagctggtagtcctgccctatcagatgctgcttcacgcagcaactcggcaggctgcaggtatccgactccaggatcaggtggtcatcattgacgaggcgcataatcttatagacacaattaccggcatgcactcggtagaagtttctggatcacagctgtgccaggcccattcccagcttctccagtacgttgaacgctacggtaagagactaaaggccaagaacttgatgtatctaaaacagattctctatttgctggaaaagttcgtcgcagtcctgggcggcaatattaagcagaatcccaatacccaatcactgagccaaacaggaaccgaactaaaaaccattaacgactttctgttccaaagccagatcgacaacataaatctgttcaaggtgcaacggtattgcgagaaaagcatgatcagccgaaaactgtttggtttcacagagaggtatggggctgtcttttcatccagggagcagcctaagctcgcgggcttccagcaattcctgcagtctcttcaacctaggaccacagaggctctggcagctccagccgatgaatcccaggccagtactctccggcctgcatctcctctgatgcacattcaaggttttctggccgccctgactactgccaaccaggatggcagagtcattctaagcagacagggaagcctctcacagagcactctaaaatttctgctcctcaatccggccgtgcacttcgcccaggtggttaaggaatgtcgggcagtggttatagcggggggtaccatgcagcccgtctccgacttcagacaacagctgctagcatgcgcaggggtagaagccgagagagtggtggaattcagctgtggccatgtgatcccaccggacaacattctgcctctggtgatatgttctggtatcagtaatcagcccctggaatttactttccaaaagagggaacttccccaaatgatggatgaagtcggccgtattctgtgcaatctctgtggcgtggttccgggaggggttgtttgtttctttccttcatatgaatatctgcggcaggtacacgcacattgggagaaaggaggactgctgggaaggttggctgcgcgcaagaaaatttttcaagaacccaagtccgcccatcaggttgagcaggtgttgctcgcctacagccgatgcatccaagcctgtggccaggagaggggtcaggtgaccggcgccctgctgctctccgtggtgggaggcaaaatgtcagaagggatcaatttctcagataacctggggagatgtgtagtaatggtaggcatgccttttcctaatatcaggtctgcagaacttcaggagaaaatggcctacctcgatcaaactcttccacgggcgcccggccaggcgcctccaggaaaagcgctcgtcgagaatctctgtatgaaggctgtgaaccagagcatcggccgggcgataaggcaccaaaaggatttcgctagcgtggtgctgctggatcaacggtacgccaggcctcctgtgcttgctaagctccccgcttggattcgggcccgggtcgaagtcaaggccacttttggtccagctatagccgccgtgcagaagttccacagggaaaagtccgccagtagttag

SEQ ID NO: 23824 - DNA, 2913 bp, synthetic construct
  misc_feature 1..2913: note = Description of Artificial Sequence: Synthetic coding sequence
  source 1..2913: mol_type = other DNA
atggccaacgagacccagaaggtgggcgccatccacttccccttcccattcaccccctattcaatccaggaggacttcatggctgaactctacagagtgctggaggcgggaaaaattgggattttcgaatctccaaccgggaccggcaaaagccttagcctgatctgcggagcattaagctggctgcgtgattttgagcagaaaaaacgggaagaagaggcccgcctgctcgagacaggaactgggccacttcacgatgaaaaagatgagagtctttgtctgagcagttcctgcgaaggtgccgccggcaccccgaggccagccggagagcccgcttgggtgacccagtttgtccaaaagaaagaggaaagagatctggtcgataggctcaaagctgagcaggcgagaaggaaacaacgcgaagagcggcttcaacaactgcagcaccgcgtccagttgaagtacgcggccaagaggctccggcaggaggaagaagaaagggagaacctgttgaggttaagtcgggagatgttggaaactggccctgaggccgaaagactagagcagctagaatcaggcgaagaggagctggtcctcgccgagtacgagagtgatgaggagaaaaaggtcgccagccgggtggacgaggatgaggatgacctggaggaagagcacataaccaagatttactactgctctcgtacccactcccaactggctcaatttgtgcacgaagttaagaaaagcccttttggcaaagatgtaagactggtgtcccttggaagccgccagaatctgtgtgtgaatgaggacgtgaaaagtctgggttcagtgcagctgatcaatgatcgctgtgtggacatgcagcggtcgcgccatgagaaaaaaaaaggtgctgaggaggagaaacccaaacggcgccggcaggaaaaacaagccgcatgccccttctataatcacgaacagatggggctgttgagagatgaagctctggctgaggttaaagatatggaacagctactggcactaggaaaggaagcgcgcgcttgcccttattacggctcacgcctggctatccccgctgcacagctggtggtactcccctaccagatgctccttcacgctgccactcggcaggcagcagggatcaggttacaggaccaggtggtcattattgatgaagcacacaaccttatcgatacaatcacggggatgcactctgtcgaggttagcggcagtcagttgtgtcaggcacatagtcagcttttacagtacgtagaacggtacggaaaacggctgaaagctaaaaatctgatgtatctgaagcagattctgtacctcctggagaagttcgttgctgtccttggcggtaacatcaaacagaatcctaatacacagtctctgtcacagactgggacggagctgaagaccatcaacgacttcctgttccagagtcagattgataacatcaacctgttcaaggtgcagaggtactgtgagaaaagtatgatttcacgtaaactgtttggctttaccgaacgatatggtgccgtgttcagctcgcgggaacagcccaagttagccggattccagcagtttttacagtcgctccagcctcgcacaacagaagctctcgccgctcctgctgatgaaagccaggcctccactttgcgccctgcttctcctcttatgcatatccaaggtttcctcgccgccctaacgactgccaatcaggatggccgagtgatattgagccggcaaggctccctgtcacagtctactctgaagttcttactcctgaatccagccgttcatttcgcacaggtcgtgaaggagtgtcgggcagtcgtgatcgccggcggcactatgcagccggtgtccgactttagacagcaacttctggcatgtgccggagtcgaggcggagagagtggtggagttctcttgtggccacgtaattccacctgataatatcctgcctctggtgatctgctctggtatcagtaaccagcccttggagtttactttccagaagcgcgaacttcctcagatgatggacgaagtaggtaggattctctgtaatctgtgcggtgtggtgccaggcggtgtggtctgtttctttccctcttacgagtatctgcgccaagtgcacgcacactgggagaaaggggggctgttggggaggctagctgctaggaaaaagattttccaggaacctaagtcagctcaccaagtggagcaggtactgctcgcctattcccgctgcatccaggcctgtggtcaggagcgaggacaggtaacgggagcactgctcttgagcgtggttggcggaaagatgtctgagggaatcaacttttccgataatctaggtagatgcgttgttatggtgggcatgcccttccccaacatcagatcggctgagctgcaggaaaaaatggcatatctggaccagactctctctccacgacccgggacccctcgcgagggctccgggggcgagcccgtccacgaggggaggcagcctgtccaccggcaaggtcaccaagctcctgagggattttgtcagcggagcgccccgggcccagctatctgtccggctccctgccctggtcaagctgcggggctcgacccgagcccttgtggggggcagtcttatctctggccccgccattgctgttgtgcagaagtgagccccggggaggttggcctcttcctcatggggaaccataccaccgcctggcgccgcgcccttcctctgtcttgtccactggagacagtgtttgtggtgggggttgtgtgcggggacccagtgacaaaggtgaagcctaggcgacgggtctggtcacctgaatgttgtcaggaccctggtactggagtatccagtagacgacgaaagtggggcaacccggagtag

SEQ ID NO: 23825 - DNA, 4293 bp, synthetic construct
  misc_feature 1..4293: note = Description of Artificial Sequence: Synthetic coding sequence
  source 1..4293: mol_type = other DNA
atgaccgtgttccggcaggagaacgtggacgactactacgacaccggcgaggagctcggaagtgggcaattcgcggtggttaagaagtgtcgcgaaaaatcaactggccttcagtatgctgccaagtttattaaaaaacggaggaccaaatcctcccgcagaggcgtatcgcgggaagatatcgagagggaggtgagcatcctcaaggaaatacagcaccccaatgttataactttacatgaggtgtatgagaacaaaaccgacgtgatccttattcttgagttggtcgctggaggagaactgttcgatttcctggccgagaaagaatccctgaccgaagaagaggcgactgaattcttgaagcaaattctgaatggagtctattatctacatagcctgcagattgcgcatttcgacctgaaaccagaaaacatcatgcttctggaccgtaacgtcccaaagccacgtataaaaatcatagatttcgggctagctcacaaaatcgatttcggaaacgagtttaagaatatcttcggcacccctgaatttgtggctccagagatagtgaattacgaaccgctgggcctagaagccgatatgtggtcaatcggggttatcacatacatcctactgtcaggtgcctcaccttttctgggcgacaccaaacaagagaccctagcaaatgtttcagcggtgaattacgaattcgaggacgagtacttctcaaatacctccgcccttgcaaaagattttattagaaggctgttagtgaaggatccaaagaaaagaatgaccattcaagactctctgcagcacccctggattaagccgaaggatacacagcaggccctgtctagaaaagcaagcgccgtgaacatggagaaattcaagaaattcgctgctagaaaaaaatggaagcagtctgtgcgccttatctctctatgtcagcgcctgagcaggagcttcttatccagatctaatatgtctgtagcccgatccgacgacaccctcgacgaggaggactccttcgttatgaaagcgattatccacgccataaatgatgataatgtgcctgggctgcaacacctcctggggtctctgtccaattacgacgttaaccagccaaataaacatggcacgccacctctgctgatcgcggccgggtgcggcaatatccagattctacagctgttgattaaacggggctcacgcattgacgtgcaggacaagggggggagcaacgctgtttattgggccgcccgacatgggcatgtggataccctgaaattcctgtcagagaataaatgtcctttagatgttaaagacaagtcaggcgaaatggccctgcatgtggcggcgcggtacggccacgcagatgtcgcccaactgctgtgttcctttggctcaaatcctaacatccaggataaggaggaggaaacaccgctgcactgtgcagcctggcacggatactattctgtggccaaagctctttgcgaggctggctgcaacgtgaatattaaaaatagggagggcgagacccctcttcttaccgcaagcgcccgcggctaccacgacatcgtggagtgtctagctgagcatggagctgatctgaatgcctgcgataaagacggtcatattgcactccatctcgctgttcggaggtgtcagatggaggtcattaagactctcttaagccagggttgtttcgtggattaccaagatagacacggcaacacccctttacacgtggcttgtaaggatgggaacatgcctattgtggtagccttgtgcgaggctaactgtaacctcgatatctccaataaatatgggcggacgcctctgcatcttgctgcaaataacggtatcctggacgtggtgcgctacctgtgcctgatgggagccagtgtggaagccctgacaactgacgggaagacagctgaggacttagcgcggagcgagcagcatgagcatgtagccggattgttagctcggctacgaaaggatacccaccgggggctttttattcaacagctgcgacccactcaaaatctgcaaccacgtataaagctcaaactatttggacacagcggcagcggtaagaccactcttgtcgagtcccttaaatgtggcctgctccgcagttttttcagaaggaggcgtcccaggctgtcttctaccaactcttcacgctttccgccctctcccctggctagcaaacccaccgtctccgtcagtatcaataatttataccctggttgtgagaatgtgtctgtgcggtcaagatctatgatgttcgagccggggctgacgaagggtatgctcgaggtgtttgttgcaccaactcaccacccccattgctccgccgacgaccaaagcactaaagccattgatattcagaatgcctaccttaatggcgttggcgacttttccgtttgggagttttccgggaacccagtgtacttctgctgttatgattattttgccgctaatgaccccacctccattcacgtcgtggtgttttccctggaggagccatatgagattcagttgaaccaggtgattttctggctgtctttcctgaagagtctggtgccagtcgaagaaccaatcgccttcggagggaagctcaagaatccactgcaggtcgtcctggttgcaactcatgccgacatcatgaacgttcctcgtcccgccgggggagaattcggatatgataaggacacgagtctgctgaaagagatcaggaacaggttcgggaatgacctccacataagtaataaactcttcgtactggacgccggagcatctggctcaaaggacatgaaggtgctgcggaatcacctgcaggagattaggtcacagattgttagtgtctgccccccaatgacccatttgtgcgaaaagatcattagcaccctgcccagctggcgaaagctgaatggcccgaaccagctgatgagtctccagcaatttgtatatgatgtgcaggatcagcttaacccccttgcctcggaggaagacctcaggagaatagctcagcagctgcactccacaggcgaaatcaatattatgcagagtgagactgtgcaggacgttctgctgctcgaccctcggtggctctgtaccaacgtactcggtaagttgctaagcgttgaaactccccgggccttacaccattatcgaggtcggtatactgtcgaagatatccagagactagtccctgactctgatgtggaagagcttttgcagatcctggacgccatggacatatgcgcacgcgacctgagctctggaaccatggtggatgtacccgccttgatcaaaactgataatttacatcggtcttgggctgacgaggaggatgaggtaatggtctacggaggagttaggatcgtacccgtagagcatctgactccattcccctgcggtatattccacaaggtgcaggtcaacctctgtaggtggatccaccagcaaagtaccgagggtgacgctgacatcagattgtgggtgaatggatgtaagttggccaacagaggcgccgagctattggtgctgctggtgaaccatgggcaaggtatagaggtgcaggtaagaggactggaaactgagaagatcaagtgttgcttacttctcgattctgtatgttcaacaatagagaacgtgatggcaaccacattgccaggtttactcacagttaagcattacctgagcccacagcagcttagagagcaccatgaacccgtcatgatctaccagccccgagattttttccgagcacagactttgaaggagacatctctaactaatactatgggcggatataaggagagcttttcatcaataatgtgctttggctgccacgatgtgtacagtcaagcctcattgggaatggacattcatgctagtgacttaaatctgctcacaagaagaaagctttccaggctactggatcccccagatccccttggaaaagattggtgtctgctcgctatgaacttaggcctccccgacctggtggccaagtacaatacaagtaacggagctcccaaagacttcctcccttctcctctgcacgccctgctgcgagagtggacgacataccctgaatcaacggtggggactctcatgtccaagctccgtgaacttggcaggagagacgccgccgactttctgctgaaggcttcgtcagtttttaaaatcaatctcgacgggaatggccaagaggcttacgcctcaagctgtaattccgggacatcttacaacagtatctcttctgttgtatcgcgctag

SEQ ID NO: 23826 - DNA, 4293 bp, synthetic construct
  misc_feature 1..4293: note = Description of Artificial Sequence: Synthetic coding sequence
  source 1..4293: mol_type = other DNA
atgaccgtgttccggcaggagaacgtggacgactactacgacaccggggaggaactgggctccgggcaattcgcggtagtcaagaagtgtcgggaaaagtcaacaggtctgcagtacgcagccaagtttattaagaagcgtcgaacgaaatcgtctcggcgcggcgtctctagggaagatattgagagagaggtgtcgatcctcaaagaaatccagcaccctaacgtgattactttgcatgaggtctatgagaacaagactgatgtgatcctcatcctcgagttagtggccggcggtgaactatttgattttttagcagaaaaagagagcttgaccgaggaagaggcaacagaattcttgaagcagatactaaatggggtctattaccttcattcactgcagattgctcacttcgacctgaagccagagaacatcatgctgctggacagaaacgtccctaaaccccgcattaagatcattgattttggactggcccacaaaattgactttggcaatgaatttaaaaatatatttgggacccctgagttcgtggcccccgaaattgtgaattatgagccacttgggctggaggcagatatgtggagcataggagtgattacctatatccttctcagcggggccagtccatttctcggagatacaaaacaggaaacactggccaacgtctctgccgttaattacgagtttgaggacgaatatttctcaaacacttcagctttagcgaaggacttcatcaggaggcttctcgttaaggatccaaagaagaggatgacaatacaagacagtctccagcacccatggattaagccgaaggatacccaacaggccctgagccgtaaggcatctgctgtgaatatggagaagtttaagaagtttgcagctcgtaaaaaatggaagcagtccgtacggctcatttcattatgtcagcgtctctctcgttcgttccttagccgttctaatatgagcgtcgctaggagcgatgatacgctggacgaagaggactccttcgtgatgaaggcaattattcatgctatcaacgatgataacgtccccggattgcagcacctcttggggtcgctgagtaactacgatgtgaatcagccgaacaaacatggaactccaccactgctgatagccgcagggtgcggtaatattcagatcctccagcttttgatcaagcgtggatctcgtatcgacgtacaggacaaaggggggtctaacgccgtatactgggcagcccgacacgggcatgtcgacacactaaaattcctgtcggagaacaaatgcccgttagacgtcaaagacaaaagtggtgaaatggcgttacacgtagctgcacgatacggtcacgctgatgtagcgcagctcttgtgtagctttgggtccaaccctaatattcaagacaaagaagaggaaaccccactgcattgcgctgcgtggcacggctactatagcgttgccaaggccctgtgcgaggccggctgtaatgtgaatatcaagaatcgcgaaggcgagacacctctactcacggcatctgcccgcggctaccatgatattgtcgaatgcctagcggagcacggagccgatttgaatgcatgtgacaaagacggacacattgccttacatcttgccgtcagacgttgtcagatggaggtgataaaaactcttttgtcacagggctgtttcgtggattaccaggaccggcatggcaacactccgcttcatgtcgcctgcaaggacgggaatatgcctatcgtagtcgccctgtgcgaagccaactgcaacctggatatttctaataagtatggccggacccccttgcatttagccgcgaacaacggaatcctggatgtcgtacgctatctctgcttgatgggagcaagcgtggaggcactaactacggacggaaaaaccgccgaagaccttgcgcgctcagaacaacacgaacacgtggccggcctgttggctcggttgagaaaggatacacaccgggggctttttatccagcagctgcgcccaacacagaacttgcaacccaggatcaagctgaagctttttgggcactctggatctggcaagacaacccttgtggaatctctcaagtgcggccttttgagatcattcttcaggcgacgacggccgaggttgagcagcacaaactcgtctagattcccccctagtcctctggcctcaaaaccaacagtgagtgtgtcaattaacaatttgtaccccgggtgtgagaacgtgtctgttcgctctaggtctatgatgttcgagcctggtctcacaaagggcatgctggaagtgttcgtcgctcctacccaccacccacattgttctgccgacgatcaatcaactaaagcaatcgatatccagaacgcctatctcaacggagtgggggacttttccgtgtgggagtttagcggcaaccccgtctacttttgttgttacgattattttgccgcgaacgatccaacctctatccacgtggtcgtgttcagcctagaagagccttatgagatccagctcaatcaggtgattttctggctgagctttctgaagtcccttgtccctgttgaggagcccatcgcttttgggggcaaattgaaaaatccgctgcaggtggtgttggttgccactcatgctgatatcatgaacgtgccgagacccgcaggcggcgagttcggctacgacaaggataccagcttactgaaggagattagaaacaggtttggtaacgacctccatatttctaataaactctttgtcttagatgctggcgcttcaggttccaaagacatgaaggtgctcaggaaccacctgcaggaaatacgctcgcaaattgtctccgtgtgtcctccgatgactcatctgtgcgagaaaattatttccactctgcccagttggcgcaagctgaacggccccaatcaactgatgagtctgcagcaattcgtgtatgacgttcaggaccaactgaatcctctggctagcgaggaagacctccggcggatcgctcagcagttacactccacaggtgaaatcaacatcatgcagagtgagaccgtacaggacgttctgcttctagatcctcggtggttatgcacgaacgtactgggaaagctgctctcagtggaaacgccccgcgcattgcatcattatcgggggagatacacggtggaggacatccaaagactcgtaccggattccgacgttgaggaacttttgcagattttagatgctatggacatttgcgctcgggacctttcctcaggcacgatggtggacgttcccgctcttatcaagaccgacaatctgcaccgctcatgggccgacgaagaggatgaggtgatggtatacggtggagtaaggatagtcccagtggaacacctaacaccattcccatgcggtattttccacaaagtgcaggtcaatttgtgccggtggattcatcagcaatcaacagagggggatgcggatatccggctgtgggtgaatggctgtaagctggctaacagaggtgctgagctactcgtgctgctggtgaatcacgggcagggaatcgaggtgcaggtgcggggtctggaaacggagaaaattaagtgttgtttactcctggactctgtatgctccacaatcgagaatgttatggccactacactgcctgggctgctaaccgtgaaacactatttgagcccgcagcagctgagggaacaccatgagcccgtaatgatctatcaacccagggacttttttagagcacaaactctgaaggaaacatctctgacgaatactatgggagggtataaggagtcattctcctccattatgtgcttcggttgccacgacgtttattcacaggctagtttgggaatggacatccacgcatccgacctcaatctcctaacacggcggaagctttcgcgactactggatcctccagatcccttgggcaaggactggtgcctgctagccatgaacctgggccttcccgacctagttgctaagtacaatacttccaacggcgcgcctaaagacttcctcccttccccgttgcatgccctgctgcgtgagtggactacatatcctgaatcaacagttgggactctcatgtctaagttaagggagctaggcagaagagatgccgctgattttctgctcaaggcatcgtccgtgttcaagatcaacttagacggtaacgggcaggaggcgtatgctagtagctgcaattccgggacctcttacaatagtatttcttctgttgtctcccggtag

SEQ ID NO: 23827 - DNA, 4368 bp, synthetic construct
  misc_feature 1..4368: note = Description of Artificial Sequence: Synthetic coding sequence
  source 1..4368: mol_type = other DNA
atgaccgtgttccggcaggagaacgtggacgactactacgacaccggtgaggagcttggttcaggccagtttgcggtggttaagaaatgtagggagaagtcgacgggattgcagtatgcagcaaagttcatcaaaaaaaggagaaccaaatccagcaggagaggggtgtcacgcgaggatatagagagggaggtgtctatactgaaggaaattcagcaccctaatgtcatcacactgcatgaagtgtatgagaacaagacagacgtgattttaattcttgaattagtggctggaggggaactgttcgattttcttgccgaaaaggaatctctgaccgaggaagaagcaacggagttcctgaaacagattctcaacggagtgtattatctgcattccctgcagattgcacactttgaccttaagccggagaatatcatgctcctggaccgaaacgtgcccaaaccacgaattaaaatcatagattttggcttggcccacaaaattgattttggcaatgaatttaagaatatatttggaaccccagagttcgtggcaccggagatagtgaattatgagcccctgggcctcgaggcagacatgtggtccattggtgtgatcacctacattctcctctcgggcgcttcgcccttcctgggcgatactaaacaggagacgctcgccaatgtatctgccgtgaactatgaatttgaagatgaatatttctcgaacacttctgcattagctaaagatttcatcaggagattgctggtgaaggatcccaagaaacggatgactatccaagattccttgcaacacccctggattaaacctaaagacactcagcaagcactctccaggaaagcatccgccgtcaacatggagaaatttaagaaattcgctgcaagaaagaagtggaagcagagtgtcagactcatctctttatgccagcgcttatccagatcatttctttcaaggtccaatatgtcagttgccaggtctgatgacaccctggatgaagaggatagctttgtcatgaaggctattattcatgccattaatgacgacaacgtgccgggcttgcagcatctgcttggtagcctcagtaattacgatgtgaaccagcctaacaaacatggcacacctcccctgctgattgcggcaggttgcggaaatattcagatcctgcagctgctcatcaagagagggagcagaatcgatgttcaagacaaagggggctctaacgccgtttactgggccgcacggcatggccacgtggatacacttaagttcctgtctgaaaataagtgtcccttagacgtgaaggataagtcgggggagatggctctgcacgtggctgcccgttacggccacgctgatgtggcacagctgttgtgtagttttggctccaaccctaatatacaggacaaagaagaggagacccccttgcactgcgctgcttggcatggctactattccgtggcgaaagctctatgtgaggcaggatgtaacgtaaatattaaaaatagggagggggagacccccctgctcacagcgtctgcgcggggttaccatgatattgtcgagtgtttggcagaacacggcgccgatttgaacgcctgcgataaggatgggcacatcgctctccatctcgcggtgagaagatgtcaaatggaggtgattaagacattgctgagccaggggtgcttcgtggattaccaggacagacacggaaacacaccgctacatgtcgcctgtaaggacggtaatatgccaatcgtggtggcactatgtgaagctaactgtaatctcgatattagcaacaagtacgggcggacgccactgcatcttgccgctaataacggaattctggacgtggtgagatacctctgtctgatgggtgcctcagtcgaagcccttactacagacggaaagacggctgaagatctcgcgaggtccgagcaacacgagcacgtcgccgggttgcttgccagacttcgcaaggacacacaccggggactgtttatccaacaacttcggcctacccagaacctgcaaccgaggataaaactgaaactctttggtcactctggttccggtaagacaaccctcgtcgagagtctcaaatgtggtctccttaggagcttcttccgacggcggagaccccgactgagttcgacaaatagtagcagatttcctccatctcctctggcatcaaagcccacagttagtgtctcaatcaataatctctacccagggtgtgaaaacgtcagcgtccgttcacggtccatgatgtttgagcctggcctaaccaaggggatgctcgaagtgtttgtggcaccaacccatcatccccactgttccgcggacgatcaaagcaccaaggccatcgacattcaaaatgcttatttgaacggagtgggagatttcagcgtttgggagttctccgggaaccccgtgtatttctgttgttacgactactttgccgctaatgatcctacctccatacatgtcgtggtgtttagtttggaggaaccctatgaaattcagctgaaccaagtgattttttggctttcttttctaaagtcactggtaccagtcgaagaacccatagccttcggcggcaagctgaaaaatccgctgcaggtggttctcgtcgctacccatgccgacattatgaatgtacccaggcctgccgggggcgagttcggctatgacaaagatacgtcactgttgaaggaaattagaaatcgcttcggcaacgatctccatattagcaataagctctttgttttagacgcaggagcgtctggctctaaagacatgaaagtcctcaggaatcacttgcaggagattcgatcgcaaatcgtgtctaagactctacccttcacacctgacattctggtaggagtgccactgtggcatcaccagaagatcggtggctctcccgtatgtcctcctatgacgcatttatgcgagaagatcatcagcaccctgccaagctggagaaaattgaatgggcctaatcaattgatgagcctgcaacagttcgtgtacgatgtgcaagatcagttaaaccctctggcatccgaagaggaccttcgtcgtattgcacaacagttacattcgactggagagataaacatcatgcagtcagaaaccgtacaggacgtacttctattggatccaagatggttgtgcactaacgtccttgggaagttactgtctgtggagacaccacgagccctccaccattatcggggccgatataccgtggaggatatccagcggctggtgcccgactctgacgtggaagagctcttgcagatcctcgatgccatggacatctgtgcacgcgacctttcttccggcacgatggtggacgttcctgctctgatcaaaaccgacaacctacatcggtcatgggccgacgaggaggacgaggttatggtgtacggcggcgtccgcatcgtgcccgtcgagcacttgaccccttttccctgtggaattttccataaagtacaggttaatctgtgcaggtggattcaccaacagagcaccgaaggcgatgccgatatcaggctctgggttaacgggtgtaaactggcgaatagaggcgccgaactgcttgtcttactggtgaaccacggacagggtattgaagtccaagtgcgcggtttggaaactgaaaaaattaagtgttgcttgttactagattctgtgtgtagcacaatagaaaacgtcatggccactacccttcccggcttacttaccgtaaagcattatttatccccccagcaattgcgcgaacaccacgaaccggtgatgatctatcagcctcgtgattttttcagagcacaaacactgaaagaaacgtcactgaccaataccatgggcggctataaggaaagcttctcatctattatgtgttttgggtgtcacgacgtgtactcccaggcctctcttggcatggacatccatgccagcgacctgaaccttcttacccggcggaagctgagtaggctgctggacccgcctgacccgctcggcaaagactggtgcctgctagcgatgaacctggggcttcccgatctcgtggctaagtacaacacaagtaacggtgctccaaaggactttctgcccagtccattacatgctttgttacgtgagtggacgacctaccccgaaagtaccgtaggtaccctcatgagcaaacttcgcgaactgggacggcgcgacgcggcggactttctcctcaaggccagctctgtgtttaaaattaatctggacgggaatggacaggaagcatacgctagtagttgcaactcaggcacttcctacaatagcataagctccgttgtgtcccgctag

SEQ ID NO: 23828 - DNA, 4293 bp, synthetic construct
  misc_feature 1..4293: note = Description of Artificial Sequence: Synthetic coding sequence
  source 1..4293: mol_type = other DNA
atgaccgtgttccggcaggagaacgtggacgactactacgacaccggtgaggagctggggtctggccaattcgcagttgttaagaagtgcagagagaagagcaccgggttgcagtatgccgcgaagttcatcaaaaagcggcgtacaaagagctctcggaggggggtctcccgggaggatattgaacgagaagtgagcatcctgaaagagattcaacaccccaacgttatcactcttcacgaggtgtatgaaaataaaacagatgttatactgatccttgagctcgtcgcaggcggagaactgttcgacttcctggcagaaaaggagagcctgaccgaggaggaggccacagaattcctgaagcagatcttgaacggagtttactacctacattctctgcagatcgcccattttgacctgaaacctgagaacatcatgctgcttgaccgcaatgtgcctaagcctcggattaaaattatcgacttcggcctagcccacaagatagacttcgggaacgaatttaagaacatctttggcacaccagaatttgtcgcgcctgagattgttaattatgagccacttggactggaggccgatatgtggtcgattggcgtgattacttacattctgttgtccggggcatctccctttctgggagatactaagcaggagactttggcaaacgtctctgccgtcaactacgagtttgaagacgagtatttctcgaacacctccgctctggccaaggatttcattaggaggctgctcgtgaaagatcctaagaagcgcatgaccatccaagatagcctgcagcatccttggattaaaccgaaagacacccaacaggccctgagtcgaaaagcctccgccgtcaatatggagaagttcaagaaatttgcagctaggaagaagtggaagcagtcagtcagattaatttctctgtgtcagcgtctgagtaggtcatttctatcaaggagtaatatgtcagtcgctagaagcgatgatacccttgatgaggaggattcctttgtgatgaaagccattattcacgctattaatgacgataacgttccggggctgcagcacttattggggtcgttgtcaaactacgacgtgaatcagccaaacaagcatggcacccctccactgcttatcgcagccgggtgcggcaacattcaaatccttcaactgctcattaagaggggatccagaatcgatgtgcaggacaaagggggcagcaacgcggtgtactgggctgcccggcacgggcatgtcgacactctcaaattcttgagtgagaataaatgccctctcgatgtgaaggataaatccggagagatggccctgcatgtggctgcaagatatggccatgccgacgtagctcaactgctctgctcctttggatccaacccaaacatacaggataaagaggaggaaacccccctgcactgcgcagcgtggcatggttactattccgtggctaaagcgttgtgcgaggccggatgcaatgtaaatatcaaaaatcgcgaaggcgagacccccctactgacggccagcgcaagggggtaccatgatatcgtagaatgcttagccgagcatggggctgatcttaatgcatgtgataaagacggacacatagctctgcatctcgcagtgagaagatgccagatggaagttattaaaactctgttatcccagggttgtttcgtcgattaccaggatcggcatggaaacaccccattacacgttgcgtgtaaggatggaaacatgcctattgtggtggcactgtgcgaggccaattgcaacttggatatctcaaataagtatgggcgaacacctctacatctcgccgctaataacggtatccttgatgttgtgcgttacctctgtttgatgggcgcctctgtggaggcactgactaccgatggtaagactgctgaagatctcgctagaagtgagcagcatgagcatgttgccggacttttggctcgtctgcgaaaggacactcatcgcgggctgtttattcagcagctacgtccaacacagaacctgcagcctcgaatcaagctgaaactgttcggtcacagtggtagtggaaaaaccacacttgtggaatctcttaaatgcggtctgctgcgtagttttttcaggcgccgcagaccacgactgtcctccacaaactccagtaggttccctcctagcccattggcctccaagcctacagtgagcgtgtcgatcaacaacttgtaccccggctgtgagaacgtcagcgtccggtccaggtccatgatgttcgagcccgggttaactaaagggatgctggaggtatttgttgctcccacacaccatccacactgctctgccgatgaccagtctacaaaagcaatcgacattcaaaacgcgtatctgaacggcgtaggggactttagcgtttgggaattttctggcaacccggtttacttttgttgctacgattatttcgcagccaatgaccctacctcaatacacgttgtcgtcttctcactcgaagaaccttatgagatacagctgaatcaggtgattttttggctttcgttcttaaagtccctagtgcccgttgaggaacctatcgcctttggaggtaagctcaaaaatcccctgcaagtggtcttggtcgcaacgcatgcggacatcatgaacgtgcctcgcccagctggaggtgaattcggatacgataaagacacctctttattgaaagagatccgcaacagatttggcaatgatcttcacatctcaaacaaattgttcgttctggatgccggcgcgtcagggtcgaaggatatgaaggtgttgcgaaatcatctgcaagaaatcaggagccagatcgtctcagtgtgtccaccgatgacgcacctctgtgaaaaaattatctccaccctgccgagctggcgtaagttaaacggccctaatcagctcatgtctctgcagcaatttgtgtacgacgtgcaagaccaacttaatcctctggcatcagaagaggatctgagacgcatcgcgcagcagcttcactcaaccggcgaaatcaatatcatgcaatctgaaaccgtccaggacgtgttgctgctggatcctcgatggctgtgtaccaatgtgctgggtaagctgcttagcgtggagactccaagagctttgcaccactatcggggccgatacacggtggaagacatccagagacttgttccggattctgatgtggaagagcttctgcagatcctggacgctatggatatatgcgccagagatctgtcatctggaacaatggtggacgttcctgccctaataaaaacggataacctccaccggtcgtgggcagacgaggaggatgaagttatggtgtacggcggcgtgcggattgtgccagtagagcaccttacaccgttcccctgcggcatttttcacaaagttcaagttaacctgtgtcgctggattcaccagcagagcaccgaaggcgacgccgacattagactgtgggtcaatggctgcaagctggcaaaccgcggagctgagctcttagttcttctcgtgaaccatggtcaaggcattgaggtacaggtccgcggcctggagaccgaaaagatcaaatgctgtctcttgctcgacagcgtgtgcagtactattgaaaacgtaatggccaccacgctgcctggactgctgaccgtcaaacactacctgagtccacagcagctcagagaacatcatgagcccgtcatgatttaccagcctcgcgacttcttccgcgcacagacgctgaaagagacctcattaacaaacacaatgggaggatataaagaatccttcagttctatcatgtgcttcggctgtcacgacgtctactctcaggcctctctcggcatggatatccacgccagtgacctaaatctactgactagacgaaaacttagcagactgctggacccgcccgacccgctgggaaaagactggtgtctgctggctatgaatctcggcttgccggacttggtagctaaatataacacttctaatggtgcccccaaggatttcctgccctcaccccttcatgctttacttagggagtggacaacatacccagaaagcacggtgggaaccctgatgtccaagctgagagagttaggtaggcgggacgctgcagatttcttactgaaagcttcctcggtgttcaagatcaatctggatggaaatggtcaggaggcgtacgcgtcgtcatgcaactctggcacctcctataactcgatctctagtgtggtttcaagatag
